(19) United States
(12) Patent Application Publication
(10) Pub. No.: US 2026/0058010 A1
(43) Pub. Date: Feb. 26, 2026

(54) METHOD FOR CLASSIFICATION OF CANCER

(71) Applicants: UNIVERSITAET HEIDELBERG, Heidelberg (DE); DEUTSCHES KREBSFORSCHUNGZENTRUM STIFTUNG DES OEFFENTLICHEN RECHTS, Heidelberg (DE)

(72) Inventors: Martin SILL, Heidelberg (DE); Stefan PFISTER, Heidelberg (DE); David JONES, Heidelberg (DE); Andreas VON DEIMLING, Heidelberg (DE); David CAPPER, Heidelberg (DE); Volker HOVESTADT, Heidelberg (DE); Felix SAHM, Heidelberg (DE); Daniel SCHRIMPF, Heidelberg (DE)

(73) Assignees: DEUTSCHES KREBSFORSCHUNGSZENTRUM STIFTUNG DES OEFFENTLICHEN RECHTS, Heidelberg (DE); UNIVERSITAET HEIDELBERG, Heidelberg (DE)

(21) Appl. No.: 18/683,110

(22) PCT Filed: Aug. 12, 2022
(86) PCT No.: PCT/US2022/074920

§ 371 Date: Feb. 12, 2024

(30) Foreign Application Priority Data
Aug. 12, 2021 (EP) 21190938.7

(51) Int. Cl. G16H 50/20; G16B 20/00; G16B 40/20; G16B 40/30

(52) U.S. Cl. CPC G16H 50/20; G16B 20/00; G16B 40/20; G16B 40/30

(57) ABSTRACT

The present disclosure pertains to an in vitro method for the diagnostic classification of cancer based on the biological state of specific genomic sites. The disclosure provides a method that allows for a classification of a tumour sample obtained from a patient by analysing a multitude, preferably genome wide, collection of gene sites, combining the biological state of the analysed gene sites into a biological state pattern and comparing with pre-determined biological state patterns pertaining to different cancer types or tumour species. The disclosure is in particular useful for classifying cancer e.g. of the central nervous system, such as brain tumour samples and tumours of the spinal cord, since these are characterized by a large variety of distinct tumour species which have different prognostic values and require a developed treatment regime for each species in the clinical context. However, other cancers could similarly profit from the disclosure, for example sarcomas.

### FIELD OF THE DISCLOSURE

[0001] The present disclosure pertains to the classification of cancer, in particular to a computer-implemented method for the diagnostic classification of cancer and/or an in vitro method for classification of cancer based on the biological state of specific genomic DNA sites or transcripts. The disclosure provides a method that allows for a classification of a cancer sample, specifically a tumour sample obtained from a patient by analysing a multitude, preferably genome wide, of gene sites, combining the biological state of the analysed gene sites into a biological state pattern and comparing it directly and/or indirectly with pre-determined biological state patterns pertaining to different cancer types or tumour species. The disclosure is in particular useful for classifying cancer of the central nervous system, i.e. brain tumour samples and/or tumours of the spinal cord, since these need to be correctly identified from a large variety of distinct tumour species which have different prognostic values and require a developed treatment regime for each species in the clinical context. However, other cancers could similarly profit from the disclosure, for example sarcomas.

### INCORPORATION BY REFERENCE OF SEQUENCE LISTING

[0002] The sequence listing in an XML, named as 41228_ReCorrected SequenceListing.xml of 162,225,459 bytes, created on Oct. 6, 2025, and submitted to the United States Patent and Trademark Office via the United States Postal Service, is incorporated herein by reference.

### BACKGROUND

[0003] When looking at brain tumour entities alone, there are more than 100 different entities listed in the World Health Organisation classification. Many of these show complex patterns of potentially overlapping histological features. Moreover, even histologically identical tumours can belong to different molecular groups with very different treatment requirements and prognosis. The same is true for tumours of the spinal cord and tumours originating in tissues outside the central nervous system. Therefore, more advanced diagnostic tools are needed. Epigenetic patterns, for example the epigenetic states of different gene sites, play a critical role in development, differentiation and pathogenesis of diseases such as multiple sclerosis, diabetes, schizophrenia, aging, and multiple forms of cancer including tumours of the central nervous system. Tumour entities originate from different precursor-cell populations which are transformed by genetic and epigenetic alterations. It is now recognized that many tumour entities, including the ones of the central nervous system, that are of distinct biological groups are not always distinguishable by their histology. Most tumour entities display varied histological spectra with no clear boundaries. Epigenetic modifications, such as methylation, preserve the information of the cell of origin, its original identity. Therefore, methylation data, for example DNA methylation patterns, have a great potential to identify molecular subgroups of tumours, such as tumours of the central nervous system. Similar results can be obtained by analysing the transcripts of the respective genes of interest.

[0004] Still, treatment planning and in particular treatment success in many cancers, and in particular in cancers of the central nervous system, is highly dependent on an early and accurate diagnosis and classification of the tumour. In view of the above, new methods that overcome at least some of the problems in the art are beneficial.

### SUMMARY

[0005] The present disclosure seeks to provide a strategy and method for the diagnostic classification of cancer samples with higher efficiency, specificity and sensitivity.

[0006] This object of the present invention is solved by the features of the independent claims. Preferred embodiments are defined in the dependent claims. Any “aspect”, “example” and “embodiment” of the description not falling within the scope of the claims does not form part of the invention and is provided for illustrative purposes only.

[0007] According to an independent aspect of the present disclosure, a computer-implemented method for diagnostic classification of cancer is provided. The method includes classifying a cancer using a classification algorithm based on biological states or biological state patterns of a set of gene sites of a cancer sample.

[0008] The classification algorithm is trained using biological data derived from classified cancer types, such as pre-classified cancer types. In particular, the cancer types can be pre-classified and/or can be new cancer types which are identified using the classification algorithm. For example, the classification algorithm may classify a cancer sample as unknown, wherein such unknown cancer samples can then be further analysed to determine a cancer type thereof. The further analysis may be conducted by various means, such as software and/or medical personnel.

[0009] The classification algorithm is trained using at least data pertaining to biological states of the gene sites in Table 1 (SEQ ID No. 1 to SEQ ID No. 688). By training the classification algorithm with the data of all gene sites in Table 1, an efficient and flexible classification tool can be provided.

[0010] In particular, a cancer sample can be classified using:
[0011] (i) cancer sample data of all 688 gene sites in Table 1, or
[0012] (ii) cancer sample data of a subset of the 688 gene sites in Table 1, such as at least 3 gene sites of the cancer sample genome.

[0013] In other words, the classification algorithm is trained with biological data pertaining to all 688 gene sites in Table 1, but for the classification of a cancer sample, it might not be necessary to provide cancer sample data of all 688 gene sites. The number of gene sites used to classify the cancer sample can be selected depending on circumstances, such as data available from the cancer sample (e.g., it could be that only data pertaining to a subset of the 688 gene sites are available for analysis), time constraints (the fewer the gene sites, the faster the analysis), sensitivity requirements (the higher the number of gene sites, the higher the accuracy of the analysis), and the like.

[0014] In view of the above, the computer-implemented method for the diagnostic classification of cancer may reduce the processing resources used by a GPU and/or reduce the power consumed by a GPU. Moreover, by using cancer sample data of a subset of the 688 gene sites in Table 1, such as at least 3 gene sites of the cancer sample genome, the performance, power consumption, and/or programming flexibility of a GPU that performs the method for the diagnostic classification of cancer may be improved.

[0015] Preferably, the set of gene sites comprises at least 3 gene sites of the cancer sample genome selected from a list consisting of the gene sites in Table 1 of this document.

[0016] Preferably, the biological states of the gene sites comprise the biological states of the gene sites as listed in Table 1 of this document and preferably up to 20 (or 15 or 12 kb) upstream and/or downstream of each of said gene sites. For example, the biological states of the gene sites comprise the biological states of the gene sites as listed in Table 1 and up to 10 kb, preferably up to 8 kb or up to 6 kb or up to 4 kb or up to 2 kb, upstream and/or downstream of the gene sites.

[0017] According to some embodiments, which can be combined with other embodiments described herein, the method further includes determining biological states pertaining to the at least 3 gene sites of the cancer sample genome.

[0018] Additionally, or alternatively, the method further includes determining a biological state pattern of the set of gene sites based on the determined biological state(s) of each of the at least 3 gene sites.

[0019] According to another independent aspect of the present disclosure, a method for diagnostic classification of cancer is provided.

[0020] According to some embodiments, which can be combined with other embodiments described herein, the method for diagnostic classification of cancer is an in-vitro method.

[0021] In a preferred embodiment, the method includes:
[0022] providing a cancer sample,
[0023] determining biological states pertaining to at least 3 gene sites of the cancer sample genome, wherein the gene sites are selected from a list consisting of the gene sites in Table 1,
[0024] determining a biological state pattern based on the determined biological state(s) of each of the at least 3 gene sites, and
[0025] classifying a cancer type based on the determined biological state pattern and pre-determined biological state patterns pertaining to different cancer types.

[0026] Preferably, the biological states of the gene sites comprise the biological states of the gene sites as listed in Table 1 of this document and preferably up to 20 kb (or 15 or 12 kb) upstream and/or downstream of each of said gene sites. For example, the biological states of the gene sites comprise the biological states of the gene sites as listed in Table 1 and preferably up to 10 kb, preferably up to 8 kb or up to 6 kb or up to 4 kb or up to 2 kb, upstream and/or downstream of the gene sites.

[0027] Preferably, the step of determining a biological state pattern comprises combining the biological state(s) of the gene sites into the biological state pattern.

[0028] Preferably, classifying a cancer type comprises comparing the biological state pattern of the set of gene sites with pre-determined biological state patterns derived from the biological state data pertaining to different cancer types.

[0029] Preferably, the cancer is classified as a specific cancer type if the biological state pattern of the set of gene sites differs from the biological state data derived from the pre-classified cancer type by at most 5%, preferably at most 4% or at most 3% or at most 2% or at most 1%.

[0030] Preferably, the biological state is selected from a group including, or consisting of, epigenetic state, mutation state, copy number and RNA expression.

[0031] Preferably, the epigenetic state is a methylation state.

[0032] Preferably, the set of gene sites comprises at least 10, preferably at least 20 or at least 30 or at least 40 or at least 50 or at least 60 or at least 70 or at least 80 or at least 90 or at least 100 or all gene sites of the cancer sample genome in Table 1.

[0033] Preferably, the at least one of the at least 3 gene sites are the ones with the highest values of variable importance (imp_sum) in Tables 3 to 172 of this document. Most preferred, at least one of the at least 3 gene sites is selected from the group including (or consisting) of PTPRN2 (SEQ ID No. 491), PRDM16 (SEQ ID No.477), HDAC4 (SEQ ID No.249), PAX6 (SEQ ID No. 431) and MAD1L1 (SEQ ID No. 349).

[0034] Preferably, the biological states of the gene sites comprise exclusively the biological states of the gene sites as listed in Table 1 without any bases upstream and/or downstream of the gene sites.

[0035] Preferably, the biological state is a methylation state and/or the biological state pattern is a methylation state pattern.

[0036] Preferably, the cancer is a cancer of the central nervous system or a sarcoma. However, the present disclosure is not limited thereto, and other cancer types, such as carcinomas, sarcomas, myelomas, neural crest lineage tumors (e.g., melanoma), leukaemia, lymphoma and mixed types can be classified using the method according to the present invention.

[0037] Preferably, the cancer is a cancer listed in Table 2.

[0038] Preferably, the method further includes determining a further (second) biological state different from the (first) biological state and pertaining to at least one of the gene sites pertaining to the cancer sample genome.

[0039] Preferably, the method further includes correlating the further (second) biological state of the at least one gene site pertaining to the cancer sample genome with the classified cancer type.

[0040] Preferably, the method further includes defining the at least one gene site with the determined further (second) biological state as an alternative or additional biomarker in the diagnosis of the classified cancer types.

[0041] Preferably, the further (second) biological state is selected from the group including, or consisting of, epigenetic state, mutation state, RNA expression and copy number.

[0042] According to another independent aspect of the present disclosure, a computer-readable storage medium is provided. The computer-readable storage medium has computer-executable instructions stored, that, when executed, cause a computer to perform the methods described herein.

[0043] The term “computer-readable storage medium” may refer to any storage device used for storing data accessible by a computer, as well as any other means for providing access to data by a computer. Examples of a storage device-type computer-readable medium include: a magnetic hard disk; a floppy disk; an optical disk, such as a CD-ROM and a DVD; a magnetic tape; a memory chip.

[0044] According to another independent aspect of the present disclosure, a system for diagnosing cancer is provided. The system includes one or more processors and a memory coupled to the one or more processors and comprising instructions executable by the one or more processors to implement the methods described herein.

[0045] The system may be a computer system. The term a “computer system” may refer to a system having a computer, where the computer comprises a computer-readable storage medium embodying software to operate the computer.

[0046] The term “software” is used interchangeably herein with “program” and refers to prescribed rules to operate a computer. Examples of software include: software; code segments; instructions; computer programs; and programmed logic.

[0047] The embodiments of the present disclosure provide a classification of cancer samples in cancer diagnosis using a classification algorithm, which is a machine learning (ML) algorithm.

[0048] The term “classification” refers to a procedure and/or algorithm in which individual items are placed into groups or classes based on quantitative information on one or more characteristics inherent in the items (referred to as traits, variables, characters, features, etc.) and based on a statistical model and/or a training set of previously labelled items. Specifically in the context of the present disclosure, classification preferably means determining which specific cancer type, for example determined by its epigenetic features, a cancer sample belongs to.

[0049] The term “machine learning algorithm” as used throughout the present application refers to an algorithm that builds a model based on training data, in order to make predictions or decisions without being explicitly programmed to do so. In particular, the term “classification” refers to a machine learning algorithm in which individual items are placed into groups or classes based on quantitative information on one or more characteristics inherent in the items (referred to as traits, variables, characters, features, etc.) and based on a statistical model and/or a training data set of previously labelled items. Specifically in the context of the present invention, classification preferably means determining which specific cancer type, for example determined by its epigenetic state pattern, a cancer sample belongs to.

[0050] The term “training data set” in context of the invention refers to a set of biological state data, such as genomic methylation data, of a multitude of tumours that were classified by prior art methods, and therefore are of known tumour species.

[0051] The classification algorithm can be any appropriate algorithm for establishing a correlation between datasets, namely the biological state(s) or biological state pattern(s) of the cancer sample and the biological state data derived from pre-classified cancer types, which can be pre-determined biological state(s) or biological state patterns. Methods for establishing correlation between datasets include, but are not limited to, discriminant analysis (DA) (e.g., linear-, quadratic-, regularized-DA), Discriminant Functional Analysis (DFA), Kernel Methods (e.g., SVM), Multidimensional Scaling (MDS), Nonparametric Methods (e.g., k-Nearest-Neighbour Classifiers), PLS (Partial Least Squares), Tree-Based Methods (e.g., Logic Regression, CART, Random Forest Methods, Boosting/Bagging Methods), Generalized Linear Models (e.g., Logistic Regression), Principal Components based Methods (e.g., SIMCA), Generalized Additive Models, Fuzzy Logic based Methods, Neural Networks and Genetic Algorithms based methods.

[0052] The person skilled on the art will have no problem in selecting an appropriate method/algorithm to establish the correlation between the biological state(s) or biological state pattern(s) of the cancer sample and the biological state data derived from pre-classified cancer types of the present invention. In one embodiment, the method/algorithm used in a correlating the biological state(s) or biological state pattern(s) of the cancer sample and the biological state data derived from pre-classified cancer types of the present invention is selected from the group including (or consisting of) DA (e.g., Linear-, Quadratic-, Regularized Discriminant Analysis), DFA, Kernel Methods (e.g., SVM), MDS, Nonparametric Methods (e.g., k-Nearest-Neighbour Classifiers), PLS (Partial Least Squares), Tree-Based Methods (e.g., Logic Regression, CART, Random Forest Methods, Boosting Methods), Generalized Linear Models (e.g., Logistic Regression), and Principal Components Analysis.

[0053] In an exemplary embodiment, the classification algorithm uses random forest analysis. As used herein the term “random forest analysis” refers to a computational method that is based on the idea of using multiple different decision trees to compute the overall most predicted class (the mode). In a specific application, the mode will be either tumour species or class based on how many decision trees predicted the samples to match a specific class. The class predicted by the majority is selected as the predicted class for the sample. The different decision trees used in this algorithm are trained on a randomly generated subset of the training data set and on a randomly selected set of the variables. This is why this algorithm relies on two hyperparameters: the number of random trees to use, and the number of random variables used to train the different trees.

[0054] The term “biological state” may refer to an epigenetic state, mutation state, RNA expression or copy number of a gene or gene site.

[0055] The term “epigenetic state” refers to a measure for epigenetic changes (or for functionally relevant changes of an upregulation and/or downregulation) of the gene activity of a particular gene site and/or gene in the genome of a cancer sample. The epigenetic state comprises an epigenetic downregulation and/or upregulation of the gene site's activity in the cancer sample in comparison to that same gene site's activity in physiological tissue. Such downregulation and/or upregulation can for example be due to DNA methylation, histone modification or other epigenetic effects.

[0056] The term “epigenetic state pattern” refers to a combination of the epigenetic state(s) of a plurality of gene sites and/or genes. It comprises an overview of the epigenetic state(s) of the gene sites and/or genes. An epigenetic state pattern can therefore in its simplest form comprise information about which of the gene sites and/or genes of the plurality in question have an activation which is epigenetically modified in comparison to the physiological state and which do not. The epigenetic state pattern could also comprise information about which of the gene sites and/or genes are epigenetically upregulated and/or downregulated, for example in terms of hypermethylation (resulting in downregulation) or hypomethylation (resulting in upregulation) when DNA methylation is used as measure for epigenetic influence on gene or gene site activity.

[0057] In some embodiments, the classification algorithm of the present disclosure can be trained using epigenetic data derived from classified cancer types, such as pre-classified cancer types. The epigenetic data may be provided in the form of a predetermined pattern or predetermined epigenetic state pattern. The term “predetermined pattern” or “predetermined epigenetic state pattern” refers to an epigenetic state pattern that has been determined beforehand and that is typical of a specific cancer type, for example one of the types mentioned in Table 2 (and, for example, Tables 3 to 172). The first iteration of predetermined patterns has been determined by the inventors and has been used to train the classification algorithm.

[0058] In a preferred embodiment of the disclosure, the predetermined epigenetic state patterns pertain to the cancer types listed in Table 2 (and, for example, Tables 3 to 172, respectively). Furthermore, the predetermined epigenetic state pattern comprises essentially the same gene sites as the set of gene sites of the cancer sample being analysed. If, by determining the epigenetic state of the set of gene sites, as explained in more detail below, an epigenetic state pattern is obtained that corresponds to one of the predetermined patterns, the cancer pertaining to the sample can be classified as pertaining to this cancer type. The predetermined epigenetic state patterns are preferably determined by the classification algorithm. This means that the predetermined epigenetic state patterns are not in itself accessible by a user, but contained in the results of the classification algorithm, which, for example, employs machine learning and continually updates its own reference material. The predetermined epigenetic state patterns determined by the classification algorithm therefore change over time in an effort to increase sensitivity and specificity even further. It is therefore neither feasible nor useful to give an example of the predetermined patterns used in the invention as they are subject to continuous change. On the other hand, the skilled person is familiar with these aspects of machine learning and can easily provide for a classification algorithm to establish its own predetermined epigenetic state patterns as used herein.

[0059] Biological changes, such as epigenetic changes, in cancer tissue are known to be specific for certain cancer types or subtypes. The biological state(s) of a gene site can be determined using different methods known to the skilled person. For example, the biological state, such as the epigenetic state, of a gene site can be determined by assaying histone modifications, proteomics or transcriptomics. One approach could, for example, be based on an Assay for Transposase-Accessible Chromatin using sequencing (ATAC-seq). Another approach is assaying DNA methylation. As there are robust and reliable DNA methylation assays established and readily available, determining the epigenetic state of gene sites through determining methylation is the preferred approach used in the disclosure. However, it is not a single data point determined by any of the mentioned assays that determines the type of the cancer. The type of the cancer is determined by the epigenetic downregulation or upregulation of its gene sites, which in turn determines the metabolism and phenotype of the cancer. Gene site activation can, however, be determined by a number of different epigenetic approaches, as outlined above. To classify cancer types, it is therefore more prudent to determine the effect of the epigenetic changes on gene site activity rather than rely on the specific epigenetic changes measured by a specific type of assay. In theory, all of the epigenetic approaches should in the end imply the same gene sites as having a pathological activity, provided that all gene sites and their activity are equally accessible through the various assays. This pathological gene site activity is what makes and defines the cancer types.

[0060] In view of the above, the methods of the present disclosure classify a cancer based on the biological state of specific genomic DNA sites or transcripts.

[0061] In one embodiment of the disclosure, the inventors used DNA methylation to find gene sites with pathological activity within the cancer genome. The epigenetic state of these gene sites was then used to find patterns typical for different cancer types. Thus, the inventors found a set of gene sites having the biggest impact on differentiating between different cancer types.

[0062] To this end the inventors tested their approach using an Illumina methylation bead chip with which a multitude of classically classified tumour specimen were tested. Illumina's HumanMethylation450 (450 k) BeadChip allows to assays DNA methylation at 482,421 CpG dinucleotides. The platform measures DNA methylation by genotyping sodium bisulfite treated DNA. To run the assay only a small amount of DNA is needed and it is possible to use both frozen and paraffin (FFPE) material. So far, approximately 90000 tumour samples have been profiled by the inventors and allowed the verification of the surprisingly superior approach of the herein disclosed disclosure.

[0063] As readily apparent to the skilled person, the classification according to the disclosure also means that a stratification and/or a diagnosis of the cancer is achieved. In the context of the present disclosure the term “stratification” refers to the classification or grouping of patients according to one or more predetermined criteria. In certain embodiments stratification is performed in a diagnostic setting in order to group a patient according to the prognosis of disease progression, either with or without treatment. In particular embodiments stratification is used in order to distribute patients enrolled for a clinical study according to their individual characteristics. In particular embodiments stratification is used in order to identify the best suitable treatment option for a patient.

[0064] The term “diagnosis” or “diagnostic” is used herein to refer to the identification or classification of a molecular or pathological state, disease or condition. For example, “diagnosis” may refer to identification of a particular type of cancer, e.g., a lung cancer. “Diagnosis” may also refer to the classification of a particular type of cancer, e.g., by histology (e.g., a non-small cell lung carcinoma), by molecular features (e.g., a lung cancer characterized by nucleotide and/or amino acid variation(s) in a particular gene or protein), or both. However, it is important to note that the disclosure is directed to a strictly in vitro method in all its embodiments. None of the method steps of any embodiment are performed on the human or animal body.

[0065] The term “cancer type”, “tumour species” or “tumour class” shall refer to a specific kind of a tumour or subcategory of a tumour that can be classified based on its tissue origin, genetic makeup, histology etc. In particular in the field of brain tumours various distinct tumour species or classes of the central nervous system exist that can be differentiated via for example histopathology (1. Acta Neuropathol. 2007 August; 114 (2): 97-109. Epub 2007 Jul. 6. “The 2007 WHO classification of tumours of the central nervous system.” Louis D N (1), Ohgaki H, Wiestler O D, Cavenee W K, Burger P C, Jouvet A, Scheithauer B W, Kleihues P). Specifically, the disclosure pertains to the cancer types as listed in Table 2.

[0066] The term “cancer sample” or “tumour sample” as used herein refers to a sample obtained from a patient. The tumour sample can be obtained from the patient by routine measures known to the person skilled in the art, i.e., biopsy (taken by aspiration or punctuation, excision or by any other surgical method leading to biopsy or resected cellular material). For those areas not easily reached via an open biopsy a surgeon can, through a small hole made in the skull, use stereotaxic instrumentation to obtain a “closed” biopsy. Stereotaxic instrumentation allows the surgeon to precisely position a biopsy probe in three-dimensional space to allow access almost anywhere in the brain. Therefore, it is possible to obtain tissue for the diagnostic method of the present disclosure. The actual removal of the sample from the patient is, however, not part of the inventive method. “Providing a cancer sample” therefore merely pertains to making a sample available for laboratory use without the step of obtaining it from a patient in the first place.

[0067] The term “cancer” or “tumour” is not limited to any stage, grade, histomorphological feature, invasiveness, aggressiveness or malignancy of an affected tissue or cell aggregation. In particular stage 0 cancer, stage I cancer, stage II cancer, stage III cancer, stage IV cancer, grade I cancer, grade II cancer, grade III cancer, malignant cancer, primary carcinomas, and all other types of cancers, malignancies etc. are included.

[0068] As used herein, the term “gene site” refers to a region of DNA comprising or consisting of a gene, particularly a gene or gene site as listed in Table 1. In particular, the term “gene site” refers to a DNA sequence with a genetic locus as defined in Table 1. A gene site may comprise additional base pairs upstream and/or downstream of a gene, for example up to 12 kb, preferably up to 10 kb up to 8 kb or up to 6 kb or up to 4 kb or up to 2 kb upstream and/or downstream. A biological state, such as an epigenetic state, of a gene site may therefore refer to the biological state of the gene itself and additionally to the biological state of the additional string of base pairs upstream and/or downstream of the gene. In preferred embodiments of the disclosure, the biological state of the gene sites in the set comprises the biological state of the gene sites as listed in Table 1 and up to 10 kb, preferably up to 8 kb or up to 6 kb or up to 4 kb or up to 2 kb, upstream and/or downstream of the genes. In a further preferred embodiment, the biological state of the gene sites comprises exclusively the biological state of the gene sites as listed in Table 1 without any bases upstream and/or downstream of the gene sites. In this case, only the biological state of the gene sites themselves are being used and the gene sites do not comprise any bases outside of the gene sites as listed in Table 1.

[0069] The term “set of gene sites” refers to a number of gene sites being grouped together. For example, it is the epigenetic state(s) of this set of gene sites that is being evaluated in the disclosure, then combined into a pattern and analysed by the classification algorithm.

[0070] As used herein, the term “CpG site” or “CpG position” refers to a region of DNA where a cytosine nucleotide occurs next to a guanine nucleotide in the linear sequence of bases along its length, the cytosine (C) being separated by only one phosphate (p) from the guanine (G). About 70% of human gene promoters have a high CpG content. Regions of the genome that have a higher concentration of CpG sites are known as “CpG islands”. Cytosines in CpG dinucleotides can be methylated to form 5-methylcytosine. Methylation of (i.e., introduction of a methyl group in) the cytosines of CpG site within the promoters of genes can lead to gene silencing, a feature found in a number of human cancers. In contrast, the hypomethylation of CpG sites has generally been associated with the over-expression of oncogenes within cancer cells. The term “independent genomic CpG positions” shall in the context of the present disclosure mean that each CpG position of a group of genomic CpG positions can be probed separately for its methylation state.

[0071] The term “methylation state”, as used herein describes the state of methylation of a CpG position, thus refers to the presence or absence of 5-methylcytosine at one CpG site within genomic DNA. When none of the DNA of an individual is methylated at one given CpG site, the position is 0% methylated. When all the DNA of the individual is methylated at that given CpG site, the position is 100% methylated. When only a portion, e.g., 50%, 75%, or 80%, of the DNA of the individual is methylated at that CpG site, then the CpG position is said to be 50%, 75%, or 80%, methylated, respectively. The term “methylation state” reflects any relative or absolute amount of methylation of a CpG position. Methylation of CpG positions can be assessed by any method used in the art. The terms “methylation” and “hypermethylation” are used herein interchangeably. When used in reference to a CpG positions, they refer to the methylation state corresponding to an increased presence of 5-methylcytosine at a CpG site within the DNA of a biological sample obtained from a patient, relative to the amount of 5-methylcytosine found at the CpG site within the same genomic position of a biological sample obtained from a healthy individual, or alternatively from an individual suffering from a tumour of a different class or species.

[0072] The term “biological sample” is used herein in its broadest sense. In the practice of the present disclosure, a biological sample is generally obtained from a subject. A sample may be any biological tissue or fluid with which the biological state(s) of gene sites of the present disclosure may be assayed. Frequently, a sample will be a “clinical sample” (i.e., a sample obtained or derived from a patient to be tested). The sample may also be an archival sample with known diagnosis, treatment, and/or outcome history. Examples of biological samples suitable for use in the practice of the present disclosure include, but are not limited to, bodily fluids, e.g., blood samples (e.g., blood smears), and cerebrospinal fluid, brain tissue samples, spinal cord tissue samples or bone marrow tissue samples such as tissue or fine needle biopsy samples. Biological samples may also include sections of tissues such as frozen sections taken for histological purposes. The term “biological sample” also encompasses any material derived by processing a biological sample. Derived materials include, but are not limited to, cells (or their progeny) isolated from the sample, as well as nucleic acid molecules (DNA and/or RNA) extracted from the sample. Processing of a biological sample may involve one or more of: filtration, distillation, extraction, concentration, inactivation of interfering components, addition of reagents, and the like.

[0073] The method according to some embodiments of the present disclosure includes a step of “determining an epigenetic state” of a set of gene sites. This can be achieved through any means suitable to assay epigenetically modified activity of the gene sites. In a preferred embodiment of the disclosure the epigenetic state of a set of gene sites is determined by assessing the DNA methylation state of a multitude of independent genomic CpG positions, particularly CpG positions within the gene sites as mentioned above, preferably within the gene sites listed in Table 1, in a biological sample obtained from a patient. Determination of the methylation state may be performed using any method known in the art to be suitable for assessing the methylation of cytosine residues in DNA. Such methods are known in the art and have been described; and one skilled in the art will know how to select the most suitable method depending on the number of samples to be tested, the quantity of sample available, and the like.

[0074] Thus, the methylation state of a genomic CpG position or a combination of genomic CpG positions according to the disclosure can be determined using any of a wide variety of methods that are generally divided into strategies based on methylation-specific PCR (MSP), and strategies employing PCR performed under methylation-independent conditions (MIP). Methylation-independent PCR (MIP) primers are used in most of the available PCR-based methods. They are designed for proportional amplification of methylated and unmethylated DNA. In contrast, methylation-specific PCR (MSP) primers are designed for the amplification of methylated template only.

[0075] Examples of methylation-independent PCR based techniques include, but are not limited to, direct bisulfite direct sequencing (Frommer et al., PNAS USA, 1992, 89:1827-1831), pyrosequencing (Collela et al., Biotechniques, 2003, 35:146-150; Uhlmann et al., Electrophoresis, 2002, 23:4072-4079; Tost et al., Biotechniques, 2003, 35:152-156), Combined Bisulfite Restriction Analysis or “COBRA” (Xiong et al., Nucleic Acids Res., 1997, 25:2532-2534), Methylation-Sensitive Single-Nucleotide Primer Extension or “MS-SnuPE” (Gonzalgo et al., Nucleic Acids Res., 1997, 25:2529-2531), Methylation-Sensitive Melting Curve Analysis or “MSMSA” (Worm et al., Clin. Chem., 2001, 47:1183-1189), Methylation-Sensitive High-Resolution Melting or “MS-HRM” (Wojdacz et al., Nucleic Acids Res., 2007, 35: e41), MALDI-TOF mass spectrometry with base-specific cleavage and primer extension (Ehrich et al., PNAS USA, 2005, 102:15785-15790), and HeavyMethyl (Cottrell et al., Nucleic Acids Res., 2004, 32: e10).

[0076] Examples of methylation-specific PCR based techniques include for example methylation specific PCR or “MSP” (Herman et al., PNAS USA, 1996, 93:9821-9826; Mackay et al., Hum. Genet., 2006, 120:262-269; Mackay et al., Hum. Genet., 2005, 116:255-261; Palmisano et al., Cancer Res., 2000, 60:5954-5958; Voso et al., Blood, 2004, 103:698-700), MethylLight (Eads et al., Nucleic Acids Res., 2000, 28: e32; Eads et al., Cancer Res., 1999, 59:2302-2306; Lo et al., Cancer Res., 1999, 59:3899-3903), Melting curve Methylation Specific PCR or “McMSP” (Akey et al., Genomics, 2002, 80:376-384), Sensitive Melting Analysis after Real-Time MSP or “SMART-MSP” (Kristensen et al., Nucleic Acids Res., 2008, 36: e42), and Methylation-Specific Fluorescent Amplicon Generation or “MS-FLAG” (Bonanno et al., Clin. Chem., 2007, 53:2119-2127).

[0077] Many of these methods rely on the prior treatment of DNA with sodium bisulphite. This treatment leads to the conversion of unmethylated cytosine to uracil, while methylated cytosine remains unchanged (Clark et al., Nucleic Acids Res., 1994, 22:2990-2997). This change in the DNA sequence following bisulphite conversion can be detected using a variety of methods, including PCR amplification followed by DNA sequencing. It is safe to say that the use of bisulphite-converted DNA for DNA methylation analysis has surpassed almost every other methodology for DNA methylation analysis, thereby becoming the gold standard for detecting changes in DNA methylation. The protocol described by Frommer et al. (PNAS USA, 1992, 89:1827-1831) has been widely used for sodium bisulphite treatment of DNA, and a variety of commercial kits are now available for this purpose.

[0078] Thus, in a method according to the disclosure, the step of determining the epigenetic state can be achieved by determining the methylation state of a gene promoter, or of a combination of gene promoters of the disclosure. It may be performed using any of the techniques described above or any combination of these techniques. One skilled in the art will recognized that when the methylation state of a combination of gene promoters has to be determined, the determinations may be performed using the same DNA methylation analysis technique or different DNA methylation analysis techniques. Other methods include oligonucleotide methylation tiling arrays, BeadChip assays, HPLC/MS methods, methylation-specific multiplex ligation-dependent probe amplification (MS-MPLA), bisulphite sequencing, and assays using antibodies to DNA methylation, i.e., ELISA assays.

[0079] By using the statistical model as described herein, the inventors found that the gene sites comprising the gene sites listed in Table 1 are sufficient to classify cancer samples into a large number of different cancer types. While it may be possible to classify even more cancer types by analysing the named gene sites, this has been validated for the cancer types listed in Table 2. To classify a cancer type, according to the disclosure, it is therefore only necessary to determine the epigenetic state of these selected gene sites, in particular of at least 3 gene sites. A full analysis of the whole genome of the cancer type can therefore be avoided. For a sufficiently specific classification, only those gene sites listed in Table 1 must be analysed, resulting in quicker and less laborious diagnosis.

[0080] The inventors further found that a set of gene sites comprising at least 3 of the gene sites listed in Table 1 is sufficient for the classification of the cancer sample. However, larger sets provide more accuracy. In preferred embodiments of the disclosure, the set of gene sites thus comprises at least 10, preferably at least 20 or at least 30 or at least 40 or at least 50 or at least 60 or at least 70 or at least 80 or at least 90 or at least 100, genes of the sample genome of the cancer being classified. A set of gene sites preferably comprising 100 or less, 90 or less, 80 or less, 70 or less, 60 or less, 50 or less, 40 or less, 30 or less, 20 or less, or 10 or less gene sites provide for a good balance between accuracy and work necessary. The embodiments of the present disclosure are not limited thereto, and the set may comprise more than 100 gene sites or all gene sites listed in Table 1.

[0081] While all of the gene sites or genes listed in Table 1 could be used to classify the cancer types as described herein in Table 2, the inventors identified subsets of the genes with higher importance, meaning resulting in more accuracy, when used to classify specific cancer types. It is therefore preferred that the predetermined pattern for a cancer type as listed in Table 2 comprises at least 3 gene sites for that specific cancer type. It is further preferred that the predetermined pattern for a cancer type comprises at least 3 gene sites for that specific cancer type selected from the gene sites listed in Tables 3 to 172, respectively. In a preferred embodiment the set of gene sites of the cancer sample genome being analysed comprises the exact same gene sites or genes as the predetermined pattern.

[0082] In a preferred embodiment, the statistical model employed by the inventors provides for a measure of the variable importance of the gene sites for each cancer.

[0083] As can be seen from Tables 3 to 172, the different gene sites have different importance for the classification. To improve the accuracy of the classification, it is therefore preferred that the epigenetic data for a cancer type comprises those gene sites listed in Tables 3 to 172 for that cancer type that are the ones with the highest values of variable importance for that cancer type.

[0084] As stated before, it is preferred that the set of gene sites of the cancer sample genome being analysed comprises the same genes or gene sites as the epigenetic data derived from pre-classified cancer types (predetermined pattern). The set of gene sites of the cancer sample genome being analysed, and the epigenetic data derived from pre-classified cancer types therefore preferably also comprise the same number of genes or gene sites.

[0085] While analysing gene sites of a set of genes comprising 3 genes is advantageous for being less laborious, the accuracy of the classification increases with more genes being analysed per cancer type. It is therefore preferred that the predetermined pattern for a cancer type listed in Table 2 comprises at least 10, preferably at least 20 or at least 30 or at least 40 or at least 50 or at least 60 or at least 70 or at least 80 or at least 90 or at least 100, gene sites or genes listed in Table 1. The preferred gene sites or genes “for a cancer type” are the ones listed for each cancer type in in Tables 3 to 172, respectively. As explained above for the set, 80 to 100 genes provide for a good balance between accuracy and workload.

[0086] The classification may include a direct or indirect comparison of the epigenetic state pattern of the set of gene sites with predetermined epigenetic state patterns, e.g. by determining the overlap of the two patterns, i.e., how much the two patterns are similar to or different from each other. This may, for example, be statistically determined and may be represented as a numerical value. Specifically, the difference between the patterns may be represented by a percentage. The accuracy of the classification can be influenced by allowing patterns with higher or lower difference from a predetermined pattern to still be classified as the cancer type the predetermined pattern pertains to. For a suitable accuracy, it is preferred that the cancer is classified as the cancer to which the predetermined pattern pertains if the epigenetic state pattern of the set of gene sites differs from the predetermined pattern by at most 5%, preferably at most 4% or at most 3% or at most 2% or at most 1%. These values are both useful in practice and achievable by the inventive method.

[0087] As explained above, the predetermined epigenetic state patterns used for comparison have been determined by the inventors by analysing more than 90000 cancer samples from a range of different sources. As this process is also part of the present disclosure, it is explained in detail below.

[0088] In all embodiments the method of the disclosure is performed as an ex-vivo or in-vitro method.

[0089] In another preferred aspect of the present invention, the invention then relates to a method of treating cancer in a patient, comprising performing a method according to the present invention, and providing a suitable treatment to said patient, wherein said treatment is based, at least in part, on the results of the method according to the present invention.

[0090] In another preferred aspect of the present invention, the invention relates to a method of developing a treatment regime for the cancer (e.g., a tumour species) classified using the method according to the present invention. Preferably, the method further includes providing a suitable treatment to a patient based on the developed treatment regime.

[0091] “Treatment” shall mean a reduction and/or amelioration of the symptoms of the disease. An effective treatment achieves, for example, a shrinking of the mass of a tumor and the number of cancer cells. A treatment can also avoid (prevent) and reduce the spread of the cancer, such as, for example, affect metastases and/or the formation thereof. A treatment may be a naive treatment (before any other treatment of a disease had started), or a treatment after the first round of treatment (e.g. after surgery or after a relapse). The treatment can also be a combined treatment, involving, for example, chemotherapy, surgery, and/or radiation treatment. The treatment can also modulate auto-immune response, infection and inflammation.

[0092] Most preferably the methods according to the disclosure are used for the classification of tumours of the central nervous system, therefore, the tumour preferably is a brain tumour or a spinal cord tumour, and the tumour species is a brain tumour species or a spinal cord tumour species. As already noted herein before, these tumours are characterized by a huge epigenetic variety which has a significant impact on the development of treatment regimes in order to allow for the best treatment of the patient. If the tumour disease is a tumour of the central nervous system (CNS), it is preferred that said tumour species comprises at least 184 different classes of CNS tumours. Additionally, the disclosure is also applicable to sarcomas. In a preferred embodiment said CNS tumours are selected form the list of cancer types or tumour species of Table 2.

[0093] The determination of DNA methylation levels of the disclosure is performed preferably with a genomic array or chip comprising probes which are specific for the methylation of at least 1000 CpG positions. It is preferred to test as many positions as possible in order to allow for the generation of a highly specific classification. Genome-wide DNA methylation assays are therefore preferred, such as the HumanMethylation450 k-chip (Illumina®).

[0094] The classification algorithm may be based on random forest (RF). The training of the RF-based classification algorithm according to some embodiments of the disclosure may comprise a preceding step of selecting CpG position which of all CpG positions used provide the purest splitting rules, and using said selected CpG positions as a training-data-optimization-set to train a classification rule.

[0095] In other embodiments of the disclosure the training of the RF-based classification algorithm may comprise a step of down-sampling for each tumour species the number of bootstrap samples to the minority class, the minority class being the lowest sample size of a tumour species in the training dataset.

[0096] Another embodiment of the disclosure provides the above method and comprises the further step of including the methylation data of the tumour sample as classified into the training-dataset to obtain an enhanced-training-data-set and computing an enhanced-classification-rule by random forest analysis based on the enhanced-training-dataset. Optionally the classification of said tumour sample may be repeated with the enhanced-classification-rule. This embodiment serves the continuous development and improvement of the original training data set. Each further classified tumour species will have a genomic DNA methylation profile or epigenetic state pattern that further enhances the classification for that tumour species and that can then be used as a predetermined epigenetic state pattern in the present disclosure. Therefore, the disclosure in one preferred embodiment provides a classification system characterized by a self-learning classification rule.

[0097] In order to provide a classification rule with good specificity and sensitivity, the pre-determined methylation data/epigenetic state pattern used in context of the present disclosure includes for each pre-classified cancer type the methylation state/levels at said CpG position of at least one, two, three, four, five, six or more independent samples.

[0098] Another aspect of the present disclosure then pertains to a method for stratifying the treatment of a tumour patient, comprising the classification of the tumour species/cancer type of the tumour of the patient according to the classification methods of the disclosure and stratifying the treatment of the patient in accordance with the diagnosed tumour species.

[0099] Yet a further aspect of the disclosure pertains to a computer-implemented method for generating a classification-rule for aiding the classification of tumour samples in cancer diagnosis, the method comprising providing DNA methylation data of a multitude of independent genomic CpG positions of genomes of a multitude of diverse pre-classified tumour species of the same tumour type (for example brain cancer, lung cancer, leukaemia, etc.); computing a random forest of binary decision trees from the DNA methylation data, wherein in each binary decision tree of said random forest each node is a CpG position, and each terminal leave a specific tumour species, and each binary splitting rule is a methylation state at said CpG position. This method can be used to create the predetermined epigenetic state patterns as explained above.

[0100] To learn a classification rule that allows predicting the class assignment of future diagnostic cases the inventor's applied the machine learning algorithm RandomForest (RF; Breiman, 2001). The RF algorithm is a so-called ensemble method that combines the predictions of several ‘weak’ classifiers to achieve improved prediction accuracy. The RF uses binary classification trees (Classification and Regression Trees (CART); Breiman et al., 1983) as ‘weak’ classifiers. Each of these trees is a sequence of binary splitting rules that are learned by recursive binary splitting. The CART algorithm starts with all samples assigned to a ‘root’ node and tries to find the variable, e.g., a measured CpG probe, and a corresponding cut-off that results in the purest split into the different classes. To measure this gain in class ‘purity’ the Gini index, a classical statistical measure for inequality, may be used. To fit a tree the CART algorithm iteratively repeats these steps until no further improvements can be made, i.e., only samples of the same class are assigned to the final ‘leaf’ node, or a pre-specified node size is achieved. To predict the class of a new diagnostic case the binary splitting rules are compared with the new data starting in the root node down to one of the leaf nodes. The tree then predicts or votes for the class dominating that leaf node.

[0101] Decision trees have the advantage that they are non-parametric and do not rely on any distributional assumptions. Moreover, trees allow to learn complex non-linear relationships and interactions, they are easy to interpret and can be efficiently fitted in large data sets. The main disadvantages of decision trees are that they often tend to overfit the data and that they have a weak prediction performance.

[0102] However, to improve the prediction accuracy of a single tree the RF algorithm combines thousands of trees by bootstrap aggregation (bagging). In brief, each tree is fitted using training data sets that are generated by drawing bootstrap samples, i.e., randomly selecting two-third of the data with replacement. In addition, at each node only a random subset of the available variables is used to find an optimal splitting rule. This additional source of randomization allows selecting variables with lower predictive value that would otherwise be ruled out by the most prominent variables. This feature guarantees that the resulting trees are decorrelated, i.e., they use different variables to find an optimal prediction rule. Taking the majority vote over thousands of bootstrap aggregated and decorrelated trees greatly improves the prediction accuracy of the RF. The majority vote, i.e., the proportion of trees voting for a class, can be used as empirical class probabilities or scores that turned out to be a very useful tool for diagnosis.

[0103] To validate the resulting RF classifier, a repeated five-fold cross-validation is applied. In each cross-validation the reference set is randomly split into five parts. Then four-fifth of the data is used to train the RF classifier and one-fifth is used for prediction. Currently the estimated test error of the classifier is around 3.1%.

[0104] Alternatively, the resulting RF classifier is validated by a repeated threefold cross-validation. In each cross validation the reference set is randomly split into three parts. Then two-third of the data is used to train the RF classifier and one-third is used for prediction. Currently the estimated test error of the classifier is around 4.9%.

[0105] The classification scores generated by the RF, i.e., the proportion of trees voting for a class, are typically unequally distributed between classes. Furthermore, if interpreted as class probabilities, the scores often fail to estimate the actual class probabilities and are thus said to be not well-calibrated. However, to judge the classification of a single case in the context of clinical diagnosis, the uncertainties associated with an individual prediction in terms of a confidence scores, or estimated class probability is needed. To receive recalibrated scores that are comparable between classes and that are improved estimates of the certainty of individual predictions, the inventors fit a calibration model to raw RF scores. This calibration model is a multinomial logistic regression model, which takes the tumour subclasses as response variable and the ‘raw’ RF scores as explanatory variables. In addition, this model is fitted by incorporating a small ridge-penalty on the likelihood to prevent the model from over fitting as well as to stabilize estimation in situations where classes are perfectly separable. The amount of this regularization, i.e., the penalization parameter, is determined by running a ten-fold cross-validation and choosing the value that minimizes the misclassification error. To fit this model independent, ‘raw’ RF scores are needed, i.e., the scores need to be generated by an RF classifier that was not trained using the same samples, otherwise the RF scores will be systematically biased and not comparable to scores of unseen cases. To generate such independent ‘raw’ scores, the inventors apply a three-fold cross validation.

[0106] To validate the class predictions generated by using the recalibrated scores of the calibration model a three-fold nested cross-validation is applied. In each cross validation the reference set is randomly split into three parts. Then two-third of the data is used to train the RF classifier and one-third is used for prediction. Within each of these three cross-validation runs a nested three-fold cross-validation is applied to generate independent RF scores, which are used to train a calibration model. The predicted RF scores resulting from the outer cross-validation loop are then recalibrated by using the suitable calibration model, i.e. a model that was fitted using the RF scores generated by using the other two-third of the data in the inner loop. Currently the estimated test error of the classifier when using the recalibrated scores for prediction is around 3.2%.

[0107] Some embodiments of the disclosure pertain to a method where the diverse tumour species are selected from metastatic tumours, tumours stemming from specific tissues, tumours in a specific stage, recurrent tumours, tumours having a specific genetic mutation, tumours of patients having different gender, age or genetic background.

### BRIEF DESCRIPTION OF THE DRAWINGS

[0108] The present disclosure will now be further described in the following examples with reference to the accompanying figures and sequences, nevertheless, without being limited thereto. For the purposes of the present disclosure, all references as cited herein are incorporated by reference in their entireties. In the Figures:

[0109] FIG. 1: Heatmap representation of the reference set. The colour code indicates the different tumour classes, FFPE and frozen samples as well as samples that are misclassified in the cross validation. The heatmap shows the methylation profile of 10,000 CpG probes most important for the classification (highest average gain in Gini purity).

[0110] FIG. 2: Example of a binary decision tree. At each node a CpG probe and corresponding cut-off is used to make a binary decision. The final leaf nodes display the abbreviation of the tumour subclass, i.e., EPN_PFA means posterior fossa ependymoma subtype A.

[0111] FIG. 3: Median test error estimated by three five-fold cross validation runs.

[0112] FIG. 4: The left panel shows a symbolically the histology of a WNT medulloblastoma and a Group 3 medulloblastoma which are not distinguishable. The right panel shows a multidimensional scaling (MDS) analysis of 107 medulloblastoma samples of all molecular subtypes using the 21,092 most variable CpG probes. WNT medulloblastoma are coloured in blue, SHH medulloblastoma in red, Group 3 medulloblastoma in yellow and Group 4 medulloblastoma in green.

[0113] FIG. 5: A shows the result of the histology of the patient. B shows the classifier scores. Highlighted is the highest score entry.

[0114] FIG. 6: A and B show the result of the histology of the patient. C shows the classifier scores. Highlighted is the highest score entry.

[0115] FIG. 7: Schematic overview how the classifier is trained and validated by the three-fold nested-cross validation. In each outer cross validation run the training data is used for an inner three-fold cross-validation that generates independent RF scores. These scores are used to fit a calibration model which can then be applied to recalibrate the RF scores generated by predicting the test data in the outer loop. To fit a calibration model using all the data in the reference set, which is later used for new diagnostic cases, the RF scores generated in the outer loop can be used.

[0116] FIG. 8: Genome plot showing the PTPRN2 gene, CpG sites and RF variable importance measure.

[0117] FIG. 9: Heatmap showing the methylation values of 100 CpGs located on PAX6, PTPRN2 and OSTM1 with highest standard deviation across 75 ATRT samples.

[0118] Rows and columns have been reordered by applying hierarchical clustering with Euclidean distance as distance metric and complete linkage as linkage method.

[0119] The class annotation colour code shows the previously known molecular subtypes, the gene annotation indicates the gene on which the CpGs are located.

[0120] FIG. 10A: 75 ATRT tumour samples projected on to the first two PCs resulting from PCA.

[0121] FIG. 10B: 75 ATRT tumour samples projected on to coordinates calculated by tSNE analysis.

[0122] FIG. 10C: CART tree with two sequential splitting rules.

[0123] FIG. 10D: Scatterplot of 75 ATRT tumour samples, the x and y-axes are the methylation value of the two CpG sites selected by the CART tree. The corresponding splitting rule cut-offs are displayed as dashed lines.

[0124] FIG. 11: tSNE of 1167 samples for which DNA-methylation as well as gene expression data is available. The tSNE coordinates were calculated on the gene expression data of the 688 most important genes or gene sites. The class labels and colours correspond to classes predicted by the methylation classifier.

[0125] FIGS. 12A and B: Confusion matrices that show the results of a 3-fold cross validation to validate the RF and the multinomial logistic regression model. Like for classifiers trained on methylation data, most errors occur between closely related entities such as the MB group 3 and 4 subtypes.

[0126] FIG. 13: Simulation study to investigate brain tumor classifier performance for classifiers trained using CpG-probes located on random subsets of signature genes and random hg19 genes.

[0127] FIG. 14: tSNE dimension reduction of DNA-methylation profiles of 9084 TCGA cases from 33 different projects where each project focused on specific tumor entity.

[0128] FIG. 15: Left: confusion matrix which shows the result of the 3-fold cross-validatio; right: tSNE dimension reduction highlighting the samples that were falsely predicted in the cross-validation.

[0129] FIG. 16: Confusion matrices for four different statistical or machine learning models trained on the TCGA cohort shown in FIG. 14.

### DETAILED DESCRIPTION OF EMBODIMENTS

### Infinium Methylation Assay

[0130] Genome-wide screening of DNA methylation patterns was performed by using the Infinium HumanMethylation450 BeadChips (Illumina, San Diego, US), allowing the simultaneous quantitative measurement of the methylation state at 485,577 CpG sites. By combining Infinium I and Infinium II assay chemistry technologies, the BeadChip provides coverage of 99% of RefSeq genes and 96% of CpG islands.

[0131] DNA concentrations were determined using PicoGreen (Life Technologies, Darmstadt, Germany). The quality of genomic DNA samples was checked by agarose-gel analysis, and samples with an average fragment size >3 kb were selected for methylation analysis. For formalin-fixed paraffin-embedded (FFPE) DNA samples the quality was evaluated by real-time PCR analysis on Light Cycler 480 Real-Time PCR System (Roche, Mannheim, Germany) using the Infinium HD FFPE QC Kit (Illumina). The laboratory work was done in the Genomics and Proteomics Core Facility at the German Cancer Research Center, Heidelberg, Germany (DKFZ).

[0132] DNA (500 ng genomic DNA and 250 ng FFPE DNA, respectively) from each sample was bisulfite converted using the EZ-96 DNA Methylation Kit (Zymo Research Corporation, Orange, US) according to the manufacturer recommendations. Bisulfite treatment leads to the deamination of non-methylated cytosines to uracils, while methylated cytosines are refractory to the effects of bisulfite and remain cytosine. After bisulfite conversion, FFPE samples were treated with the Infinium HD DNA Restoration Kit (Illumina) according to the manufacturer recommendations. By using enzymatic reactions, degraded FFPE DNA is restored in preparation for the whole genome amplification.

[0133] Each sample was whole genome amplified and enzymatically fragmented following the instructions in the Illumina Infinium HD Assay Methylation Protocol Guide (genomic DNA) or Infinium HD FFPE Methylation Guide (FFPE DNA), respectively. The DNA was applied to Infinium HumanMethylation450 BeadChip and hybridization is performed for 16-24 h at 48° C. During hybridization, the DNA molecules anneal to locus-specific DNA oligomers linked to individual bead types. One or two probes are used to interrogate CpG locus, depending on the probe design for a particular CpG site.

[0134] Allele-specific primer annealing is followed by single-base extension using DNP- and Biotin-labeled ddNTPs. For Infinium I assay design, both bead types (one each for the methylated and unmethylated states) for the same CpG locus incorporate the same type of labeled nucleotide, determined by the base preceding the interrogated “C” in the CpG locus, and therefore are detected in the same color channel. Infinium II uses only one bead type with a unique type of probe allowing detection of both alleles. The methylated and unmethylated signals are generated respectively in the green and the red channels.

[0135] After extension, the array is fluorescently stained, scanned, and the intensities at each CpGs were measured. Microarray scanning was done using an iScan array scanner (Illumina). DNA methylation values, described as beta values, are recorded for each locus in each sample. DNA methylation beta values are continuous variables between 0 and 1, representing the percentage of methylation of a given cytosine corresponding to the ratio of the methylated signal over the sum of the methylated and unmethylated signals.

### Data Pre-Processing

[0136] All data analysis was performed using the open-source statistical programming language R (R Core Team, 2014). Raw data files generated by the iScan array scanner were read and preprocessed using the capabilities of the Bioconductor package minfi (Aryee et al, 2014). With the minfi package the same pre-processing steps as recommended in Illumina's BeadStudio software were performed.

[0137] In addition, the following filtering criteria were applied: Removal of probes targeting the X and Y chromosomes (n=11,551), removal of probes containing a single nucleotide polymorphism (dbSNP132 Common) within five base pairs of and including the targeted CpG-site (n=24,536), and probes not mapping uniquely to the human reference genome (hg19) allowing for one mismatch (n=9,993). In total, 438,370 probes were kept for analysis.

### Training the Classifier

[0138] To learn a classification of 1899 samples that were assigned to 72 different brain tumour subtypes the Random Forest (RF) algorithm implemented in the R package randomForest (Liaw and Wiener, 2002) was used. The RF algorithm is a so-called ensemble method that combines the predictions of several ‘weak’ classifiers to achieve improved prediction accuracy. The RF uses binary classification trees (Classification and Regression Trees (CART); Breiman et al., 1983) as ‘weak’ classifiers. Each of these trees represents a sequence of binary splitting rules that are learned by recursive binary splitting. The CART algorithm starts with all samples assigned to a ‘root’ node and tries to find the variable, e.g., a measured CpG probe, and a corresponding cut-off that results in the purest split into the different classes. To measure this gain in class ‘purity’ the Gini index, a classical statistical measure for inequality, is used. To fit a tree the CART algorithm iteratively repeats these steps until no further improvements can be made, i.e., only samples of the same class are assigned to the final ‘leaf’ node, or a pre-specified node size is achieved. To predict the class of a new diagnostic case the binary splitting rules are compared with the new data starting in the root node down to one of the leaf nodes. The tree then predicts or votes for the class dominating that leaf node. However, to improve the prediction accuracy of a single tree the RF algorithm combines thousands of trees by bootstrap aggregation (bagging). In brief, each tree is fitted using training data sets that are generated by drawing bootstrap samples, i.e., randomly selecting two-third of the data with replacement. In addition, at each node only a random subset of the available variables are used to find an optimal splitting rule. To predict the class of a diagnostic sample the RF takes the majority vote of all trees in the forest.

[0139] To learn the classification the default parameter settings of the randomForest function were used and 10,000 decision trees were fitted. In addition, to take the highly imbalanced class sizes into account a down-sampling strategy was followed, i.e., to fit a decision tree the number of bootstrap samples drawn from each class was equal to the number of samples in the minority class. To further improve prediction performance of the classifier a variable selection was performed, i.e. in a first step the algorithm is used to calculate the variable importance, e.g. the average improvement in Gini purity of a CpG probe when used for a splitting rule. The final classifier was trained using only the 30,000 CpG probes with highest variable importance measure.

[0140] An overview of the training of the classifier is provided in FIG. 7.

### Internal Validation

[0141] To validate the resulting classifier and estimate its performance in predicting future diagnostic cases a repeated five-fold cross-validation was applied. In example, in each cross-validation run the reference set is randomly split into five parts. Then four-fifth of the data is used to train the RF classifier as described above and one-fifth is used for prediction. Currently the estimated test error of the classifier is around 3.1%.

### Example 1: Distinguishing WNT Medulloblastoma from Group 3 Medulloblastoma

[0142] Medulloblastoma is the most common malignant paediatric brain tumour and comprises four distinct molecular variants. These variants are known as WNT, SHH, Group 3, and Group 4. These variants are histologically indistinguishable, but clearly separable by DNA methylation patterns (see FIG. 4). WNT tumours show activated Wnt signalling pathway and carry a favourable prognosis. SHH medulloblastoma show Hedgehog signalling pathway activation and are known to have an intermediate to good prognosis. While both WNT and SSH variants are molecularly already well characterised, the genetic programs driving the pathogenesis of Group 3 and Group 4 medulloblastoma remain largely unknown.

### Example 2: Change of Diagnosis of an Anaplastic Astrocytoma WHO III

[0143] A 1944 born female brain tumour patient was diagnosed based on histology (see FIG. 5A) to suffer from an anaplastic astrocytoma WHO III. Using the inventive classification procedure, a classifier score of 0.335 changed the diagnosis to Glioblastoma WHO IV (see FIG. 5B).

### Example 3: Change of Diagnosis of Schwannoma

[0144] A 1969 born male patient was based on the histology diagnosed with Schwannoma (FIGS. 6A and 6B). The classification procedure of the present disclosure however was able to diagnose the patient to suffer from Meningioma WHO I (see FIG. 6C).

### Example 4: DNA Methylation-Based Classification of Tumour Entities Using Three Gene Sites

[0145] Atypical teratoid rhabdoid tumour (ATRT) is a rare paediatric brain tumour that can be subdivided into three molecular subgroups: ATRT-TYR, ATRT-SHH and ATRT-MYC (Ho et al. 2020, PMID: 31889194).

[0146] The inventors have identified genes that include CpG sites that are most important for the classification of brain tumours and molecular subtypes. The importance of these CpGs for the classification has been measured by applying the permutation-based variable importance measure of the Random Forest (RF) algorithm (Strobl et al. 2007, PMID: 17254353). Among others the three genes PAX6, PTPRN2 and OSTM1 include many important CpGs for the classification. FIG. 8 displays the PTPRN2 gene and the CpG sites located on it. Most of the CpGs have a positive variable importance measure, indicating that these CpGs are predictive for the classification of brain tumours.

[0147] In the following it is demonstrated how the CpGs located on the three genes PAX6, PTPRN2 and OSTM1 can be used to classify ATRTs into their three molecular subtypes by applying different unsupervised and supervised statistical methods. After pre-processing, the inventors identified 1022 CpGs located on the three genes. Applying unsupervised, hierarchical clustering to the methylation values of the 100 CpGs with highest standard deviation across 75 ATRT samples, an almost perfect separation into the three molecular subtypes of ATRT can be found (FIG. 9).

[0148] Next principal component analysis (PCA) is applied as an example for a linear dimension reduction method to the methylation values of all 1022 CpGs. Projecting the samples on the first two principal components (PC) that explain most of the variability in the data, a grouping into the three molecular subtypes can be found (FIG. 10A). In addition, t-distributed stochastic neighbour embedding (t-SNE) has been applied, as an example for a non-linear dimension reduction method, to the methylation data and the resulting projection also shows a clustering of the three ATRT subtypes (FIG. 10B). Other linear and non-linear dimension reduction methods that can be applied to achieve similar results are for example multi-dimensional scaling (MDS), factor analysis (FA), non-negative matrix factorization (NMF), truncated singular value decomposition (SVD), stochastic neighbour embedding (SNE), uniform manifold approximation and projection for dimension reduction (UMAP) and linear discriminant analysis (LDA).

[0149] To show how supervised statistical methods can be applied to fit a model that predicts ATRT subtypes, a classification and regression tree (CART) has been applied to methylation data (FIG. 10C). At each node, the CART algorithm automatically tries out all available 1022 CpGs probes and possible cut-offs and selects the CpG probe and corresponding cut-off that leads to the purest split into the ATRT subtypes. The algorithm stops, as soon as the class purity measured by the Gini coefficient cannot be further improved. Here the CART algorithm found two sequential splitting rules (FIG. 10D) that involve only two CpG probes that result in an almost perfect separation of the ATRT subclasses. Random Forests usually combine hundreds or thousands of CART trees by bootstrap aggregation (bagging) to achieve an improved prediction accuracy. Other supervised methods that can be applied to fit models with comparable prediction performance, are for example gradient boosting machines (GBM), support vector machines (SVM), multinomial logistic regression models and (deep) neural nets.

### Example 5: Gene Expression Data Used for the Classification of Tumour Entities Originally Identified in DNA-Methylation Data

[0150] By analysing DNA-methylation data and training machine learning models for the classification of brain tumours, 688 genes have been identified that include CpG sites that can be considered most important for the classification of molecular brain tumour types. To show that these brain tumour entities can also be recognized in gene expression data and that this data can be used to train similarly performing machine learning models, 1167 brain tumour samples were analysed for which both DNA-methylation as well as gene expression data is available. This paired gene expression and methylation data set includes samples from 79 of the in total 184 classes that were defined on the DNA-methylation level.

[0151] FIG. 11 shows the 1167 samples projected onto a t-distributed stochastic neighbour embedding (tSNE) that was applied to the gene expression data of the 688 most important genes identified in the methylation data. The colouring and the labelling of the groups are according to the class, and the samples are classified by the DNA-methylation classifier. The general clustering of the classes is very similar to a tSNE performed on DNA-methylation and even new sub-entities such as the medulloblastoma (MB) group 3 and 4 subtypes I-VIII can be identified. This proves that the gene expression data of the 688 identified genes is highly predictive for the 184 classes.

[0152] To show that the gene expression data can also be used to train supervised machine learning models, the gene expression data set was reduced to 1057 samples belonging to 50 classes with a minimal class sample size of 7 samples. The inventors then trained a basic random forest (RF) model and a lasso-penalized multinomial logistic regression model to this data set and validated the performance of both models by 3-fold cross-validation (CV). The CV estimated an accuracy of 0.788 for the RF (FIG. 12B) and an accuracy 0.766 for the logistic regression model (FIG. 12A), what proves that gene expression can be used to train similar classification models.

[0153] Accordingly, it has been shown by the inventors that the biological state used to train the classification algorithm is not limited to methylation, but can also be another biological state such as gene expression.

### Example 6: Simulation Study to Investigate Brain Tumor Classifier Performance for Classifiers Trained Using CpG-Probes Located on Random Subsets of Signature Genes and Random Hg19 Genes

[0154] To show that subsets of the 688 signature genes are already predictive for defined brain tumor methylation classes, the inventors performed a simulation study. In this study Random Forest classifiers were trained using CpG probes located on different random subsets of the 688 signature genes. The number of genes were varied from 3 to 688 in 20 equal steps and for each number of genes training was repeated at least 3 times. In addition, the inventors also trained classifiers using CpG probes located on genes randomly sampled from all known genes available in the hg19 genome. For each trained classifier the performance was measured by the overall accuracy and the number of classes for which the class wise accuracy was greater 0.8.

[0155] FIG. 13 shows the results of this simulation study. For subsets of three genes the difference between genes selected from the signature gene list in Table 1 compared to randomly selected genes is most distinct, i.e. the overall accuracy for the signature genes is around 0.8 while for the random gene classifiers it is always below 0.5. When increasing the number of genes, the overall accuracy for both the signature gene classifiers as well as the random gene classifiers increases to levels around 0.90 accuracy and above. The signature gene classifiers perform always better as the classifiers trained on random genes. When considering the number of classes for which a class accuracy of greater 0.8 was achieved, the simulation shows, that the genes in Table 1 are important to reliably predict more specific classes.

### Example 7: Classifiers for Other Pan-Cancer Tumors

[0156] To show that the signature gene list can also be used to train well performing classification models to predict other cancer types, the inventors trained a RF classifier on a large cohort of publicly available DNA-methylation array samples from the Cancer Genome Atlas Project (TCGA).

[0157] FIG. 14 shows a tSNE of 9084 sample from 31 different TCGA projects that investigated different cancer types, e.g. LUAD is the abbreviation lung adenocarcinoma, BRCA for breast cancer etc. A complete list of the TCGA projects and their abbreviations can be found under the following link: https://portal.gde.cancer.gov/projects. The inventors defined for each project a tumor and control tissue class where possible, resulting in total 53 classes. Training a RF classifier using all CpGs located on genes listed on the signature list of Table 1 on this data set, the resulting classifier achieves an overall accuracy of 0.9226, as measured by a 3-fold statistical cross-validation (FIG. 15: the confusion matrix on the left shows the result of the 3-fold cross-validation; the right plot shows the tSNE dimension reduction highlighting the samples that were falsely predicted in the cross-validation. Errors typically occur between related entities, such as Lung Squamous Cell Carcinoma (LUSC) and Lung Adenocarcinoma (LUAD)).

[0158] Applying other statistical or machine learning algorithms, that are suitable for multiclass classification tasks, prediction models with a comparable accuracy can be fitted, as it is shown in FIG. 16. FIG. 16 shows confusion matrices for four different statistical or machine learning models trained on the TCGA cohort shown in FIG. 14. The regularized logistic regression model showed the best overall accuracy of 0.9343, followed by the linear-kernel support vector machine (SVM) with accuracy 0.9299, the extreme gradient boosted trees (XGBoost) classifier with accuracy 0.9239 and a radial basis function kernel SVM with an accuracy of 0.9101. More careful hyper-parameter tuning might improve the performance of all presented prediction models.

### REFERENCES

[0159] R Core Team (2014). R: A language and environment for statistical computing. R Foundation for Statistical Computing, Vienna, Austria. URL http://www.R-project.org/.
[0160] MJ Aryee, A E Jaffe, H Corrada-Bravo, C Ladd-Acosta, A P Feinberg, K D Hansen, R A Irizarry. Minfi: A flexible and comprehensive Bioconductor package for the analysis of Infinium DNA Methylation microarrays. Bioinformatics 2014, In press. doi: 10.1093/bioinformatics/btu049.
[0161] A. Liaw and M. Wiener (2002). Classification and Regression by randomForest. R News 2 (3), 18-22.
[0162] Bioconductor: Open software development for computational biology and bioinformatics R. Gentleman, V. J. Carey, D. M. Bates, B. Bolstad, M. Dettling, S. Dudoit, B. Ellis, L. Gautier, Y. Ge, and others 2004, Genome Biology, Vol. 5, R80.

### Tables:

TABLE 1
List of gene sites according to the disclosure including
their genetic locus and Sequence ID in the sequence listing.
The sequence listing associated with this application is
filed in electronic format and hereby incorporated by reference
into the specification in its entirety.

| Seq. | | | Sequence | Sequence |
|---|---|---|---|---|
| ID No. | Gene site | Chromosome | start | end |
| 1 | ABAT | chr16 | 8766944 | 8879932 |
| 2 | ABLIM2 | chr4 | 7965537 | 8162059 |
| 3 | ABR | chr17 | 905258 | 1092116 |
| 4 | ACAD10 | chr12 | 112122357 | 112196411 |
| 5 | ACMSD | chr2 | 135594686 | 135661102 |
| 6 | ACOT7 | chr1 | 6322832 | 6455326 |
| 7 | ACOX3 | chr4 | 8366509 | 8443952 |
| 8 | ACSL1 | chr4 | 185675249 | 185748715 |
| 9 | ACTR3C | chr7 | 149942801 | 150022258 |
| 10 | ADAMTS17 | chr15 | 100510143 | 100883683 |
| 11 | ADAMTS2 | chr5 | 178536352 | 178773931 |
| 12 | ADARB2 | chr10 | 1221753 | 1781170 |
| 13 | ADGRA1 | chr10 | 134882933 | 134946679 |
| 14 | ADGRB1 | chr8 | 143543877 | 143627868 |
| 15 | ADGRD1 | chr12 | 131436952 | 131627508 |
| 16 | AFF3 | chr2 | 100162216 | 100760537 |
| 17 | AGAP1 | chr2 | 236401233 | 237041944 |
| 18 | AGAP2 | chr12 | 58116576 | 58137444 |
| 19 | AGO2 | chr8 | 141539764 | 141647146 |
| 20 | AIRE | chr21 | 45704221 | 45719602 |
| 21 | AK1 | chr9 | 130627259 | 130641522 |
| 22 | AKAP13 | chr15 | 85922347 | 86294089 |
| 23 | ANAPC16 | chr10 | 73619647 | 73997118 |
| 24 | ANK1 | chr8 | 41509244 | 41755780 |
| 25 | ANK2 | chr4 | 113737739 | 114306396 |
| 26 | ANKLE2 | chr12 | 133300754 | 133339951 |
| 27 | ANKRD11 | chr16 | 89332529 | 89558469 |
| 28 | ANKRD33B | chr5 | 10562935 | 10659428 |
| 29 | ANKS1A | chr6 | 34855538 | 35086820 |
| 30 | ANKS1B | chr12 | 99127069 | 100379932 |
| 31 | AP2A2 | chr11 | 924309 | 1013745 |
| 32 | APBA2 | chr15 | 29129668 | 29412016 |
| 33 | ARHGAP18 | chr6 | 129896740 | 130184192 |
| 34 | ARHGAP22 | chr10 | 49652568 | 49865810 |
| 35 | ARHGAP23 | chr17 | 36583220 | 36670128 |
| 36 | ARHGAP25 | chr2 | 68905246 | 69055457 |
| 37 | ARHGAP26 | chr5 | 142148792 | 142610072 |
| 38 | ARHGAP27P1 | chr17 | 62744280 | 62779617 |
| 39 | ARHGAP45 | chr19 | 1064422 | 1088127 |
| 40 | ARHGEF10 | chr8 | 1770649 | 1908307 |
| 41 | ARHGEF7 | chr13 | 111766124 | 111959581 |
| 42 | ARL6IP6 | chr2 | 153572907 | 153619267 |
| 43 | ARMC2 | chr6 | 109168119 | 109296852 |
| 44 | ASAP1 | chr8 | 131062851 | 131457406 |
| 45 | ASAP2 | chr2 | 9345394 | 9547312 |
| 46 | ASIC2 | chr17 | 31338606 | 32485325 |
| 47 | ASPSCR1 | chr17 | 79933926 | 79976782 |
| 48 | ATG4B | chr2 | 242575527 | 242614771 |
| 49 | ATP11A | chr13 | 113343143 | 113542982 |
| 50 | ATP2B4 | chr1 | 203594415 | 203714709 |
| 51 | ATXN7L1 | chr7 | 105243721 | 105518531 |
| 52 | AUTS2 | chr7 | 69062405 | 70259385 |
| 53 | AXIN2 | chr17 | 63523183 | 63638683 |
| 54 | BACH2 | chr6 | 90634747 | 91008127 |
| 55 | BAHCC1 | chr17 | 79372040 | 79434858 |
| 56 | BAIAP2 | chr17 | 79007447 | 79092732 |
| 57 | BCAR1 | chr16 | 75261428 | 75303451 |
| 58 | BCAT1 | chr12 | 24961458 | 25103893 |
| 59 | BCL11B | chr14 | 99634125 | 99739322 |
| 60 | BFSP2 | chr3 | 133117290 | 133195556 |
| 61 | BOC | chr3 | 112928912 | 113007805 |
| 62 | BOLA2 | chr16 | 29452726 | 30207127 |
| 63 | BTBD11 | chr12 | 107710697 | 108054919 |
| 64 | BTBD9 | chr6 | 38134727 | 38609424 |
| 65 | C10orf105 | chr10 | 73469958 | 73499081 |
| 66 | C10orf90 | chr10 | 128112074 | 128360579 |
| 67 | C19orf25 | chr19 | 1460262 | 1480728 |
| 68 | C1orf94 | chr1 | 34631124 | 34686231 |
| 69 | C6orf223 | chr6 | 43966837 | 43975194 |
| 70 | C7orf50 | chr7 | 1035123 | 1179393 |
| 71 | CABLES1 | chr18 | 20713028 | 20841934 |
| 72 | CACHD1 | chr1 | 64934976 | 65160241 |
| 73 | CACNA1C | chr12 | 2160916 | 2808615 |
| 74 | CACNA1D | chr3 | 53527576 | 53847992 |
| 75 | CACNA1H | chr16 | 1201741 | 1273272 |
| 76 | CACNA1I | chr22 | 39965258 | 40087240 |
| 77 | CACNA2D2 | chr3 | 50398731 | 50542392 |
| 78 | CACNA2D3 | chr3 | 54155193 | 55110084 |
| 79 | CACNA2D4 | chr12 | 1899623 | 2029370 |
| 80 | CACNB2 | chr10 | 18428106 | 18832188 |
| 81 | CADM1 | chr11 | 115038451 | 115376741 |
| 82 | CALD1 | chr7 | 134462664 | 134656980 |
| 83 | CAMK4 | chr5 | 110558447 | 110822248 |
| 84 | CAMTA1 | chr1 | 6843884 | 7831266 |
| 85 | CAPG | chr2 | 85620371 | 85642697 |
| 86 | CASC15 | chr6 | 21663503 | 22216234 |
| 87 | CASP8 | chr2 | 202096666 | 202153934 |
| 88 | CASZ1 | chr1 | 10695166 | 10858233 |
| 89 | CBFA2T3 | chr16 | 88939763 | 89045004 |
| 90 | CCDC140 | chr2 | 223161366 | 223171436 |
| 91 | CCDC167 | chr6 | 37449197 | 37469200 |
| 92 | CCDC177 | chr14 | 70035031 | 70043100 |
| 93 | CCDC85C | chr14 | 99976103 | 100072227 |
| 94 | CCDC88C | chr14 | 91736167 | 91885688 |
| 95 | CCND2 | chr12 | 4381402 | 4416022 |
| 96 | CCR6 | chr6 | 167411316 | 167554129 |
| 97 | CDC42BPB | chr14 | 103397216 | 103525242 |
| 98 | CDH4 | chr20 | 59825982 | 60517173 |
| 99 | CDK6 | chr7 | 92232735 | 92467441 |
| 100 | CDYL | chr6 | 4704893 | 4957278 |
| 101 | CELF4 | chr18 | 34821508 | 35147500 |
| 102 | CELSR1 | chr22 | 46755231 | 46934567 |
| 103 | CFAP46 | chr10 | 134620396 | 134757589 |
| 104 | CFLAR | chr2 | 201979377 | 202038911 |
| 105 | CHID1 | chr11 | 865857 | 916558 |
| 106 | CHN2 | chr7 | 29184700 | 29555444 |
| 107 | CHST11 | chr12 | 104849192 | 105157292 |
| 108 | CHTF18 | chr16 | 837122 | 849574 |
| 109 | CLDN10 | chr13 | 96084353 | 96233510 |
| 110 | CLYBL | chr13 | 100257419 | 100550888 |
| 111 | CMIP | chr16 | 81477275 | 81746867 |
| 112 | CNMD | chr13 | 53275900 | 53315447 |
| 113 | CNP | chr17 | 40117259 | 40131254 |
| 114 | CNPY1 | chr7 | 155292453 | 155328039 |
| 115 | COL23A1 | chr5 | 177663117 | 178019056 |
| 116 | COL26A1 | chr7 | 101004622 | 101203804 |
| 117 | COL4A1 | chr13 | 110799810 | 110960996 |
| 118 | COLEC11 | chr2 | 3640922 | 3693734 |
| 119 | COQ8A | chr1 | 227083089 | 227176746 |
| 120 | CORO1C | chr12 | 109037385 | 109126826 |
| 121 | CORO2B | chr15 | 68869808 | 69021644 |
| 122 | CPE | chr4 | 166298597 | 166420982 |
| 123 | CPEB1-AS1 | chr15 | 83315021 | 83363072 |
| 124 | CPEB4 | chr5 | 173313831 | 173388813 |
| 125 | CPNE4 | chr3 | 131252077 | 132005754 |
| 126 | CPQ | chr8 | 97655999 | 98157222 |
| 127 | CPZ | chr4 | 8580717 | 8622988 |
| 128 | CRACR2A | chr12 | 3714818 | 3863866 |
| 129 | CRADD | chr12 | 94069651 | 94290116 |
| 130 | CRB2 | chr9 | 126116948 | 126142532 |
| 131 | CRISPLD2 | chr16 | 84852087 | 84944616 |
| 132 | CSMD1 | chr8 | 2791375 | 4853828 |
| 133 | CSRNP1 | chr3 | 39181842 | 39197553 |
| 134 | CTBP2 | chr10 | 126674918 | 126851124 |
| 135 | CTNNA2 | chr2 | 79410857 | 80877488 |
| 136 | CUEDC1 | chr17 | 55937104 | 56034184 |
| 137 | CUX1 | chr7 | 101457684 | 101928750 |
| 138 | CXXC5 | chr5 | 139026801 | 139064180 |
| 139 | CYBA | chr16 | 88708197 | 88718992 |
| 140 | CYREN | chr7 | 134775617 | 134857078 |
| 141 | CYTH1 | chr17 | 76668630 | 76779876 |
| 142 | DAGLB | chr7 | 6447247 | 6525349 |
| 143 | DDA1 | chr19 | 17418837 | 17435606 |
| 144 | DDT | chr22 | 24312054 | 24323519 |
| 145 | DDX31 | chr9 | 135468176 | 135547288 |
| 146 | DENND11 | chr7 | 141355028 | 141403453 |
| 147 | DENND2B | chr11 | 8713399 | 8933998 |
| 148 | DENND3 | chr8 | 142137220 | 142207406 |
| 149 | DERL3 | chr22 | 24175190 | 24182815 |
| 150 | DGKD | chr2 | 234261653 | 234382243 |
| 151 | DGKG | chr3 | 185863490 | 186081523 |
| 152 | DICER1 | chr14 | 95551065 | 95625847 |
| 153 | DIP2C | chr10 | 318630 | 737108 |
| 154 | DISC1 | chr1 | 231761061 | 232178519 |
| 155 | DLEU1 | chr13 | 50654914 | 51104170 |
| 156 | DLG4 | chr17 | 7091710 | 7124869 |
| 157 | DLL1 | chr6 | 170589794 | 170601197 |
| 158 | DLX5 | chr7 | 96648202 | 96655643 |
| 159 | DLX6-AS1 | chr7 | 96596327 | 96644877 |
| 160 | DMRTA2 | chr1 | 50881723 | 50890619 |
| 161 | DNAAF5 | chr7 | 764838 | 827616 |
| 162 | DNAJB6 | chr7 | 157128210 | 157211633 |
| 163 | DNAJC17 | chr15 | 41058567 | 41101176 |
| 164 | DNAJC27 | chr2 | 25165005 | 25196463 |
| 165 | DNM3 | chr1 | 171809118 | 172389067 |
| 166 | DNMT3A | chr2 | 25454330 | 25566959 |
| 167 | DONSON | chr21 | 34946283 | 35286203 |
| 168 | DPP6 | chr7 | 153582919 | 154587495 |
| 169 | DPY19L1P1 | chr7 | 32619053 | 32760280 |
| 170 | DSE | chr6 | 116573836 | 116760942 |
| 171 | DTNA | chr18 | 32071754 | 32473308 |
| 172 | DUSP5 | chr10 | 112256125 | 112272802 |
| 173 | DUSP6 | chr12 | 89740337 | 89747796 |
| 174 | DUSP7 | chr3 | 52081437 | 52091961 |
| 175 | EBF1 | chr5 | 158121423 | 158528288 |
| 176 | EBF2 | chr8 | 25697746 | 25904140 |
| 177 | EBF3 | chr10 | 131631996 | 131763591 |
| 178 | EDNRB | chr13 | 78468116 | 78551164 |
| 179 | EGFR | chr7 | 55085225 | 55276531 |
| 180 | EML1 | chr14 | 100202569 | 100409895 |
| 181 | EMX2OS | chr10 | 119242304 | 119306079 |
| 182 | EOGT | chr3 | 69022868 | 69064274 |
| 183 | EPAS1 | chr2 | 46523041 | 46615342 |
| 184 | EPHA10 | chr1 | 38178053 | 38232324 |
| 185 | EPHB1 | chr3 | 134512599 | 134980807 |
| 186 | ERI3 | chr1 | 44685242 | 44822439 |
| 187 | ESR1 | chr6 | 151976330 | 152425908 |
| 188 | ESRRG | chr1 | 216675088 | 217312597 |
| 189 | ETS1 | chr11 | 128327156 | 128458953 |
| 190 | EXPH5 | chr11 | 108374658 | 108465874 |
| 191 | EXT1 | chr8 | 118810102 | 119125558 |
| 192 | EXT2 | chr11 | 44095576 | 44268480 |
| 193 | F11R | chr1 | 160963501 | 161010274 |
| 194 | FAM181A | chr14 | 94383740 | 94397454 |
| 195 | FAM53B | chr10 | 126304149 | 126480407 |
| 196 | FAM83E | chr19 | 49102357 | 49118194 |
| 197 | FBRSL1 | chr12 | 133065657 | 133163273 |
| 198 | FBXL17 | chr5 | 107193234 | 107719299 |
| 199 | FBXL18 | chr7 | 5513928 | 5554899 |
| 200 | FEZ1 | chr11 | 125314141 | 125367706 |
| 201 | FGFR2 | chr10 | 123236344 | 123359472 |
| 202 | FHIT | chr3 | 59733536 | 61238633 |
| 203 | FLJ12825 | chr12 | 54450538 | 54517518 |
| 204 | FMN1 | chr15 | 33056245 | 33488434 |
| 205 | FMNL2 | chr2 | 153190251 | 153507848 |
| 206 | FOXK1 | chr7 | 4681888 | 4812574 |
| 207 | FOXO1 | chr13 | 41046631 | 41242234 |
| 208 | FOXP1 | chr3 | 71002365 | 71634640 |
| 209 | FOXP4 | chr6 | 41512664 | 41571622 |
| 210 | FRMD4A | chr10 | 13684206 | 14505643 |
| 211 | FRMPD2 | chr10 | 49363101 | 49484441 |
| 212 | FYN | chr6 | 111980035 | 112196155 |
| 213 | GABRB3 | chr15 | 26787194 | 27186186 |
| 214 | GAK | chr4 | 841565 | 927674 |
| 215 | GALK2 | chr15 | 49446476 | 49623502 |
| 216 | GALNT2 | chr1 | 230192036 | 230419375 |
| 217 | GALNT9 | chr12 | 132679417 | 132907405 |
| 218 | GAREM2 | chr2 | 26394460 | 26414032 |
| 219 | GAS7 | chr17 | 9812426 | 10103368 |
| 220 | GATA4 | chr8 | 11532968 | 11619009 |
| 221 | GATA6 | chr18 | 19747904 | 19783991 |
| 222 | GCK | chr7 | 44182370 | 44230522 |
| 223 | GCSAML | chr1 | 247668894 | 247741348 |
| 224 | GDF6 | chr8 | 97153058 | 97174520 |
| 225 | GDNF | chr5 | 37811279 | 37841282 |
| 226 | GLI2 | chr2 | 121491699 | 121751729 |
| 227 | GLI3 | chr7 | 41999048 | 42278118 |
| 228 | GLT8D2 | chr12 | 104381265 | 104459461 |
| 229 | GLUD1P2 | chr10 | 46763168 | 48959583 |
| 230 | GNA12 | chr7 | 2766241 | 2885459 |
| 231 | GNAO1 | chr16 | 56223751 | 56392856 |
| 232 | GNAS | chr20 | 57413295 | 57487750 |
| 233 | GNB5 | chr15 | 52411623 | 52485065 |
| 234 | GNG7 | chr19 | 2509718 | 2704246 |
| 235 | GPC6 | chr13 | 93877578 | 95061773 |
| 236 | GPR39 | chr2 | 133172647 | 133405669 |
| 237 | GRHL2 | chr8 | 102503168 | 102683452 |
| 238 | GRID1 | chr10 | 87357812 | 88127750 |
| 239 | GRIK2 | chr6 | 101845169 | 102519458 |
| 240 | GRIN1 | chr9 | 140032109 | 140064714 |
| 241 | GRIN2B | chr12 | 13712910 | 14134522 |
| 242 | GRIP1 | chr12 | 66739711 | 67199394 |
| 243 | GRK5 | chr10 | 120965697 | 121216631 |
| 244 | GRTP1 | chr13 | 113977005 | 114019963 |
| 245 | GSE1 | chr16 | 85643529 | 85711312 |
| 246 | GSG1 | chr12 | 13234971 | 13258130 |
| 247 | GTF2E2 | chr8 | 30434531 | 30517238 |
| 248 | HBG2 | chr11 | 5268002 | 5668511 |
| 249 | HDAC4 | chr2 | 239968364 | 240324846 |
| 250 | HDAC7 | chr12 | 48175007 | 48215263 |
| 251 | HHEX | chr10 | 94448181 | 94456908 |
| 252 | HIVEP3 | chr1 | 41970536 | 42503096 |
| 253 | HK1 | chr10 | 71028256 | 71163137 |
| 254 | HLX | chr1 | 221051243 | 221059900 |
| 255 | HMGA2 | chr12 | 66215937 | 66361571 |
| 256 | HMGCR | chr5 | 74630654 | 74659426 |
| 257 | HNF1B | chr17 | 36044934 | 36106596 |
| 258 | HOTAIR | chr12 | 54354592 | 54370240 |
| 259 | HOTTIP | chr7 | 27238540 | 27247630 |
| 260 | HOXA-AS3 | chr7 | 27178483 | 27197047 |
| 261 | HOXA10-HOXA9 | chr7 | 27200557 | 27221380 |
| 262 | HOXA3 | chr7 | 27144309 | 27168139 |
| 263 | HOXB-AS1 | chr17 | 46620213 | 46630103 |
| 264 | HOXB-AS3 | chr17 | 46666323 | 46685274 |
| 265 | HOXB3 | chr17 | 46624732 | 46669131 |
| 266 | HOXB6 | chr17 | 46671599 | 46683854 |
| 267 | HOXC4 | chr12 | 54409142 | 54451314 |
| 268 | HOXD3 | chr2 | 177027305 | 177039326 |
| 269 | HOXD4 | chr2 | 177014613 | 177019449 |
| 270 | ICAM5 | chr19 | 10399155 | 10408954 |
| 271 | IDI2 | chr10 | 1063347 | 1073299 |
| 272 | IFFO1 | chr12 | 6646039 | 6666749 |
| 273 | IFT80 | chr3 | 159943741 | 160169126 |
| 274 | IGDCC4 | chr15 | 65672325 | 65716910 |
| 275 | IGF1R | chr15 | 99191261 | 99509259 |
| 276 | IGF2BP1 | chr17 | 47073274 | 47135007 |
| 277 | IGF2BP3 | chr7 | 23348328 | 23511495 |
| 278 | IGFBPL1 | chr9 | 38405025 | 38425944 |
| 279 | IGSF21 | chr1 | 18432740 | 18706477 |
| 280 | IL17D | chr13 | 21275982 | 21298737 |
| 281 | INPP5A | chr10 | 134349853 | 134598484 |
| 282 | IQCE | chr7 | 2597132 | 2655868 |
| 283 | IQSEC1 | chr3 | 12937042 | 13116117 |
| 284 | IRF6 | chr1 | 209957468 | 209981020 |
| 285 | ISLR2 | chr15 | 74420215 | 74430643 |
| 286 | ITGA5 | chr12 | 54787545 | 54814550 |
| 287 | ITPK1 | chr14 | 93401759 | 93583763 |
| 288 | ITPKB | chr1 | 226817891 | 226928376 |
| 289 | JAKMIP1 | chr4 | 6026426 | 6203818 |
| 290 | JPH3 | chr16 | 87633941 | 87733261 |
| 291 | JUP | chr17 | 39678369 | 39944464 |
| 292 | KAZN | chr1 | 14923713 | 15446044 |
| 293 | KCNAB2 | chr1 | 6050858 | 6162753 |
| 294 | KCNB1 | chr20 | 47987005 | 48101990 |
| 295 | KCNH2 | chr7 | 150640544 | 150676902 |
| 296 | KCNIP1 | chr5 | 169779381 | 170165136 |
| 297 | KCNIP4 | chr4 | 20728739 | 21951874 |
| 298 | KCNMA1 | chr10 | 78627859 | 79399077 |
| 299 | KCNQ1 | chr11 | 2464721 | 2871840 |
| 300 | KCNV2 | chr9 | 2716026 | 2731537 |
| 301 | KDM4B | chr19 | 4967624 | 5155108 |
| 302 | KIAA1522 | chr1 | 33206012 | 33242071 |
| 303 | KIF21B | chr1 | 200937014 | 200994328 |
| 304 | KIF26A | chr14 | 104603560 | 104648735 |
| 305 | KIF26B | chr1 | 245316787 | 245867928 |
| 306 | KIFC3 | chr16 | 57790629 | 57898233 |
| 307 | KIRREL3 | chr11 | 126291896 | 126874855 |
| 308 | KLHL25 | chr15 | 86301059 | 86339689 |
| 309 | KLHL26 | chr19 | 18746338 | 18782802 |
| 310 | KLHL29 | chr2 | 23606798 | 23932983 |
| 311 | KNDC1 | chr10 | 134972471 | 135041416 |
| 312 | LAIR1 | chr19 | 54863735 | 54883665 |
| 313 | LBX1-AS1 | chr10 | 102987851 | 103000116 |
| 314 | LDLRAD4 | chr18 | 13217229 | 13654253 |
| 315 | LHPP | chr10 | 126148841 | 126304210 |
| 316 | LHX2 | chr9 | 126772389 | 126796942 |
| 317 | LHX4 | chr1 | 180197933 | 180245688 |
| 318 | LHX5 | chr12 | 113899194 | 113911377 |
| 319 | LHX9 | chr1 | 197880135 | 197903215 |
| 320 | LIMCH1 | chr4 | 41361304 | 41703561 |
| 321 | LIN28A | chr1 | 26735769 | 26757719 |
| 322 | LINC00311 | chr16 | 85315064 | 85323185 |
| 323 | LINC00461 | chr5 | 87835097 | 87982120 |
| 324 | LINC00856 | chr10 | 80006882 | 80312612 |
| 325 | LINC01140 | chr1 | 87457190 | 87636386 |
| 326 | LINC01551 | chr14 | 29240410 | 29265500 |
| 327 | LINC01749 | chr20 | 61639235 | 61717923 |
| 328 | LIPE-AS1 | chr19 | 42899800 | 43158007 |
| 329 | LMF1 | chr16 | 902135 | 1032818 |
| 330 | LMX1B | chr9 | 129375222 | 129464811 |
| 331 | LOC100130872 | chr4 | 1188071 | 1204250 |
| 332 | LOC100132215 | chr2 | 63269600 | 63277156 |
| 333 | LOC145845 | chr15 | 37155144 | 37180234 |
| 334 | LOC339874 | chr3 | 131042436 | 131101819 |
| 335 | LOC606724 | chr16 | 29459166 | 30202075 |
| 336 | LOC613038 | chr16 | 29474789 | 30219748 |
| 337 | LOXL3 | chr2 | 74758446 | 74782562 |
| 338 | LPCAT1 | chr5 | 1460042 | 1525576 |
| 339 | LPIN1 | chr2 | 11816205 | 11969033 |
| 340 | LPP | chr3 | 187870163 | 188609960 |
| 341 | LRBA | chr4 | 151184311 | 151938149 |
| 342 | LRMDA | chr10 | 77541019 | 78318626 |
| 343 | LRP2 | chr2 | 169982119 | 170220622 |
| 344 | LRRC61 | chr7 | 150005130 | 150036745 |
| 345 | LRRFIP1 | chr2 | 238534724 | 238691790 |
| 346 | LTF | chr3 | 46475996 | 46528224 |
| 347 | LYPD1 | chr2 | 133400837 | 133430570 |
| 348 | MACROD1 | chr11 | 63764530 | 63935085 |
| 349 | MAD1L1 | chr7 | 1853928 | 2274083 |
| 350 | MAML2 | chr11 | 95709940 | 96077844 |
| 351 | MAML3 | chr4 | 140636046 | 141076733 |
| 352 | MAP2K3 | chr17 | 21186468 | 21220051 |
| 353 | MAP3K3 | chr17 | 61698275 | 61775170 |
| 354 | MAPK8IP1 | chr11 | 45905547 | 45929516 |
| 355 | MAPK8IP3 | chr16 | 1754721 | 1821818 |
| 356 | MBP | chr18 | 74689289 | 74846274 |
| 357 | MCC | chr5 | 112356296 | 112826027 |
| 358 | MCF2L | chr13 | 113621314 | 113755553 |
| 359 | MCIDAS | chr5 | 54513925 | 54524643 |
| 360 | MCPH1 | chr8 | 6262613 | 6502640 |
| 361 | MDM4 | chr1 | 204484007 | 204679161 |
| 362 | MECOM | chr3 | 168799787 | 169383063 |
| 363 | MEGF6 | chr1 | 3403006 | 3529559 |
| 364 | MEIS1 | chr2 | 66661032 | 66801391 |
| 365 | MEIS2 | chr15 | 37181722 | 37395000 |
| 366 | METAP1D | chr2 | 172863304 | 172947087 |
| 367 | MGMT | chr10 | 131263954 | 131567283 |
| 368 | MIR100HG | chr11 | 121958311 | 122239967 |
| 369 | MIR124-2HG | chr8 | 65284275 | 65297342 |
| 370 | MIR548F5 | chr13 | 36046426 | 36516882 |
| 371 | MIR548G | chr3 | 99271653 | 99718559 |
| 372 | MIR548H4 | chr15 | 69114803 | 69491362 |
| 373 | MIR9-3HG | chr15 | 89909830 | 89943218 |
| 374 | MIRLET7BHG | chr22 | 46448226 | 46511308 |
| 375 | MLC1 | chr22 | 50496320 | 50525858 |
| 376 | MLLT1 | chr19 | 6208892 | 6281459 |
| 377 | MNX1 | chr7 | 156785245 | 156804847 |
| 378 | MOB2 | chr11 | 1489185 | 1787001 |
| 379 | MPP7 | chr10 | 28338423 | 28593495 |
| 380 | MRC2 | chr17 | 60703262 | 60772462 |
| 381 | MSC-AS1 | chr8 | 72753858 | 72970047 |
| 382 | MSI2 | chr17 | 55331712 | 55758799 |
| 383 | MSRA | chr8 | 9910330 | 10287901 |
| 384 | MTHFR | chr1 | 11844287 | 11867660 |
| 385 | MYO16 | chr13 | 109247000 | 109861855 |
| 386 | MYT1 | chr20 | 62781644 | 62875106 |
| 387 | MYT1L | chr2 | 1791385 | 2336545 |
| 388 | NAV1 | chr1 | 201615950 | 201797602 |
| 389 | NAV2 | chr11 | 19370771 | 20144647 |
| 390 | NBEA | chr13 | 35514924 | 36248374 |
| 391 | NCOR2 | chr12 | 124807457 | 125053510 |
| 392 | NDRG4 | chr16 | 58496049 | 58549023 |
| 393 | NDST1 | chr5 | 149875840 | 149939273 |
| 394 | NDUFA13 | chr19 | 19625519 | 19647453 |
| 395 | NEAT1 | chr11 | 65188769 | 65213528 |
| 396 | NFATC1 | chr18 | 77154272 | 77290823 |
| 397 | NFIB | chr9 | 14080342 | 14400482 |
| 398 | NFIX | chr19 | 13105084 | 13211110 |
| 399 | NHSL1 | chr6 | 138741681 | 138895168 |
| 400 | NKD2 | chr5 | 1007577 | 1040427 |
| 401 | NOTCH1 | chr9 | 139387396 | 139441738 |
| 402 | NPHP4 | chr1 | 5921370 | 6054033 |
| 403 | NR1D1 | chr17 | 38247537 | 38258478 |
| 404 | NR2E1 | chr6 | 108485715 | 108511513 |
| 405 | NR2F1-AS1 | chr5 | 92743565 | 92918503 |
| 406 | NR5A2 | chr1 | 199995230 | 200148050 |
| 407 | NRCAM | chr7 | 107786571 | 108098341 |
| 408 | NRG1 | chr8 | 31495411 | 32624058 |
| 409 | NRXN1 | chr2 | 50144143 | 51261174 |
| 410 | NRXN3 | chr14 | 78635216 | 80336133 |
| 411 | NTM | chr11 | 131238871 | 132208216 |
| 412 | NUDT1 | chr7 | 2280357 | 2292280 |
| 413 | NUMA1 | chr11 | 71712411 | 71793073 |
| 414 | NXN | chr17 | 701053 | 884498 |
| 415 | NXPH1 | chr7 | 8472085 | 8794093 |
| 416 | OBI1-AS1 | chr13 | 78492324 | 79192960 |
| 417 | OLFM1 | chr9 | 137965589 | 138014530 |
| 418 | OLIG2 | chr21 | 34396716 | 34403003 |
| 419 | ONECUT2 | chr18 | 55101417 | 55160030 |
| 420 | OPCML | chr11 | 132283375 | 133403903 |
| 421 | OSBPL3 | chr7 | 24834664 | 25021260 |
| 422 | OTP | chr5 | 76923037 | 76936022 |
| 423 | OTX1 | chr2 | 63275692 | 63286466 |
| 424 | OTX2-AS1 | chr14 | 57277224 | 57399050 |
| 425 | PACRG | chr6 | 163146664 | 163738024 |
| 426 | PACS2 | chr14 | 105765670 | 105865984 |
| 427 | PARD3 | chr10 | 34396988 | 35105753 |
| 428 | PARD3B | chr2 | 205409016 | 206486386 |
| 429 | PAX1 | chr20 | 21684797 | 21700624 |
| 430 | PAX3 | chr2 | 223063106 | 223165215 |
| 431 | PAX6 | chr11 | 31804840 | 31841009 |
| 432 | PAX6-AS1 | chr11 | 31836614 | 31910087 |
| 433 | PBX1 | chr1 | 164527097 | 164855800 |
| 434 | PCCA | chr13 | 100739769 | 101184191 |
| 435 | PCDHA1 | chr5 | 140164376 | 140393429 |
| 436 | PCDHA2 | chr5 | 140172944 | 140393429 |
| 437 | PCDHA3 | chr5 | 140179283 | 140393429 |
| 438 | PCDHA4 | chr5 | 140185172 | 140393429 |
| 439 | PCDHGA1 | chr5 | 140708752 | 140894048 |
| 440 | PCDHGA10 | chr5 | 140791243 | 140894048 |
| 441 | PCDHGA11 | chr5 | 140799037 | 140894048 |
| 442 | PCDHGA12 | chr5 | 140808658 | 140894048 |
| 443 | PCDHGA2 | chr5 | 140716854 | 140894048 |
| 444 | PCDHGA3 | chr5 | 140722101 | 140894048 |
| 445 | PCDHGA4 | chr5 | 140733268 | 140894048 |
| 446 | PCDHGA5 | chr5 | 140742398 | 140894048 |
| 447 | PCDHGA6 | chr5 | 140752151 | 140894048 |
| 448 | PCDHGA7 | chr5 | 140760967 | 140894048 |
| 449 | PCDHGA8 | chr5 | 140765952 | 140894048 |
| 450 | PCDHGA9 | chr5 | 140781020 | 140894048 |
| 451 | PCDHGB1 | chr5 | 140728328 | 140894048 |
| 452 | PCDHGB2 | chr5 | 140738203 | 140894048 |
| 453 | PCDHGB3 | chr5 | 140748462 | 140894048 |
| 454 | PCDHGB4 | chr5 | 140765952 | 140894048 |
| 455 | PCDHGB5 | chr5 | 140776195 | 140894048 |
| 456 | PCDHGB6 | chr5 | 140786270 | 140894048 |
| 457 | PCDHGB7 | chr5 | 140795714 | 140894048 |
| 458 | PCDHGC3 | chr5 | 140854069 | 140894048 |
| 459 | PCSK9 | chr1 | 55503649 | 55532026 |
| 460 | PDE4B | chr1 | 66256693 | 66841762 |
| 461 | PDE4D | chr5 | 58263366 | 59785425 |
| 462 | PDE6B | chr4 | 617863 | 666181 |
| 463 | PDGFRA | chr4 | 54242320 | 55165912 |
| 464 | PER2 | chr2 | 239151179 | 239200243 |
| 465 | PHF19 | chr9 | 123616431 | 123641106 |
| 466 | PITPNC1 | chr17 | 65371897 | 65694879 |
| 467 | PITX2 | chr4 | 111537080 | 111564779 |
| 468 | PITX3 | chr10 | 103988446 | 104002731 |
| 469 | PLEC | chr8 | 144987821 | 145052413 |
| 470 | PLEKHM1P1 | chr17 | 62773689 | 62834802 |
| 471 | PLEKHO2 | chr15 | 65132582 | 65161701 |
| 472 | PLXNC1 | chr12 | 94540999 | 94702951 |
| 473 | POU6F2 | chr7 | 39016109 | 39505890 |
| 474 | PPM1H | chr12 | 63036263 | 63330165 |
| 475 | PPP2R2A | chr8 | 25228575 | 26231695 |
| 476 | PPP2R2B | chr5 | 145967567 | 146462583 |
| 477 | PRDM16 | chr1 | 2984242 | 3356685 |
| 478 | PRDM2 | chr1 | 14025235 | 14153074 |
| 479 | PRDM6 | chr5 | 122423341 | 122525245 |
| 480 | PRDM8 | chr4 | 81103939 | 81126982 |
| 481 | PRKAG2 | chr7 | 151251701 | 151575816 |
| 482 | PRKCA | chr17 | 64297426 | 64808362 |
| 483 | PRKCE | chr2 | 45877543 | 46416629 |
| 484 | PRKCH | chr14 | 61652787 | 62019198 |
| 485 | PRKCZ | chr1 | 1980409 | 2118334 |
| 486 | PRKN | chr6 | 161767090 | 163150334 |
| 487 | PRR5L | chr11 | 36316225 | 36488254 |
| 488 | PSD3 | chr8 | 18383313 | 18872696 |
| 489 | PTPN20 | chr10 | 46548623 | 48829424 |
| 490 | PTPRG | chr3 | 61545743 | 62282073 |
| 491 | PTPRN2 | chr7 | 157330250 | 158381982 |
| 492 | PVT1 | chr8 | 128805303 | 129114999 |
| 493 | PWWP2B | chr10 | 134209202 | 134232858 |
| 494 | RAB11FIP3 | chr16 | 474168 | 573981 |
| 495 | RABGAP1L | chr1 | 174127052 | 174965945 |
| 496 | RAD51B | chr14 | 68284996 | 69198435 |
| 497 | RADIL | chr7 | 4832785 | 4924835 |
| 498 | RAI1 | chr17 | 17583287 | 17716265 |
| 499 | RALGAPA2 | chr20 | 20368772 | 20694766 |
| 500 | RAPGEF4 | chr2 | 173599025 | 173919120 |
| 501 | RASA3 | chr13 | 114745694 | 114899595 |
| 502 | RASGRP3 | chr2 | 33659916 | 33791298 |
| 503 | RBFOX1 | chr16 | 6067632 | 7764840 |
| 504 | RBFOX3 | chr17 | 77083927 | 77513730 |
| 505 | RBM20 | chr10 | 112402655 | 112600727 |
| 506 | RBMS1 | chr2 | 161127162 | 161351818 |
| 507 | RBMS3 | chr3 | 29321303 | 30053386 |
| 508 | RCN1 | chr11 | 31836614 | 32128772 |
| 509 | RERE | chr1 | 8410964 | 8879199 |
| 510 | REXO1 | chr19 | 1813745 | 1849952 |
| 511 | RFX4 | chr12 | 106975185 | 107158082 |
| 512 | RGL1 | chr1 | 183603708 | 183899166 |
| 513 | RGL3 | chr19 | 11492273 | 11531518 |
| 514 | RGS12 | chr4 | 3293255 | 3443140 |
| 515 | RGS20 | chr8 | 54762868 | 54873363 |
| 516 | RIMBP2 | chr12 | 130879181 | 131202326 |
| 517 | RNF216 | chr7 | 5658172 | 5822861 |
| 518 | RNF4 | chr4 | 2469295 | 2519086 |
| 519 | RNLS | chr10 | 89890557 | 90344582 |
| 520 | ROR1 | chr1 | 64238190 | 64648679 |
| 521 | RORA | chr15 | 60778983 | 61523002 |
| 522 | RPS6KA2 | chr6 | 166821354 | 167277271 |
| 523 | RPTOR | chr17 | 78517125 | 78941673 |
| 524 | RREB1 | chr6 | 7106330 | 7253713 |
| 525 | RTEL1 | chr20 | 62287663 | 62330044 |
| 526 | RTEL1-TNFRSF6B | chr20 | 62287663 | 62331551 |
| 527 | RUBCN | chr3 | 197396759 | 197478068 |
| 528 | RUNDC3A | chr17 | 42384427 | 42397538 |
| 529 | RUNX1 | chr21 | 36158598 | 37358547 |
| 530 | RXRA | chr9 | 137207444 | 137333931 |
| 531 | SASH1 | chr6 | 148662229 | 148874684 |
| 532 | SATB2 | chr2 | 200132723 | 200337489 |
| 533 | SATB2-AS1 | chr2 | 200331321 | 200338981 |
| 534 | SBNO2 | chr19 | 1106133 | 1175782 |
| 535 | SCG5 | chr15 | 32932370 | 32990798 |
| 536 | SCOC | chr4 | 141176940 | 141305210 |
| 537 | SDK1 | chr7 | 3339580 | 4310131 |
| 538 | SDK2 | chr17 | 71329023 | 71641727 |
| 539 | SEPTIN9 | chr17 | 75275992 | 75498178 |
| 540 | SFXN5 | chr2 | 73167665 | 73300465 |
| 541 | SH3BP4 | chr2 | 235859128 | 235965858 |
| 542 | SH3RF3 | chr2 | 109744497 | 110263707 |
| 543 | SHANK2 | chr11 | 70312461 | 70937342 |
| 544 | SHOX2 | chr3 | 157812300 | 157825452 |
| 545 | SHROOM3 | chr4 | 77354753 | 77705905 |
| 546 | SIM1 | chr6 | 100835250 | 100914305 |
| 547 | SIM2 | chr21 | 38070491 | 38124010 |
| 548 | SKI | chr1 | 2158634 | 2243152 |
| 549 | SKOR1 | chr15 | 68110542 | 68127674 |
| 550 | SLC12A9 | chr7 | 100448841 | 100466134 |
| 551 | SLC1A7 | chr1 | 53551351 | 53609789 |
| 552 | SLC22A18 | chr11 | 2919451 | 2947976 |
| 553 | SLC22A18AS | chr11 | 2907827 | 2926675 |
| 554 | SLC25A10 | chr17 | 79668900 | 79689546 |
| 555 | SLC25A22 | chr11 | 788975 | 799769 |
| 556 | SLC38A10 | chr17 | 79217299 | 79270596 |
| 557 | SLC4A8 | chr12 | 51783601 | 51911047 |
| 558 | SLC6A9 | chr1 | 44455672 | 44498664 |
| 559 | SLC7A5 | chr16 | 87862129 | 87904600 |
| 560 | SLC8A2 | chr19 | 47929779 | 47976807 |
| 561 | SLC9A3 | chr5 | 471834 | 526049 |
| 562 | SLX1A | chr16 | 29464322 | 30210387 |
| 563 | SLX1B-SULT1A4 | chr16 | 29464371 | 30217150 |
| 564 | SMAD3 | chr15 | 67356695 | 67489033 |
| 565 | SMAGP | chr12 | 51637633 | 51665702 |
| 566 | SMG1P2 | chr16 | 29452726 | 30283698 |
| 567 | SMURF1 | chr7 | 98623558 | 98743243 |
| 568 | SND1 | chr7 | 127290702 | 127734159 |
| 569 | SNTG2 | chr2 | 945054 | 1372884 |
| 570 | SNX29 | chr16 | 12069102 | 12669646 |
| 571 | SOGA1 | chr20 | 35404345 | 35493587 |
| 572 | SORBS2 | chr4 | 186505098 | 186879370 |
| 573 | SORCS2 | chr4 | 7192874 | 7746064 |
| 574 | SOX10 | chr22 | 38366819 | 38384929 |
| 575 | SOX2-OT | chr3 | 180772968 | 181461513 |
| 576 | SOX6 | chr11 | 15986495 | 16761690 |
| 577 | SPATA13 | chr13 | 24552339 | 24898169 |
| 578 | SPECC1 | chr17 | 19911149 | 20219572 |
| 579 | SPON2 | chr4 | 1159221 | 1204250 |
| 580 | SPPL2B | chr19 | 2268020 | 2356600 |
| 581 | SPTBN1 | chr2 | 54681954 | 54900083 |
| 582 | SPTBN4 | chr19 | 40970648 | 41083865 |
| 583 | SRCIN1 | chr17 | 36684759 | 36763683 |
| 584 | SRGAP3 | chr3 | 9020776 | 9292869 |
| 585 | SRRM3 | chr7 | 75829716 | 75918105 |
| 586 | SSBP3 | chr1 | 54689604 | 54873568 |
| 587 | STAP2 | chr19 | 4322540 | 4344283 |
| 588 | STARD13 | chr13 | 33675772 | 34252432 |
| 589 | STK10 | chr5 | 171467574 | 171616846 |
| 590 | STK24 | chr13 | 99100955 | 99230896 |
| 591 | STK32C | chr10 | 134019496 | 134147563 |
| 592 | STON1-GTF2A1L | chr2 | 48755564 | 49005156 |
| 593 | STOX2 | chr4 | 184825009 | 184940375 |
| 594 | STRA6 | chr15 | 74470308 | 74503546 |
| 595 | SYCP2L | chr6 | 10746495 | 10976041 |
| 596 | SYNJ2 | chr6 | 158401388 | 158521707 |
| 597 | TACC2 | chr10 | 123747189 | 124015557 |
| 598 | TAFA2 | chr12 | 62100529 | 62655425 |
| 599 | TBC1D16 | chr17 | 77904642 | 78011157 |
| 600 | TBC1D7 | chr6 | 13265274 | 13330287 |
| 601 | TBC1D9 | chr4 | 141540436 | 141678971 |
| 602 | TBCD | chr17 | 80708440 | 80902562 |
| 603 | TBR1 | chr2 | 162271120 | 162283073 |
| 60 | TBX15 | chr1 | 119424166 | 119533679 |
| 605 | TBX4 | chr17 | 59528279 | 59563971 |
| 606 | TBX5 | chr12 | 114790235 | 114847747 |
| 607 | TEAD1 | chr11 | 12694469 | 12967784 |
| 608 | TENM2 | chr5 | 166710343 | 167692662 |
| 609 | TENM3 | chr4 | 183063640 | 183725677 |
| 610 | TENM3-AS1 | chr4 | 183058659 | 183067168 |
| 611 | TENM4 | chr11 | 78362828 | 79153195 |
| 612 | TET1 | chr10 | 70318617 | 70455739 |
| 613 | TFAP2A | chr6 | 10395416 | 10421297 |
| 614 | TFAP2B | chr6 | 50784939 | 50816826 |
| 615 | TG | chr8 | 133877705 | 134148643 |
| 616 | TGFB3 | chr14 | 76422942 | 76449592 |
| 617 | THRA | chr17 | 38216663 | 38251620 |
| 618 | THRB | chr3 | 24157145 | 24537953 |
| 619 | TK1 | chr17 | 76168660 | 76184785 |
| 620 | TLX1NB | chr10 | 102847578 | 102892403 |
| 621 | TMBIM1 | chr2 | 219137417 | 219158780 |
| 622 | TMEM132C | chr12 | 128750448 | 129193960 |
| 623 | TMEM132D | chr12 | 129554771 | 130389712 |
| 624 | TNRC18P1 | chr4 | 141560845 | 141565734 |
| 625 | TNS3 | chr7 | 47313252 | 47623242 |
| 626 | TOLLIP | chr11 | 1294098 | 1332392 |
| 627 | TOM1L2 | chr17 | 17745322 | 17877284 |
| 628 | TOX2 | chr20 | 42541992 | 42699754 |
| 629 | TP73 | chr1 | 3567629 | 3654265 |
| 630 | TRABD2B | chr1 | 48224700 | 48464062 |
| 631 | TRAK1 | chr3 | 42131246 | 42268882 |
| 632 | TRAPPC12 | chr2 | 3381946 | 3490357 |
| 633 | TRAPPC9 | chr8 | 140741086 | 141470178 |
| 634 | TRIM2 | chr4 | 154072770 | 154261974 |
| 635 | TRIM34 | chr11 | 5639674 | 5667125 |
| 636 | TRIM6-TRIM34 | chr11 | 5616365 | 5667125 |
| 637 | TRIM65 | chr17 | 73883541 | 73894584 |
| 638 | TRIM71 | chr3 | 32858010 | 32935271 |
| 639 | TRIO | chr5 | 14142329 | 14510958 |
| 640 | TRIP6 | chr7 | 100463450 | 100472576 |
| 641 | TSC2 | chr16 | 2096490 | 2140213 |
| 642 | TSNAX-DISC1 | chr1 | 231662899 | 232178519 |
| 643 | TSPAN14 | chr10 | 82212538 | 82283891 |
| 644 | TSPAN4 | chr11 | 841324 | 868616 |
| 645 | TSPAN9 | chr12 | 3185021 | 3397230 |
| 646 | TSPEAR | chr21 | 45916275 | 46132995 |
| 647 | TSTD1 | chr1 | 161005922 | 161010274 |
| 648 | TTC12 | chr11 | 113183751 | 113245518 |
| 649 | TTLL10 | chr1 | 1107786 | 1134813 |
| 650 | TTLL11 | chr9 | 124582704 | 124857385 |
| 651 | TUBA1C | chr12 | 49620209 | 49668613 |
| 652 | TULP4 | chr6 | 158732192 | 158934356 |
| 653 | TXNRD1 | chr12 | 104604988 | 104745585 |
| 654 | UFSP2 | chr4 | 186319194 | 186348639 |
| 655 | UHRF1 | chr19 | 4908010 | 4963665 |
| 656 | UNQ6494 | chr9 | 92253198 | 92336174 |
| 657 | USP20 | chr9 | 132596196 | 132645617 |
| 658 | UTRN | chr6 | 144605990 | 145175670 |
| 659 | VAV2 | chr9 | 136625516 | 136858946 |
| 660 | VAX1 | chr10 | 118886532 | 118899312 |
| 661 | VAX2 | chr2 | 71126220 | 71162075 |
| 662 | VEPH1 | chr3 | 156976032 | 157222915 |
| 663 | VGLL4 | chr3 | 11596044 | 11763720 |
| 664 | VOPP1 | chr7 | 55536806 | 55641700 |
| 665 | VPS13D | chr1 | 12288613 | 12573598 |
| 666 | VRK2 | chr2 | 58133286 | 58388555 |
| 667 | WDR81 | chr17 | 1618317 | 1643393 |
| 668 | WFIKKN2 | chr17 | 48910511 | 48921209 |
| 669 | WNT16 | chr7 | 120963921 | 120982658 |
| 670 | WNT5A | chr3 | 55498243 | 55523170 |
| 671 | WNT6 | chr2 | 219723046 | 219740454 |
| 672 | WT1 | chr11 | 32407822 | 32458581 |
| 673 | WWOX | chr16 | 78131827 | 79248064 |
| 674 | WWP2 | chr16 | 69794687 | 69977144 |
| 675 | YJEFN3 | chr19 | 19625519 | 19649893 |
| 676 | ZAR1 | chr4 | 48490809 | 48497922 |
| 677 | ZBTB16 | chr11 | 113928931 | 114122897 |
| 678 | ZBTB20 | chr3 | 114055447 | 114867627 |
| 679 | ZC3H12D | chr6 | 149767266 | 149807648 |
| 680 | ZC3H3 | chr8 | 144518325 | 144625120 |
| 681 | ZIC4 | chr3 | 147102335 | 147126096 |
| 682 | ZIC5 | chr13 | 100613775 | 100625678 |
| 683 | ZMIZ1 | chr10 | 80827292 | 81077785 |
| 684 | ZNF280D | chr15 | 56920874 | 57212197 |
| 685 | ZNF423 | chr16 | 49523015 | 49893330 |
| 686 | ZNF536 | chr19 | 30861828 | 31050465 |
| 687 | ZNF664-RFLNA | chr12 | 124456262 | 124802070 |
| 688 | ZNF833P | chr19 | 11749091 | 11798884 |

TABLE 2
List of cancer types according to the disclosure
Column 1 lists the abbreviations of the cancer types used herein. The WHO 2020
entity or cancer type names are shown in Column 2. Column 3 provides a descriptor
for the molecular class and Column 4 lists the PubMed Number (PMID). Where no
PMID number appears in Column 4 the method according to the disclosure uncovered
cancer subspecies that where not known or published before and thus have no PMID.

| Cancer Type | WHO_2020_entity | Molecular.class | PMID |
|---|---|---|---|
| A_IDH | Astrocytoma, IDH-mutant | diffuse glioma, IDH-mutant | 29539639 |
| | | and 1p19q retained | |
| | | [astroglial type] | |
| A_IDH_HG | Astrocytoma, IDH-mutant | diffuse glioma, IDH-mutant | 29539639 |
| | | and 1p19q retained | |
| | | [astroglial type], high grade | |
| ANTCON | Anaplastic neuroepithelial | anaplastic neuroepithelial | |
| | tumour with condensed nuclei | tumour with condensed | |
| | | nuclei | |
| ATRT_MYC | Atypical teratoid/rhabdoid | Atypical teratoid rhabdoid | 29539639 |
| | tumour | tumour, MYC activated | |
| ATRT_SHH | Atypical teratoid/rhabdoid | Atypical teratoid rhabdoid | 29539639 |
| | tumour | tumour, SHH activated | |
| ATRT_TYR | Atypical teratoid/rhabdoid | Atypical teratoid rhabdoid | 29539639 |
| | tumour | tumour, Tyrosinase activated | |
| CHGL | Chordoid glioma | chordoid glioma of the 3rd | 29539639 |
| | | ventricle | |
| CHORDM | Chordoma (including poorly | chordoma | 29539639 |
| | differentiated chordoma) | | |
| CN | Central neurocytoma | central neurocytoma | 29539639 |
| CNS_NB_FOXR2 | CNS embryonal tumour (or | CNS neuroblastoma, | 29539639 |
| | CNS neuroblastoma), | FOXR2-altered | |
| | FOXR2-altered | | |
| CNS_SARC_DICER | Primary intracranial sarcoma, | CNS DICER1-associated | 29881993 |
| | DICER1-mutant | sarcoma | |
| CPC_A | Choroid plexus carcinoma | choroid plexus carcinoma | 29539639 |
| CPC_B | Choroid plexus carcinoma | choroid plexus carcinoma | 33249490 |
| CPH_ADM | Adamantinomatous | adamantinomatous | 29539639 |
| | Craniopharyngioma | craniopharyngioma | |
| CPH_PAP | Papillary Craniopharyngioma | papillary craniopharyngioma | 29539639 |
| CPP_AD | Choroid plexus papilloma | choroid plexus papilloma | 29539639 |
| CPP_INF | Choroid plexus papilloma | choroid plexus papilloma | 29539639 |
| CRINET | Cribriform neuroepithelial | cribriform neuroepithelial | |
| | tumour | tumour | |
| CTRL_ADENOPIT | Control tissue, pituitary gland | normal pituitary gland, | 29539639 |
| | (anterior lobe) | anterior lobe | |
| CTRL_BLOOD | Normal WBCs | control tissue, blood | |
| CTRL_CBM | Control tissue, cerebellum | control tissue, cerebellar | 29539639 |
| | | hemisphere | |
| CTRL_CORPCAL | Control tissue, corpus | control tissue, white matter | 29539639 |
| | callosum | (corpus callosum) | |
| CTRL_HEMI | Control tissue, cerebral | control tissue, hemispheric | 29539639 |
| | hemisphere | cortex | |
| CTRL_HYPOTHAL | Control tissue, hypothalamus | control tissue, hypothalamus | 29539639 |
| CTRL_INFLAM | Glioblastoma, IDH-wildtype | control tissue, inflammatory | 29539639 |
| | | tumour microenvironment | |
| CTRL_OPTIC | Control tissue, optic pathway | control tissue, optic pathway | |
| CTRL_PIN | Control tissue, pineal gland | control tissue, pineal gland | 29539639 |
| CTRL_PONS | Control tissue, pons | control tissue, pons | 29539639 |
| CTRL_REACTIVE | Control tissue, reactive | control tissue, reactive | 29539639 |
| | tumour microenvironment | tumour microenvironment | |
| DGONC | Diffuse glioneuronal tumour | Diffuse glioneuronal tumour | 31867747 |
| | with oligodendroglioma-like | with oligodendroglioma-like | |
| | features and nuclear clusters | features and nuclear clusters | |
| | (DGONC) | | |
| DLBCL | Diffuse large B-cell lymphoma | diffuse large B cell lymphoma | 29539639 |
| | of the CNS | | |
| DLGNT_1 | Diffuse leptomeningeal | diffuse leptomeningeal | 29539639 |
| | glioneuronal tumour | glioneuronal tumour | |
| DLGNT_2 | Diffuse leptomeningeal | diffuse leptomeningeal | 29766299 |
| | glioneuronal tumour | glioneuronal tumour | |
| DMG_EGFR | Bithalamic glioma, EGFR- | diffuse midline glioma | 33130881 |
| | mutant | [(bi-)thalamic, EGFR altered] | |
| DMG_K27 | Diffuse midline glioma, H3 | diffuse midline glioma, H3 | 29539639 |
| | K27M-mutant | K27-mutant/EZHIP | |
| | | overexpressing | |
| DMT_SMARCB1 | Desmoplastic myxoid tumour | desmoplastic myxoid tumour, | |
| | of the pineal region, | SMARCB1-altered | |
| | SMARCB1-mutant | | |
| DNET | Dysembryoplastic | dysembryoplastic | 29539639 |
| | neuroepithelial tumour | neuroepithelial tumour | |
| EFT_CIC | CIC sarcoma | Ewing family tumour with | 29539639 |
| | | CIC alteration | |
| EMB_ND_A | Embryonal tumour not otherwise | embryonal tumour [non defined, | |
| | specified, subtype A | type A] | |
| ENB | Esthesioneuroblastoma, IDH- | esthesioneuroblastoma | 29730775 |
| | wildtype | | |
| EPN_MPE | Myxopapillary ependymoma | myxopapillary ependymoma | 29539639 |
| EPN_PF_SE | Subependymoma | posterior fossa | 29539639 |
| | | subependymoma | |
| EPN_PFA_1a | Posterior fossa ependymoma | posterior fossa ependymoma | 29909548 |
| | Group PFA | group A1 | |
| EPN_PFA_1b | Posterior fossa ependymoma | posterior fossa ependymoma | 29909548 |
| | Group PFA | group A1 | |
| EPN_PFA_1c | Posterior fossa ependymoma | posterior fossa ependymoma | 29909548 |
| | Group PFA | group A1 | |
| EPN_PFA_1d | Posterior fossa ependymoma | posterior fossa ependymoma | 29909548 |
| | Group PFA | group A1 | |
| EPN_PFA_1e | Posterior fossa ependymoma | posterior fossa ependymoma | 29909548 |
| | Group PFA | group A1 | |
| EPN_PFA_1f | Posterior fossa ependymoma | posterior fossa ependymoma | 29909548 |
| | Group PFA | group A1 | |
| EPN_PFA_2a | Posterior fossa ependymoma | posterior fossa ependymoma | 29909548 |
| | Group PFA | group A2 | |
| EPN_PFA_2b | Posterior fossa ependymoma | posterior fossa ependymoma | 29909548 |
| | Group PFA | group A2 | |
| EPN_PFA_2c | Posterior fossa ependymoma | posterior fossa ependymoma | 29909548 |
| | Group PFA | group A2 | |
| EPN_PFB_1 | Posterior fossa ependymoma | posterior fossa ependymoma | 30019219 |
| | Group PFB | group B1-B3 | |
| EPN_PFB_2 | Posterior fossa ependymoma | posterior fossa ependymoma | 30019219 |
| | Group PFB | group B1-B3 | |
| EPN_PFB_3 | Posterior fossa ependymoma | posterior fossa ependymoma | 30019219 |
| | Group PFB | group B1-B3 | |
| EPN_PFB_4 | Posterior fossa ependymoma | posterior fossa ependymoma | 30019219 |
| | Group PFB | group B4 | |
| EPN_PFB_5 | Posterior fossa ependymoma | posterior fossa ependymoma | 30019219 |
| | Group PFB | group B5 | |
| EPN_RELA_Like_A | Supratentorial ependymoma | supratentorial ependymoma, | 33879448 |
| | C11orf95 fusion-positive | c11orf95:RELA-like | |
| EPN_RELA_Like_B | Supratentorial ependymoma | supratentorial ependymoma, | 33879448 |
| | C11orf95 fusion-positive | c11orf95:RELA-like | |
| EPN_RELA_Like_C | Supratentorial ependymoma | supratentorial ependymoma, | 33879448 |
| | C11orf95 fusion-positive | c11orf95:RELA-like | |
| EPN_SPINE | Spinal ependymoma | spinal ependymoma | 29539639 |
| EPN_SPINE_MYCN | Spinal ependymoma, | spinal ependymoma, | 31414211 |
| | MYCN-amplified | MYCN-amplified | |
| EPN_SPINE_SE_A | Subependymoma | spinal subependymoma | 31414211 |
| | | [subtype B] | |
| EPN_SPINE_SE_B | Subependymoma | spinal subependymoma | 29539639 |
| | | [subtype A] | |
| EPN_ST_ND_A | Supratentorial ependymoma | supratentorial ependymoma | |
| | | [non-defined type] | |
| EPN_ST_SE | Subependymoma | supratentorial subependymoma | 29539639 |
| EPN_YAP | Supratentorial ependymoma, | supratentorial ependymoma, | 29539639 |
| | YAP1 fusion-positive | YAP1-fused | |
| ERMS | Rhabdomyosarcoma | embryonal rhabdomyosarcoma | 33479225 |
| ETMR_Atyp | Embryonal tumour with | embryonal tumour with | 31802000 |
| | multilayered rosettes | multilayered rosettes-like | |
| ETMR_C19MC | Embryonal tumour with | embryonal tumour with | 29539639 |
| | multilayered rosettes | multilayered rosettes, C19MC | |
| | | altered | |
| EVNCYT | Extraventricular neurocytoma | extraventricular neurocytoma | |
| EWS | Ewing sarcoma | Ewing sarcoma | 29539639 |
| GBM_CBM | Glioblastoma, IDH-wildtype | high-grade diffuse glioma of | |
| | | the midline/posterior fossa; | |
| | | H3/IDH-wildtype | |
| GBM_G34 | Diffuse hemispheric glioma, | high-grade diffuse glioma, | 29539639 |
| | H3 G34-mutant | H3 G34-mutant | |
| GBM_MES_Atyp | Glioblastoma, IDH-wildtype | glioblastoma, IDH-wildtype, | |
| | | mesenchymal type | |
| GBM_MES_Typ | Glioblastoma, IDH-wildtype | glioblastoma, IDH-wildtype, | 29539639 |
| | | mesenchymal type | |
| GBM_ped_ND_A | Diffuse paediatric-type high | glioblastoma [pediatric-type; | |
| | grade glioma, H3 wildtype | non-defined A] | |
| | and IDH wild type | | |
| GBM_ped_ND_B | Diffuse paediatric-type high | glioblastoma [pediatric-type; | |
| | grade glioma, H3 wildtype | non-defined B] | |
| | and IDH wild type | | |
| GBM_pedMYCN | Diffuse paediatric-type high | glioblastoma [pediatric-type, | 29539639 |
| | grade glioma, H3 wildtype | MYCN activated] | |
| | and IDH wild type | | |
| GBM_pedRTK1a | Diffuse paediatric-type high | glioblastoma [pediatric-type, | 28401334 |
| | grade glioma, H3 wildtype | RTK1] | |
| | and IDH wild type | | |
| GBM_pedRTK1b | Diffuse paediatric-type high | glioblastoma [pediatric-type, | 28401334 |
| | grade glioma, H3 wildtype | RTK1] | |
| | and IDH wild type | | |
| GBM_pedRTK1c | Diffuse paediatric-type high | glioblastoma [pediatric-type, | 28401334 |
| | grade glioma, H3 wildtype | RTK1] | |
| | and IDH wild type | | |
| GBM_pedRTK2a | Diffuse paediatric-type high | glioblastoma [pediatric-type, | 28401334 |
| | grade glioma, H3 wildtype | RTK2] | |
| | and IDH wild type | | |
| GBM_pedRTK2b | Diffuse paediatric-type high | glioblastoma [pediatric-type, | 28401334 |
| | grade glioma, H3 wildtype | RTK2] | |
| | and IDH wild type | | |
| GBM_PNC | Glioblastoma, IDH-wildtype | glioblastoma, IDH-wildtype, | |
| | | with primitive neuronal | |
| | | component | |
| GBM_RTK1 | Glioblastoma, IDH-wildtype | glioblastoma, IDH-wildtype, | 29539639 |
| | | RTK1 type | |
| GBM_RTK2 | Glioblastoma, IDH-wildtype | glioblastoma, IDH-wildtype, | 29539639 |
| | | RTK2 type | |
| GCT_GERM_A | Germinoma | germinoma, type A | |
| GCT_GERM_B | Germinoma | germinoma, type B (KIT- | |
| | | mutant) | |
| GCT_TERA | Mature teratoma | teratoma | |
| GCT_YOLKSAC | Yolk sac tumour | yolk sac tumour | |
| GG | Ganglioglioma | ganglioglioma | 29539639 |
| GNT_ND | Glioneuronal tumour, not | diffuse glioneuronal tumour, | |
| | otherwise specified, subtype | non defined type | |
| | A | | |
| HGAP | High-grade astrocytoma with | high-grade astrocytoma with | 29539639 |
| | piloid features | piloid features | |
| HGNET_BCOR_Fus | CNS tumour with BCOR internal | neuroepithelial tumour with | |
| | tandem duplication | EP300:BCOR(L1) fusion | |
| HGNET_BCOR_ITD | CNS tumour with BCOR internal | neuroepithelial tumour with | 29539639 |
| | tandem duplication | BCOR internal tandem | |
| | | duplication | |
| HGNET_BEND2 | Astroblastoma | high-grade neuroepithelial | 29539639 |
| | | tumour with MN1:BEND2 | |
| | | fusion | |
| HGNET_CXXC5 | Astroblastoma | high-grade neuroepithelial | |
| | | tumour with MN1:CXXC5 | |
| | | fusion | |
| HGNET_ND_B | Glioblastoma, IDH-wildtype | diffuse high-grade | |
| | | neuroepithelial tumour [adult- | |
| | | type, non-defined type B] | |
| HGNET_ND_C | Glioblastoma, IDH-wildtype | diffuse high-grade | |
| | | neuroepithelial tumour [adult- | |
| | | type, non-defined type C] | |
| HGNET_ND_D | Glioblastoma, IDH-wildtype | diffuse high-grade | |
| | | neuroepithelial tumour [adult- | |
| | | type, non-defined type D] | |
| HGNET_PATZ | Neuroepithelial tumour, | neuroepithelial tumour with | |
| | PATZ1 fusion-positive | PATZ1 fusion | |
| HGNET_PLAG | Diffuse paediatric-type high | diffuse high-grade | |
| | grade glioma, H3 wildtype | neuroepithelial tumour, | |
| | and IDH wild type | PLAG-family amplified | |
| HMB | Haemangioblastoma | haemangioblastoma | 29539639 |
| IDH_B | Astrocytoma, IDH-mutant | diffuse glioma, IDH-mutant | |
| | | and 1p19q retained | |
| | | [astroglial type] | |
| IHG | Infant-type hemispheric glioma, | infantile hemispheric glioma | 29539639 |
| | H3-wildtype | | |
| IO_MEPL | Medulloepithelioma | intraocular medulloepithelioma | |
| LCH | Langerhans cell histiocytosis | Langerhans cell histiocytosis | |
| LGG_DIG_DIA | Desmoplastic infantile | desmoplastic infantile | 29539639 |
| | astrocytoma and ganglioglioma | ganglioglioma/astrocytoma | |
| LGG_MYB_A | Angiocentric glioma | diffuse glioma, MYB(L1)- | 29539639 |
| | | altered, subtype A | |
| | | [angiocentric glioma-type] | |
| LGG_MYB_B | Diffuse astrocytoma, MYB or | diffuse glioma, MYB(L1)- | |
| | MYBL1-altered | altered, subtype B | |
| | | [infratentorial-type] | |
| LGG_MYB_C | Diffuse astrocytoma, MYB or | diffuse glioma, MYB(L1)- | |
| | MYBL1-altered | altered, subtype C [isomorphic | |
| | | diffuse glioma-type] | |
| LGG_MYB_D | Diffuse astrocytoma, MYB or | diffuse glioma, MYB(L1)- | |
| | MYBL1-altered | altered, subtype D | |
| LIPN | Cerebellar liponeurocytoma | liponeurocytoma | 29539639 |
| MB_G34_I | Medulloblastoma, non- | medulloblastoma Group 3 | 31076851 |
| | WNT/non-SHH | | |
| MB_G34_II | Medulloblastoma, non- | medulloblastoma Group 3 | 31076851 |
| | WNT/non-SHH | | |
| MB_G34_III | Medulloblastoma, non- | medulloblastoma Group 3 | 31076851 |
| | WNT/non-SHH | | |
| MB_G34_IV | Medulloblastoma, non- | medulloblastoma Group 3 | 31076851 |
| | WNT/non-SHH | | |
| MB_G34_V | Medulloblastoma, non- | medulloblastoma Group 4 | 31076851 |
| | WNT/non-SHH | | |
| MB_G34_VI | Medulloblastoma, non- | medulloblastoma Group 4 | 31076851 |
| | WNT/non-SHH | | |
| MB_G34_VII | Medulloblastoma, non- | medulloblastoma Group 4 | 31076851 |
| | WNT/non-SHH | | |
| MB_G34_VIII | Medulloblastoma, non- | medulloblastoma Group 4 | 31076851 |
| | WNT/non-SHH | | |
| MB_MYO | Medulloblastoma, non- | medullomyoblastoma | |
| | WNT/non-SHH | | |
| MB_SHH_AD | Medulloblastoma, SHH- | medulloblastoma, SHH- | 28609654 |
| | activated | activated [childhood/adult | |
| | | type] | |
| MB_SHH_AD | Medulloblastoma, SHH- | medulloblastoma, SHH- | 28609654 |
| | activated | activated [childhood/adult | |
| | | type] | |
| MB_SHH_AD | Medulloblastoma, SHH- | medulloblastoma, SHH- | 28609654 |
| | activated | activated [childhood/adult | |
| | | type] | |
| MB_SHH_AD | Medulloblastoma, SHH- | medulloblastoma, SHH- | 28609654 |
| | activated | activated [childhood/adult | |
| | | type] | |
| MB_SHH_IDH | Medulloblastoma, SHH- | medulloblastoma, SHH- | |
| | activated | activated, IDH-mutant | |
| MB_WNT | Medulloblastoma, WNT- | medulloblastoma, WNT | 29539639 |
| | activated | activated | |
| MELN | Meningeal melanocytosis and | melanocytoma | 29539639 |
| | melanomatosis | | |
| MET_MEL | Metastases to the brain and | melanoma [metastatic] | 29539639 |
| | spinal cord parenchyma | | |
| MMNST | Malignant melanotic nerve | malignant melanotic nerve | 29539639 |
| | sheath tumour | sheath tumour | |
| MNG_ben-1 | Meningioma | meningioma, benign | 28314689 |
| MNG_ben-2 | Meningioma | meningioma, benign | 28314689 |
| MNG_ben-3 | Meningioma | meningioma, benign | 28314689 |
| MNG_int-A | Meningioma | meningioma, intermediate | 28314689 |
| MNG_int-B | Meningioma | meningioma, intermediate | 28314689 |
| MNG_mal | Meningioma | meningioma, malignant | 28314689 |
| MNG_SMARCE1 | Meningioma | meningioma, SMARCE1- | |
| | | altered | |
| MPNST_Atyp | Malignant peripheral nerve | malignant peripheral nerve | |
| | sheath tumour (MPNST) | sheath tumour [spinal or | |
| | | atypical type] | |
| MPNST_Typ | Malignant peripheral nerve | malignant peripheral nerve | |
| | sheath tumour (MPNST) | sheath tumour [typical type] | |
| MYXGNT | Myxoid glioneuronal tumour | myxoid glioneuronal tumour | |
| | | of the 3rd ventricle/septum | |
| | | pellucidum | |
| NB_MYCN | NB, MYCN | neuroblastoma | 27635046 |
| NB_TMMneg | NB, no-TMM | neuroblastoma | 27635046 |
| NB_TMMpos | NB, TERT | neuroblastoma | 27635046 |
| NFIB_PLEX | Hybrid nerve sheath tumours | plexiform neurofibroma | |
| O_IDH | Oligodendroglioma, IDH- | diffuse glioma, IDH-mutant | 29539639 |
| | mutant and 1p/19q-codeleted | and 1p19q co-deleted | |
| | | [oligodendroglial type] | |
| OLIGOSARC_IDH | Oligodendroglioma, IDH- | diffuse glioma, IDH-mutant | |
| | mutant and 1p/19q-codeleted | and 1p19q co-deleted | |
| | | [oligodendroglial type] | |
| PA_CORT | Pilocytic astrocytoma | supratentorial pilocytic | 29539639 |
| | | astrocytoma | |
| PA_INF | Pilocytic astrocytoma | infratentorial pilocytic | 29539639 |
| | | astrocytoma | |
| PA_INF_FGFR | Pilocytic astrocytoma | infratentorial pilocytic | |
| | | astrocytoma | |
| PA_MID | Pilocytic astrocytoma | supratentorial midline | 29539639 |
| | | pilocytic astrocytoma | |
| PB_FOXR2 | Pineoblastoma | pineoblastoma, | 31768671 |
| | | MYC/FOXR2-activated | |
| PB_Grp1A | Pineoblastoma | pineoblastoma, miRNA | 31768671 |
| | | pathway altered, group 1 | |
| PB_Grp1B | Pineoblastoma | pineoblastoma, miRNA | 31768671 |
| | | pathway altered, group 1 | |
| PB_Grp2 | Pineoblastoma | pineoblastoma, miRNA | 31768671 |
| | | pathway altered, group 2 | |
| PGG | Paraganglioma | spinal paraganglioma | 29539639 |
| PGNT | Papillary glioneuronal | papillary glioneuronal | |
| | tumour | tumour | |
| PIN_CYT | Pineocytoma | pineocytoma | 31768671 |
| PIN_RB | Pineoblastoma | pineal retinoblastoma | 29539639 |
| PITAD_ACTH | Pituitary adenoma/PitNET | pituitary adenoma, ACTH- | 29539639 |
| | | producing | |
| PITAD_GON | Pituitary adenoma/PitNET | pituitary adenoma, | 29539639 |
| | | gonadotrophin-producing | |
| PITAD_PRL | Pituitary adenoma/PitNET | pituitary adenoma, | 29539639 |
| | | prolactin-producing | |
| PITAD_STH_DENSE1 | Pituitary adenoma/PitNET | pituitary adenoma, STH- | 29539639 |
| | | producing | |
| PITAD_STH_DENSE2 | Pituitary adenoma/PitNET | pituitary adenoma, STH- | 29539639 |
| | | producing | |
| PITAD_STH_SPARSE | Pituitary adenoma/PitNET | pituitary adenoma, STH- | 29539639 |
| | | producing | |
| PITAD_TSH | Pituitary adenoma/PitNET | pituitary adenoma, TSH- | 29539639 |
| | | producing | |
| PITUI | Pituicytoma | pituicytoma | 29539639 |
| PLASMACYT | Miscellaneous rare lymphomas | plasmacytoma | 29539639 |
| | in the CNS | | |
| PLNTY | Polymorphous low-grade | polymorphous low-grade | 27812792 |
| | neuroepithelial tumour of the | neuroepithelial tumour of | |
| | young | the young | |
| PPTID_A | Pineal parenchymal tumour | pineal parenchymal tumour | 31768671 |
| | of intermediate differentiation | of intermediate differentiation | |
| PPTID_B | Pineal parenchymal tumour | pineal parenchymal tumour | 31768671 |
| | of intermediate differentiation | of intermediate differentiation | |
| PTPR_A | Papillary tumour of the pineal | papillary tumour of the pineal | 29539639 |
| | region | region | |
| PTPR_B | Papillary tumour of the pineal | papillary tumour of the pineal | 29539639 |
| | region | region | |
| PXA | Pleomorphic | pleomorphic | 29539639 |
| | xanthoastrocytoma | xanthoastrocytoma(-like) | |
| RB | Retinoblastoma | retinoblastoma | 29539639 |
| RB_MYCN | Retinoblastoma, subtype | retinoblastoma, MYCN- | 33879448 |
| | MYCN-altered | activated | |
| RGNT | Rosette forming glioneuronal | rosette-forming glioneuronal | 29539639 |
| | tumour | tumour | |
| SCHW | Schwannoma | schwannoma | 29539639 |
| SEGA | Subependymal giant cell | subependymal giant cell | 29539639 |
| | astrocytoma | astrocytoma | |
| SFT_HMPC | Solitary fibrous tumour | solitary fibrous tumour/ | 29539639 |
| | | haemangiopericytoma | |
| SNUC_IDH2 | Esthesioneuroblastoma, IDH- | Sinonasal undifferentiated | 29730775 |
| | mutant | carcinoma, IDH2-mutant | |
| ST_EPN_RELA A | Supratentorial ependymoma | supratentorial ependymoma, | 29539639 |
| | C11orf95 fusion-positive | c11orf95:RELA-fused | |
| ST_EPN_RELA_B | Supratentorial ependymoma | supratentorial ependymoma, | 33879448 |
| | C11orf95 fusion-positive | c11orf95:RELA-fused | |
| VGLL | Low grade neuroepithelial | intracranial schwannoma, | |
| | tumour, subtype VGLL fused | VGLL-altered | |

[0163] Tables 3 to 172: Classification of cancer types listed in Table 2 according to the disclosure.

[0164] The classification data for each cancer type as listed in Table 2 is shown in an individual table. Each table comprises the following columns:

[0165] Column 1 shows the selected gene sites for the classification of the cancer type.

[0166] Column 2 shows the overall statistical importance (imp_sum) of a specific gene site for the classification of the cancer type. The overall importance of the specific gene site (imp_sum) is calculated by multiplying the number of single measurement points (n_probes) of Column 4 with the mean variable importance (imp_mean) of Column 3. Higher values represent more important gene sites.

[0167] Column 3 shows the mean variable importance (imp_mean) of all of the single measurement points (n_probes) of the specific gene sites according to the statistical model used (e.g. based on Random Forest)

[0168] Column 4 shows the number of single measurement points (n_probes; CpG site methylation probes that fall within the gene site).

TABLE 3
Cancer Type A_IDH

| Gene site | imp_sum | imp_mean | n |
|---|---|---|---|
| PTPRN2 | 18.78638 | 0.229102 | 82 |
| PRDM16 | 15.88426 | 0.223722 | 71 |
| HDAC4 | 11.38158 | 0.30761 | 37 |
| PAX6 | 7.719922 | 0.220569 | 35 |
| RBFOX3 | 5.391468 | 0.154042 | 35 |
| DIP2C | 11.84772 | 0.370241 | 32 |
| SOX2-OT | 9.378707 | 0.323404 | 29 |
| GALNT9 | 4.056375 | 0.150236 | 27 |
| ADARB2 | 6.339109 | 0.243812 | 26 |
| SHANK2 | 4.920743 | 0.189259 | 26 |
| AGAP1 | 7.296626 | 0.291865 | 25 |
| CAMTA1 | 5.092806 | 0.203712 | 25 |
| PDGFRA | 4.139033 | 0.165561 | 25 |
| SATB2 | 5.319752 | 0.221656 | 24 |
| MEIS1 | 4.304819 | 0.179367 | 24 |
| RPTOR | 11.20222 | 0.487053 | 23 |
| NCOR2 | 4.696695 | 0.204204 | 23 |
| INPP5A | 3.980493 | 0.173065 | 23 |
| RIMBP2 | 3.715073 | 0.161525 | 23 |
| SKI | 9.355866 | 0.445517 | 21 |
| FRMD4A | 6.390597 | 0.31953 | 20 |
| SDK1 | 5.072705 | 0.253635 | 20 |
| ABR | 4.501446 | 0.225072 | 20 |
| MAD1L1 | 11.21992 | 0.590522 | 19 |
| SMG1P2 | 5.771893 | 0.303784 | 19 |
| BOLA2 | 5.771893 | 0.303784 | 19 |
| LOC613038 | 5.771893 | 0.303784 | 19 |
| CASZ1 | 4.031351 | 0.212176 | 19 |
| FOXK1 | 6.749132 | 0.374952 | 18 |
| ANKRD11 | 4.824927 | 0.268051 | 18 |
| TBC1D16 | 4.176223 | 0.232012 | 18 |
| SEPTIN9 | 3.781195 | 0.210066 | 18 |
| MCF2L | 3.725642 | 0.20698 | 18 |
| OPCML | 7.22948 | 0.425264 | 17 |
| FOXP1 | 7.461073 | 0.466317 | 16 |
| NAV2 | 4.408791 | 0.275549 | 16 |
| GLI2 | 8.586287 | 0.572419 | 15 |
| BAIAP2 | 4.850054 | 0.323337 | 15 |
| KNDC1 | 4.040584 | 0.269372 | 15 |
| NFATC1 | 3.893129 | 0.259542 | 15 |
| RPS6KA2 | 5.709661 | 0.407833 | 14 |
| IQSEC1 | 4.288682 | 0.306334 | 14 |
| ARHGEF10 | 4.250505 | 0.303607 | 14 |
| PRKAG2 | 4.116933 | 0.294067 | 14 |
| CUX1 | 3.667762 | 0.261983 | 14 |
| GNG7 | 3.48551 | 0.248965 | 14 |
| MSI2 | 6.236622 | 0.47974 | 13 |
| MYT1L | 4.125383 | 0.317337 | 13 |
| CMIP | 4.831247 | 0.402604 | 12 |
| ADGRD1 | 4.598185 | 0.383182 | 12 |
| ZC3H3 | 4.555928 | 0.379661 | 12 |
| MIRLET7BHG | 4.206607 | 0.350551 | 12 |
| RASA3 | 3.881123 | 0.323427 | 12 |
| MEGF6 | 3.49592 | 0.291327 | 12 |
| FGFR2 | 3.946181 | 0.358744 | 11 |
| SPON2 | 3.782265 | 0.343842 | 11 |
| ZC3H12D | 3.768599 | 0.3426 | 11 |
| VGLL4 | 3.446999 | 0.313364 | 11 |
| ACOT7 | 4.628745 | 0.462874 | 10 |
| SH3RF3 | 3.971742 | 0.397174 | 10 |
| RGS12 | 3.917101 | 0.39171 | 10 |
| AKAP13 | 3.404835 | 0.340483 | 10 |
| SND1 | 6.763759 | 0.751529 | 9 |
| ATP11A | 5.979014 | 0.664335 | 9 |
| ADAMTS2 | 5.342213 | 0.593579 | 9 |
| TSPAN9 | 4.494867 | 0.49943 | 9 |
| AXIN2 | 4.478168 | 0.497574 | 9 |
| TRAPPC12 | 4.45643 | 0.495159 | 9 |
| SLC22A18 | 4.308821 | 0.478758 | 9 |
| NEAT1 | 3.415812 | 0.379535 | 9 |
| ASAP1 | 3.398391 | 0.377599 | 9 |
| MSRA | 4.796431 | 0.599554 | 8 |
| DNMT3A | 4.299295 | 0.537412 | 8 |
| AFF3 | 4.03016 | 0.50377 | 8 |
| RORA | 3.933212 | 0.491652 | 8 |
| DLEU1 | 3.641639 | 0.455205 | 8 |
| DUSP6 | 5.017101 | 0.716729 | 7 |
| VPS13D | 4.243833 | 0.606262 | 7 |
| NAV1 | 4.237089 | 0.605298 | 7 |
| LINC00461 | 4.202952 | 0.600422 | 7 |
| C19orf25 | 3.637842 | 0.519692 | 7 |
| FBXL18 | 4.410866 | 0.735144 | 6 |
| CRADD | 4.042402 | 0.673734 | 6 |
| STK10 | 3.58235 | 0.597058 | 6 |
| LRRFIP1 | 3.445461 | 0.574243 | 6 |
| RUNDC3A | 4.649823 | 0.929965 | 5 |
| ARHGEF7 | 4.081638 | 0.816328 | 5 |
| TSNAX-DISC1 | 4.017901 | 0.80358 | 5 |
| MRC2 | 3.944978 | 0.788996 | 5 |
| BCAR1 | 3.588348 | 0.71767 | 5 |
| TK1 | 3.547527 | 0.709505 | 5 |
| STAP2 | 4.426476 | 1.106619 | 4 |
| RBMS3 | 4.328619 | 1.082155 | 4 |
| DTNA | 3.8923 | 0.973075 | 4 |
| VOPP1 | 3.405106 | 0.851277 | 4 |
| SRRM3 | 3.823662 | 1.274554 | 3 |
| DAGLB | 3.455348 | 1.151783 | 3 |
| ANKLE2 | 4.083121 | 2.04156 | 2 |
| SLC25A10 | 3.753383 | 1.876692 | 2 |
| SOX10 | 3.463676 | 1.731838 | 2 |

TABLE 4
Cancer Type A_IDH_HG

| Gene site | imp_sum | imp_mean | n |
|---|---|---|---|
| PTPRN2 | 13.16665 | 0.160569 | 82 |
| PRDM16 | 11.2564 | 0.158541 | 71 |
| PCDHGA1 | 6.017158 | 0.101986 | 59 |
| PCDHGA2 | 5.700772 | 0.100014 | 57 |
| PCDHGA3 | 5.384386 | 0.099711 | 54 |
| PCDHGB1 | 5.384386 | 0.101592 | 53 |
| PCDHGA4 | 5.384386 | 0.105576 | 51 |
| PCDHGB2 | 5.068 | 0.103429 | 49 |
| PCDHGA5 | 5.068 | 0.10783 | 47 |
| PCDHGB3 | 5.068 | 0.11786 | 43 |
| PCDHGA6 | 5.068 | 0.1267 | 40 |
| HDAC4 | 12.55202 | 0.339244 | 37 |
| PCDHGA7 | 4.751614 | 0.128422 | 37 |
| PAX6 | 9.136798 | 0.261051 | 35 |
| RBFOX3 | 9.124187 | 0.260691 | 35 |
| PCDHGB4 | 4.751614 | 0.13576 | 35 |
| PCDHGA8 | 4.751614 | 0.13576 | 35 |
| DIP2C | 9.649572 | 0.301549 | 32 |
| PCDHGB5 | 4.435228 | 0.138601 | 32 |
| PCDHGA9 | 4.435228 | 0.143072 | 31 |
| SOX2-OT | 10.27019 | 0.354145 | 29 |
| PCDHGA10 | 3.846128 | 0.137362 | 28 |
| GALNT9 | 4.09556 | 0.151687 | 27 |
| ADARB2 | 5.791898 | 0.222765 | 26 |
| AGAP1 | 8.559905 | 0.342396 | 25 |
| PDGFRA | 6.841003 | 0.27364 | 25 |
| CAMTA1 | 5.65441 | 0.226176 | 25 |
| MEIS1 | 11.15091 | 0.464621 | 24 |
| SATB2 | 8.839103 | 0.368296 | 24 |
| PCDHGB7 | 3.846128 | 0.160255 | 24 |
| RPTOR | 7.902877 | 0.343603 | 23 |
| INPP5A | 5.966938 | 0.259432 | 23 |
| RIMBP2 | 5.064586 | 0.220199 | 23 |
| HOXB3 | 3.589754 | 0.156076 | 23 |
| PRKCZ | 5.390894 | 0.245041 | 22 |
| SKI | 6.459381 | 0.30759 | 21 |
| ZIC4 | 4.94215 | 0.23534 | 21 |
| SIM2 | 3.756501 | 0.178881 | 21 |
| FRMD4A | 3.866106 | 0.193305 | 20 |
| MAD1L1 | 10.17086 | 0.535308 | 19 |
| ZNF423 | 5.772862 | 0.303835 | 19 |
| SMG1P2 | 5.633616 | 0.296506 | 19 |
| BOLA2 | 5.633616 | 0.296506 | 19 |
| LOC613038 | 5.633616 | 0.296506 | 19 |
| CASZ1 | 4.639517 | 0.244185 | 19 |
| FOXK1 | 5.824185 | 0.323566 | 18 |
| ANKRD11 | 5.042924 | 0.280162 | 18 |
| SEPTIN9 | 4.66177 | 0.258987 | 18 |
| TBC1D16 | 3.842806 | 0.213489 | 18 |
| RBFOX1 | 3.695191 | 0.205288 | 18 |
| OPCML | 7.050041 | 0.414708 | 17 |
| PAX6-AS1 | 4.863903 | 0.286112 | 17 |
| RCN1 | 4.863903 | 0.286112 | 17 |
| TBX15 | 3.726216 | 0.219189 | 17 |
| NAV2 | 4.581486 | 0.286343 | 16 |
| FOXP1 | 4.081864 | 0.255117 | 16 |
| GLI2 | 10.28032 | 0.685355 | 15 |
| RPS6KA2 | 5.678692 | 0.405621 | 14 |
| CUX1 | 4.301523 | 0.307252 | 14 |
| IQSEC1 | 3.938498 | 0.281321 | 14 |
| MSI2 | 5.975883 | 0.459683 | 13 |
| MYT1L | 5.311196 | 0.408554 | 13 |
| SPTBN4 | 4.376569 | 0.336659 | 13 |
| CMIP | 4.991631 | 0.415969 | 12 |
| ZC3H3 | 4.560729 | 0.380061 | 12 |
| MIRLET7BHG | 4.517836 | 0.376486 | 12 |
| GLUD1P2 | 4.213095 | 0.383009 | 11 |
| VGLL4 | 3.803764 | 0.345797 | 11 |
| RAD51B | 3.543642 | 0.322149 | 11 |
| ACOT7 | 5.348642 | 0.534864 | 10 |
| NR2F1-AS1 | 4.332052 | 0.433205 | 10 |
| ATP11A | 6.242261 | 0.693585 | 9 |
| SND1 | 5.421156 | 0.602351 | 9 |
| TRAPPC12 | 4.750868 | 0.527874 | 9 |
| ASAP1 | 4.177354 | 0.46415 | 9 |
| ADAMTS2 | 3.748026 | 0.416447 | 9 |
| RUNX1 | 3.706722 | 0.411858 | 9 |
| APBA2 | 3.609137 | 0.401015 | 9 |
| ADGRB1 | 3.604336 | 0.400482 | 9 |
| TXNRD1 | 3.556455 | 0.395162 | 9 |
| DNMT3A | 5.65658 | 0.707073 | 8 |
| LINC00311 | 4.894521 | 0.611815 | 8 |
| MSRA | 4.026572 | 0.503321 | 8 |
| PPP2R2B | 3.77597 | 0.471996 | 8 |
| NR2E1 | 3.648623 | 0.456078 | 8 |
| NAV1 | 4.624354 | 0.660622 | 7 |
| VPS13D | 3.796267 | 0.542324 | 7 |
| C19orf25 | 3.791917 | 0.541702 | 7 |
| LINC01140 | 3.549345 | 0.507049 | 7 |
| FBXL18 | 4.832711 | 0.805452 | 6 |
| SRGAP3 | 4.349279 | 0.72488 | 6 |
| CRACR2A | 3.642366 | 0.607061 | 6 |
| RUNDC3A | 5.364042 | 1.072808 | 5 |
| MRC2 | 4.240738 | 0.848148 | 5 |
| TSNAX-DISC1 | 4.221202 | 0.84424 | 5 |
| ARHGEF7 | 4.089307 | 0.817861 | 5 |
| STAP2 | 7.704487 | 1.926122 | 4 |
| RBMS3 | 4.25923 | 1.064808 | 4 |
| VOPP1 | 3.764 | 0.941 | 4 |
| SRRM3 | 5.500931 | 1.833644 | 3 |

TABLE 5
Cancer Type ANTCON

| Gene site | imp_sum | imp_mean | n |
|---|---|---|---|
| PTPRN2 | 7.483021 | 0.091256 | 82 |
| PRDM16 | 4.367174 | 0.061509 | 71 |
| PCDHGA1 | 2.965166 | 0.050257 | 59 |
| PCDHGA2 | 2.965166 | 0.05202 | 57 |
| PCDHGA3 | 2.965166 | 0.05491 | 54 |
| PCDHGB1 | 2.965166 | 0.055947 | 53 |
| PCDHGA4 | 2.965166 | 0.058141 | 51 |
| PCDHGB2 | 2.965166 | 0.060514 | 49 |
| PCDHGA5 | 2.531088 | 0.053853 | 47 |
| PCDHGB3 | 2.531088 | 0.058863 | 43 |
| PCDHGA6 | 2.214702 | 0.055368 | 40 |
| HDAC4 | 5.100359 | 0.137848 | 37 |
| PCDHGA7 | 2.214702 | 0.059857 | 37 |
| PAX6 | 4.939121 | 0.141118 | 35 |
| PCDHGB4 | 2.214702 | 0.063277 | 35 |
| PCDHGA8 | 2.214702 | 0.063277 | 35 |
| PCDHGB5 | 2.214702 | 0.069209 | 32 |
| PCDHGA9 | 2.214702 | 0.071442 | 31 |
| SOX2-OT | 5.824753 | 0.200854 | 29 |
| SHANK2 | 2.07689 | 0.07988 | 26 |
| CAMTA1 | 3.156495 | 0.12626 | 25 |
| AGAP1 | 2.633589 | 0.105344 | 25 |
| PDGFRA | 2.134721 | 0.085389 | 25 |
| SATB2 | 4.601253 | 0.191719 | 24 |
| RPTOR | 4.447377 | 0.193364 | 23 |
| NXN | 2.150077 | 0.093482 | 23 |
| PRKCZ | 2.51794 | 0.114452 | 22 |
| SKI | 2.796501 | 0.133167 | 21 |
| ZNF423 | 4.010188 | 0.211063 | 19 |
| MAD1L1 | 3.859638 | 0.203139 | 19 |
| SMG1P2 | 3.770753 | 0.198461 | 19 |
| BOLA2 | 3.770753 | 0.198461 | 19 |
| LOC613038 | 3.770753 | 0.198461 | 19 |
| CASZ1 | 1.910046 | 0.100529 | 19 |
| ANKRD11 | 1.917186 | 0.10651 | 18 |
| OPCML | 3.205323 | 0.188548 | 17 |
| TBX15 | 1.941086 | 0.114182 | 17 |
| FOXP1 | 3.221398 | 0.201337 | 16 |
| NAV2 | 2.538252 | 0.158641 | 16 |
| GLI2 | 6.990535 | 0.466036 | 15 |
| NFATC1 | 2.039808 | 0.135987 | 15 |
| TBX5 | 2.788694 | 0.199192 | 14 |
| CUX1 | 2.302986 | 0.164499 | 14 |
| ARHGEF10 | 2.283155 | 0.163083 | 14 |
| IQSEC1 | 2.078601 | 0.148472 | 14 |
| RPS6KA2 | 1.916508 | 0.136893 | 14 |
| MSI2 | 3.663853 | 0.281835 | 13 |
| MYT1L | 3.019476 | 0.232267 | 13 |
| CMIP | 2.634173 | 0.219514 | 12 |
| MIRLET7BHG | 2.582972 | 0.215248 | 12 |
| ZC3H12D | 2.029367 | 0.184488 | 11 |
| VGLL4 | 2.027528 | 0.184321 | 11 |
| RAD51B | 1.977181 | 0.179744 | 11 |
| LBX1-AS1 | 3.913136 | 0.391314 | 10 |
| SPPL2B | 3.257854 | 0.325785 | 10 |
| GRID1 | 2.263188 | 0.226319 | 10 |
| TSPAN4 | 2.108335 | 0.210833 | 10 |
| SKOR1 | 1.946083 | 0.194608 | 10 |
| RGS12 | 1.934755 | 0.193475 | 10 |
| ATP11A | 3.784347 | 0.420483 | 9 |
| ADGRB1 | 3.322193 | 0.369133 | 9 |
| RUNX1 | 3.083942 | 0.34266 | 9 |
| SND1 | 2.935944 | 0.326216 | 9 |
| ZNF833P | 2.584271 | 0.287141 | 9 |
| AXIN2 | 2.468323 | 0.274258 | 9 |
| ADAMTS2 | 2.162573 | 0.240286 | 9 |
| ASAP1 | 2.085051 | 0.231672 | 9 |
| NOTCH1 | 2.064723 | 0.229414 | 9 |
| NEAT1 | 1.974612 | 0.219401 | 9 |
| VRK2 | 2.995784 | 0.374473 | 8 |
| LINC00311 | 2.230276 | 0.278785 | 8 |
| NXPH1 | 2.151553 | 0.268944 | 8 |
| MBP | 2.102791 | 0.262849 | 8 |
| NR2E1 | 1.898316 | 0.237289 | 8 |
| DUSP6 | 2.822265 | 0.403181 | 7 |
| NAV1 | 2.582267 | 0.368895 | 7 |
| TOX2 | 2.386634 | 0.340948 | 7 |
| VPS13D | 2.207261 | 0.315323 | 7 |
| RBMS1 | 1.957648 | 0.279664 | 7 |
| EPHA10 | 1.996731 | 0.332788 | 6 |
| MYO16 | 1.956058 | 0.32601 | 6 |
| SLC22A18AS | 1.912184 | 0.318697 | 6 |
| RUNDC3A | 3.204346 | 0.640869 | 5 |
| SLC8A2 | 2.163285 | 0.432657 | 5 |
| ARHGEF7 | 2.052253 | 0.410451 | 5 |
| CNMD | 1.973732 | 0.394746 | 5 |
| THRB | 1.940011 | 0.388002 | 5 |
| ONECUT2 | 2.858992 | 0.714748 | 4 |
| STAP2 | 2.282702 | 0.570675 | 4 |
| RBMS3 | 2.014411 | 0.503603 | 4 |
| LINC00856 | 1.991078 | 0.49777 | 4 |
| SRRM3 | 3.72052 | 1.240173 | 3 |
| GRIN2B | 3.033253 | 1.011084 | 3 |
| DICER1 | 2.143218 | 0.714406 | 3 |
| SOX10 | 3.646176 | 1.823088 | 2 |
| SLC25A10 | 2.213726 | 1.106863 | 2 |
| KCNB1 | 2.174145 | 1.087073 | 2 |
| CFLAR | 2.014526 | 1.007263 | 2 |
| GRIN1 | 1.944439 | 0.972219 | 2 |
| MAPK8IP1 | 1.980944 | 1.980944 | 1 |

TABLE 6
Cancer Type ATRT_MYC

| Gene site | imp_sum | imp_mean | n |
|---|---|---|---|
| PTPRN2 | 17.73723 | 0.216308 | 82 |
| PRDM16 | 13.36136 | 0.188188 | 71 |
| PCDHGA1 | 11.41704 | 0.193509 | 59 |
| PCDHGA2 | 10.35292 | 0.18163 | 57 |
| PCDHGA3 | 9.908546 | 0.183492 | 54 |
| PCDHGB1 | 9.908546 | 0.186954 | 53 |
| PCDHGA4 | 9.908546 | 0.194285 | 51 |
| PCDHGB2 | 9.168339 | 0.187109 | 49 |
| PCDHGA5 | 9.168339 | 0.195071 | 47 |
| PCDHGB3 | 7.663836 | 0.178229 | 43 |
| PCDHGA6 | 7.34745 | 0.183686 | 40 |
| HDAC4 | 20.61752 | 0.55723 | 37 |
| PCDHGA7 | 7.031064 | 0.190029 | 37 |
| PCDHGB4 | 7.031064 | 0.200888 | 35 |
| PCDHGA8 | 7.031064 | 0.200888 | 35 |
| PAX6 | 5.397601 | 0.154217 | 35 |
| DIP2C | 10.77775 | 0.336805 | 32 |
| PCDHGB5 | 6.27593 | 0.196123 | 32 |
| PCDHGA9 | 6.27593 | 0.202449 | 31 |
| SOX2-OT | 6.391698 | 0.220403 | 29 |
| PCDHGB6 | 5.959544 | 0.205502 | 29 |
| PCDHGA10 | 5.959544 | 0.212841 | 28 |
| SHANK2 | 4.056797 | 0.156031 | 26 |
| AGAP1 | 11.14937 | 0.445975 | 25 |
| CAMTA1 | 5.943709 | 0.237748 | 25 |
| PDGFRA | 5.604404 | 0.224176 | 25 |
| PCDHGB7 | 5.535067 | 0.230628 | 24 |
| RPTOR | 11.41745 | 0.496411 | 23 |
| NCOR2 | 8.405351 | 0.36545 | 23 |
| NXN | 7.435412 | 0.323279 | 23 |
| PCDHGA11 | 5.535067 | 0.240655 | 23 |
| PRKCZ | 5.398038 | 0.245365 | 22 |
| SKI | 11.2062 | 0.533629 | 21 |
| HOXA-AS3 | 4.54373 | 0.216368 | 21 |
| SDK1 | 5.016131 | 0.250807 | 20 |
| FRMD4A | 4.007902 | 0.200395 | 20 |
| ABR | 3.959355 | 0.197968 | 20 |
| MAD1L1 | 12.71891 | 0.669416 | 19 |
| ZNF423 | 6.244655 | 0.328666 | 19 |
| SMG1P2 | 5.741184 | 0.302168 | 19 |
| BOLA2 | 5.741184 | 0.302168 | 19 |
| LOC613038 | 5.741184 | 0.302168 | 19 |
| KCNQ1 | 5.021333 | 0.264281 | 19 |
| CASZ1 | 5.018076 | 0.264109 | 19 |
| CFAP46 | 4.552203 | 0.23959 | 19 |
| FOXK1 | 10.48601 | 0.582556 | 18 |
| TBC1D16 | 7.537054 | 0.418725 | 18 |
| ANKRD11 | 6.677221 | 0.370957 | 18 |
| RBFOX1 | 4.311269 | 0.239515 | 18 |
| SEPTIN9 | 4.091576 | 0.22731 | 18 |
| OPCML | 4.016549 | 0.236268 | 17 |
| FOXP1 | 4.010279 | 0.250642 | 16 |
| GLI2 | 6.717306 | 0.44782 | 15 |
| BAIAP2 | 6.057075 | 0.403805 | 15 |
| SLX1B-SULT1A4 | 5.70781 | 0.380521 | 15 |
| SLX1A | 5.70781 | 0.380521 | 15 |
| LOC606724 | 5.70781 | 0.380521 | 15 |
| ZBTB20 | 4.322333 | 0.288156 | 15 |
| MIR548F5 | 5.757953 | 0.411282 | 14 |
| IQSEC1 | 5.167301 | 0.369093 | 14 |
| C7orf50 | 5.156157 | 0.368297 | 14 |
| RPS6KA2 | 4.986439 | 0.356174 | 14 |
| ARHGEF10 | 4.555787 | 0.325413 | 14 |
| PRKAG2 | 4.408054 | 0.314861 | 14 |
| MSI2 | 7.594149 | 0.584165 | 13 |
| MYT1L | 4.818631 | 0.370664 | 13 |
| CMIP | 7.520737 | 0.626728 | 12 |
| ZC3H3 | 5.633656 | 0.469471 | 12 |
| GNA12 | 5.032973 | 0.419414 | 12 |
| TNS3 | 4.957592 | 0.413133 | 12 |
| FBRSL1 | 4.5699 | 0.380825 | 12 |
| TBX4 | 4.111141 | 0.342595 | 12 |
| CTNNA2 | 4.073641 | 0.33947 | 12 |
| ADGRD1 | 4.025228 | 0.335436 | 12 |
| ZC3H12D | 4.849544 | 0.440868 | 11 |
| CTBP2 | 4.362049 | 0.39655 | 11 |
| ACOT7 | 4.431353 | 0.443135 | 10 |
| NBEA | 3.965625 | 0.396562 | 10 |
| SND1 | 8.53951 | 0.948834 | 9 |
| ADAMTS2 | 6.888579 | 0.765398 | 9 |
| ATP11A | 6.762114 | 0.751346 | 9 |
| KCNH2 | 5.308144 | 0.589794 | 9 |
| TRAPPC12 | 4.83608 | 0.537342 | 9 |
| CACNA2D4 | 4.766338 | 0.529593 | 9 |
| MGMT | 4.576613 | 0.508513 | 9 |
| ASAP1 | 4.566396 | 0.507377 | 9 |
| ZNF833P | 4.242022 | 0.471336 | 9 |
| TSPAN9 | 4.038929 | 0.44877 | 9 |
| VRK2 | 4.017195 | 0.502149 | 8 |
| SYNJ2 | 3.989878 | 0.498735 | 8 |
| ITPKB | 5.378408 | 0.768344 | 7 |
| NAV1 | 5.039236 | 0.719891 | 7 |
| RXRA | 4.298066 | 0.614009 | 7 |
| CRADD | 4.812334 | 0.802056 | 6 |
| FBXL18 | 4.670889 | 0.778482 | 6 |
| TSNAX-DISC1 | 5.461204 | 1.092241 | 5 |
| ARHGEF7 | 5.319103 | 1.063821 | 5 |
| RUNDC3A | 4.452929 | 0.890586 | 5 |
| NHSL1 | 4.604302 | 1.151075 | 4 |
| RALGAPA2 | 4.665413 | 2.332707 | 2 |

TABLE 7
Cancer Type ATRT_SHH

| Gene site | imp_sum | imp_mean | n |
|---|---|---|---|
| PTPRN2 | 24.89162 | 0.303556 | 82 |
| PRDM16 | 15.79215 | 0.222425 | 71 |
| PCDHGA1 | 8.715701 | 0.147724 | 59 |
| PCDHGA2 | 8.202776 | 0.143908 | 57 |
| PCDHGA3 | 8.202776 | 0.151903 | 54 |
| PCDHGB1 | 8.202776 | 0.154769 | 53 |
| PCDHGA4 | 7.88639 | 0.154635 | 51 |
| PCDHGB2 | 7.298762 | 0.148954 | 49 |
| PCDHGA5 | 7.298762 | 0.155293 | 47 |
| PCDHGB3 | 6.282316 | 0.1461 | 43 |
| PCDHGA6 | 5.834838 | 0.145871 | 40 |
| HDAC4 | 18.17436 | 0.491199 | 37 |
| PCDHGA7 | 5.202066 | 0.140596 | 37 |
| PAX6 | 5.810192 | 0.166005 | 35 |
| RBFOX3 | 4.941735 | 0.141192 | 35 |
| PCDHGB4 | 4.88568 | 0.139591 | 35 |
| PCDHGA8 | 4.88568 | 0.139591 | 35 |
| DIP2C | 10.64599 | 0.332687 | 32 |
| GALNT9 | 7.350354 | 0.272235 | 27 |
| SHANK2 | 5.282632 | 0.203178 | 26 |
| AGAP1 | 11.67873 | 0.467149 | 25 |
| CAMTA1 | 10.30116 | 0.412046 | 25 |
| PDGFRA | 5.066539 | 0.202662 | 25 |
| RPTOR | 13.54718 | 0.589008 | 23 |
| INPP5A | 8.11614 | 0.352876 | 23 |
| NXN | 8.036403 | 0.349409 | 23 |
| NCOR2 | 7.002394 | 0.304452 | 23 |
| RIMBP2 | 4.968555 | 0.216024 | 23 |
| PRKCZ | 6.218634 | 0.282665 | 22 |
| SKI | 9.977176 | 0.475104 | 21 |
| HOXA-AS3 | 5.84487 | 0.278327 | 21 |
| ABR | 5.093333 | 0.254667 | 20 |
| SDK1 | 4.517652 | 0.225883 | 20 |
| MAD1L1 | 12.65219 | 0.665905 | 19 |
| SMG1P2 | 7.06765 | 0.371982 | 19 |
| BOLA2 | 7.06765 | 0.371982 | 19 |
| LOC613038 | 7.06765 | 0.371982 | 19 |
| ZNF423 | 5.716777 | 0.300883 | 19 |
| CASZ1 | 5.598989 | 0.294684 | 19 |
| KCNQ1 | 4.405857 | 0.231887 | 19 |
| FOXK1 | 9.609548 | 0.533864 | 18 |
| TBC1D16 | 7.431807 | 0.412878 | 18 |
| MCF2L | 6.035987 | 0.335333 | 18 |
| ANKRD11 | 5.04371 | 0.280206 | 18 |
| SEPTIN9 | 4.418339 | 0.245463 | 18 |
| OPCML | 5.149965 | 0.302939 | 17 |
| EBF3 | 5.495662 | 0.343479 | 16 |
| NAV2 | 4.483761 | 0.280235 | 16 |
| FOXP1 | 4.190478 | 0.261905 | 16 |
| GLI2 | 7.394108 | 0.492941 | 15 |
| BAIAP2 | 5.826734 | 0.388449 | 15 |
| SLX1B-SULT1A4 | 4.969677 | 0.331312 | 15 |
| SLX1A | 4.969677 | 0.331312 | 15 |
| LOC606724 | 4.969677 | 0.331312 | 15 |
| KIRREL3 | 4.942031 | 0.329469 | 15 |
| NFATC1 | 4.188296 | 0.27922 | 15 |
| RPS6KA2 | 8.057203 | 0.575514 | 14 |
| CUX1 | 5.824604 | 0.416043 | 14 |
| C7orf50 | 5.488536 | 0.392038 | 14 |
| PRKAG2 | 5.378981 | 0.384213 | 14 |
| IQSEC1 | 4.92666 | 0.351904 | 14 |
| MSI2 | 8.50001 | 0.653847 | 13 |
| GSE1 | 5.467176 | 0.420552 | 13 |
| MYT1L | 5.392954 | 0.414843 | 13 |
| CMIP | 5.995666 | 0.499639 | 12 |
| ADGRD1 | 5.49992 | 0.458327 | 12 |
| FBRSL1 | 5.377398 | 0.448117 | 12 |
| GNA12 | 4.901687 | 0.408474 | 12 |
| ZC3H3 | 4.777128 | 0.398094 | 12 |
| ZC3H12D | 5.069794 | 0.46089 | 11 |
| ANAPC16 | 4.337299 | 0.3943 | 11 |
| CTBP2 | 4.211653 | 0.382878 | 11 |
| AKAP13 | 5.934512 | 0.593451 | 10 |
| TSPAN4 | 5.465636 | 0.546564 | 10 |
| ACOT7 | 4.63607 | 0.463607 | 10 |
| RGS12 | 4.236383 | 0.423638 | 10 |
| GAS7 | 4.190349 | 0.419035 | 10 |
| ATP11A | 8.092174 | 0.89913 | 9 |
| SND1 | 7.130321 | 0.792258 | 9 |
| ADAMTS2 | 6.985639 | 0.776182 | 9 |
| TSPAN9 | 5.699636 | 0.633293 | 9 |
| KCNH2 | 5.598484 | 0.622054 | 9 |
| TRAPPC12 | 5.177346 | 0.575261 | 9 |
| MGMT | 5.073455 | 0.563717 | 9 |
| ASAP1 | 4.968154 | 0.552017 | 9 |
| DNMT3A | 4.980074 | 0.622509 | 8 |
| DLEU1 | 4.929789 | 0.616224 | 8 |
| SYNJ2 | 4.464514 | 0.558064 | 8 |
| VPS13D | 5.363926 | 0.766275 | 7 |
| ITPKB | 5.030327 | 0.718618 | 7 |
| C19orf25 | 4.429583 | 0.632798 | 7 |
| NAV1 | 4.398237 | 0.62832 | 7 |
| RXRA | 4.217134 | 0.602448 | 7 |
| CRADD | 4.749641 | 0.791607 | 6 |
| FBXL18 | 4.234717 | 0.705786 | 6 |
| ARHGEF7 | 5.396565 | 1.079313 | 5 |
| TSNAX-DISC1 | 5.184178 | 1.036836 | 5 |
| RUNDC3A | 4.527973 | 0.905595 | 5 |
| BCAR1 | 4.171778 | 0.834356 | 5 |
| NHSL1 | 5.159373 | 1.289843 | 4 |

TABLE 8
Cancer Type ATRT_TYR

| Gene site | imp_sum | imp_mean | n |
|---|---|---|---|
| PTPRN2 | 17.17779 | 0.209485 | 82 |
| PRDM16 | 13.19798 | 0.185887 | 71 |
| PCDHGA1 | 7.447791 | 0.126234 | 59 |
| PCDHGA2 | 7.050652 | 0.123696 | 57 |
| PCDHGA3 | 6.919764 | 0.128144 | 54 |
| PCDHGB1 | 6.919764 | 0.130562 | 53 |
| PCDHGA4 | 6.603378 | 0.129478 | 51 |
| PCDHGB2 | 6.603378 | 0.134763 | 49 |
| PCDHGA5 | 6.286992 | 0.133766 | 47 |
| PCDHGB3 | 5.970606 | 0.138851 | 43 |
| PCDHGA6 | 5.724475 | 0.143112 | 40 |
| HDAC4 | 20.70341 | 0.559552 | 37 |
| PCDHGA7 | 5.091703 | 0.137614 | 37 |
| RBFOX3 | 6.927478 | 0.197928 | 35 |
| PAX6 | 6.599989 | 0.188571 | 35 |
| PCDHGB4 | 5.091703 | 0.145477 | 35 |
| PCDHGA8 | 5.091703 | 0.145477 | 35 |
| DIP2C | 11.60772 | 0.362741 | 32 |
| PCDHGB5 | 4.775317 | 0.149229 | 32 |
| PCDHGA9 | 4.775317 | 0.154042 | 31 |
| SOX2-OT | 8.196193 | 0.282627 | 29 |
| PCDHGB6 | 4.458931 | 0.153756 | 29 |
| PCDHGA10 | 4.458931 | 0.159248 | 28 |
| GALNT9 | 4.845115 | 0.179449 | 27 |
| SHANK2 | 7.031974 | 0.270461 | 26 |
| ADARB2 | 4.425699 | 0.170219 | 26 |
| AGAP1 | 13.75814 | 0.550325 | 25 |
| CAMTA1 | 8.294735 | 0.331789 | 25 |
| MEIS1 | 6.612173 | 0.275507 | 24 |
| RPTOR | 13.07668 | 0.568551 | 23 |
| NXN | 10.20379 | 0.443643 | 23 |
| INPP5A | 6.643652 | 0.288854 | 23 |
| NCOR2 | 6.499293 | 0.282578 | 23 |
| RIMBP2 | 4.784154 | 0.208007 | 23 |
| PRKCZ | 8.619356 | 0.391789 | 22 |
| SKI | 11.00712 | 0.524148 | 21 |
| FRMD4A | 7.127492 | 0.356375 | 20 |
| ABR | 5.1764 | 0.25882 | 20 |
| SDK1 | 4.96091 | 0.248046 | 20 |
| MAD1L1 | 12.46744 | 0.656181 | 19 |
| SMG1P2 | 6.447881 | 0.339362 | 19 |
| BOLA2 | 6.447881 | 0.339362 | 19 |
| LOC613038 | 6.447881 | 0.339362 | 19 |
| KCNQ1 | 5.898287 | 0.310436 | 19 |
| CASZ1 | 5.485553 | 0.288713 | 19 |
| ZNF423 | 5.462272 | 0.287488 | 19 |
| CFAP46 | 5.159089 | 0.271531 | 19 |
| FOXK1 | 10.70561 | 0.594756 | 18 |
| TBC1D16 | 6.899829 | 0.383324 | 18 |
| ANKRD11 | 5.454725 | 0.30304 | 18 |
| PAX6-AS1 | 4.816456 | 0.283321 | 17 |
| RCN1 | 4.816456 | 0.283321 | 17 |
| FOXP1 | 7.32639 | 0.457899 | 16 |
| GLI2 | 7.809527 | 0.520635 | 15 |
| KIRREL3 | 7.209825 | 0.480655 | 15 |
| BAIAP2 | 6.29041 | 0.419361 | 15 |
| ZBTB20 | 5.342014 | 0.356134 | 15 |
| SLX1B- | 5.163699 | 0.344247 | 15 |
| SULT1A4 | | | |
| SLX1A | 5.163699 | 0.344247 | 15 |
| LOC606724 | 5.163699 | 0.344247 | 15 |
| RPS6KA2 | 6.698645 | 0.478475 | 14 |
| IQSEC1 | 6.069825 | 0.433559 | 14 |
| PRKAG2 | 5.738334 | 0.409881 | 14 |
| CUX1 | 5.302633 | 0.378759 | 14 |
| C7orf50 | 4.746734 | 0.339052 | 14 |
| MIR548F5 | 4.480361 | 0.320026 | 14 |
| MSI2 | 6.390182 | 0.491552 | 13 |
| MYTIL | 5.351189 | 0.41163 | 13 |
| GSE1 | 4.631692 | 0.356284 | 13 |
| CMIP | 7.168856 | 0.597405 | 12 |
| FBRSL1 | 6.380225 | 0.531685 | 12 |
| ZC3H3 | 5.577344 | 0.464779 | 12 |
| MAML3 | 5.348197 | 0.445683 | 12 |
| GNA12 | 5.327119 | 0.443927 | 12 |
| ADGRD1 | 5.196335 | 0.433028 | 12 |
| TNS3 | 4.431316 | 0.369276 | 12 |
| RAD51B | 4.560009 | 0.414546 | 11 |
| TSPAN4 | 6.463955 | 0.646395 | 10 |
| AKAP13 | 5.713526 | 0.571353 | 10 |
| ACOT7 | 5.249279 | 0.524928 | 10 |
| SND1 | 7.870976 | 0.874553 | 9 |
| ATP11A | 7.260096 | 0.806677 | 9 |
| ADAMTS2 | 6.931892 | 0.77021 | 9 |
| TSPAN9 | 4.861158 | 0.540129 | 9 |
| KCNH2 | 4.764548 | 0.529394 | 9 |
| CACNA2D4 | 4.710694 | 0.52341 | 9 |
| DNMT3A | 4.897363 | 0.61217 | 8 |
| DLEU1 | 4.821535 | 0.602692 | 8 |
| SYNJ2 | 4.589362 | 0.57367 | 8 |
| VPS13D | 5.492812 | 0.784687 | 7 |
| NAV1 | 5.347137 | 0.763877 | 7 |
| RXRA | 4.834905 | 0.690701 | 7 |
| CXXC5 | 4.78724 | 0.683891 | 7 |
| FBXL18 | 4.838799 | 0.806467 | 6 |
| CRADD | 4.809103 | 0.801517 | 6 |
| TSNAX-DISC1 | 5.422562 | 1.084512 | 5 |
| ARHGEF7 | 4.794453 | 0.958891 | 5 |
| RUNDC3A | 4.504949 | 0.90099 | 5 |
| NHSL1 | 5.116568 | 1.279142 | 4 |
| RALGAPA2 | 4.45333 | 2.226665 | 2 |

TABLE 9
Cancer Type CHGL

| Gene site | imp_sum | imp_mean | n |
|---|---|---|---|
| PTPRN2 | 14.79861 | 0.180471 | 82 |
| PRDM16 | 12.8778 | 0.181377 | 71 |
| PCDHGA1 | 5.515199 | 0.093478 | 59 |
| PCDHGA2 | 5.198813 | 0.091207 | 57 |
| PCDHGA3 | 5.198813 | 0.096274 | 54 |
| PCDHGB1 | 5.198813 | 0.098091 | 53 |
| PCDHGA4 | 4.767947 | 0.093489 | 51 |
| PCDHGB2 | 4.451561 | 0.090848 | 49 |
| PCDHGA5 | 4.135175 | 0.087982 | 47 |
| PCDHGB3 | 3.502403 | 0.081451 | 43 |
| PCDHGA6 | 3.502403 | 0.08756 | 40 |
| HDAC4 | 12.87305 | 0.34792 | 37 |
| PCDHGA7 | 3.502403 | 0.09466 | 37 |
| PAX6 | 7.160987 | 0.2046 | 35 |
| RBFOX3 | 3.818802 | 0.109109 | 35 |
| PCDHGB4 | 3.502403 | 0.100069 | 35 |
| PCDHGA8 | 3.502403 | 0.100069 | 35 |
| DIP2C | 8.043739 | 0.251367 | 32 |
| PCDHGB5 | 3.502403 | 0.10945 | 32 |
| PCDHGA9 | 3.502403 | 0.112981 | 31 |
| SOX2-OT | 4.335995 | 0.149517 | 29 |
| SHANK2 | 5.495176 | 0.211353 | 26 |
| ADARB2 | 4.218601 | 0.162254 | 26 |
| AGAP1 | 8.389655 | 0.335586 | 25 |
| CAMTA1 | 7.901409 | 0.316056 | 25 |
| PDGFRA | 4.726646 | 0.189066 | 25 |
| SATB2 | 5.128386 | 0.213683 | 24 |
| RPTOR | 10.87751 | 0.472935 | 23 |
| NCOR2 | 4.219558 | 0.183459 | 23 |
| INPP5A | 4.041 | 0.175696 | 23 |
| RIMBP2 | 3.839015 | 0.166914 | 23 |
| PRKCZ | 4.948854 | 0.224948 | 22 |
| SKI | 8.260395 | 0.393352 | 21 |
| ZIC4 | 3.647669 | 0.173699 | 21 |
| SDK1 | 6.056386 | 0.302819 | 20 |
| ABR | 5.322552 | 0.266128 | 20 |
| FRMD4A | 4.655164 | 0.232758 | 20 |
| MAD1L1 | 9.009302 | 0.474174 | 19 |
| ZNF423 | 7.063639 | 0.37177 | 19 |
| CASZ1 | 4.550555 | 0.239503 | 19 |
| SEPTIN9 | 5.657282 | 0.314293 | 18 |
| TBC1D16 | 5.558976 | 0.308832 | 18 |
| FOXK1 | 4.715776 | 0.261988 | 18 |
| ANKRD11 | 3.55617 | 0.197565 | 18 |
| MCF2L | 3.27087 | 0.181715 | 18 |
| OPCML | 3.559998 | 0.209412 | 17 |
| TBX15 | 3.539969 | 0.208233 | 17 |
| FOXP1 | 5.668133 | 0.354258 | 16 |
| NAV2 | 4.20854 | 0.263034 | 16 |
| GLI2 | 6.894022 | 0.459601 | 15 |
| NFIX | 4.539748 | 0.30265 | 15 |
| RPS6KA2 | 5.924986 | 0.423213 | 14 |
| PRKAG2 | 5.161181 | 0.368656 | 14 |
| C7orf50 | 4.374604 | 0.312472 | 14 |
| CUX1 | 4.301476 | 0.307248 | 14 |
| IQSEC1 | 4.248587 | 0.30347 | 14 |
| MSI2 | 5.792215 | 0.445555 | 13 |
| GSE1 | 4.661854 | 0.358604 | 13 |
| MYT1L | 3.970198 | 0.3054 | 13 |
| CMIP | 4.801019 | 0.400085 | 12 |
| MIRLET7BHG | 4.003606 | 0.333634 | 12 |
| FBRSL1 | 3.821366 | 0.318447 | 12 |
| ZC3H3 | 3.753333 | 0.312778 | 12 |
| RASA3 | 3.657104 | 0.304759 | 12 |
| ZC3H12D | 3.612422 | 0.328402 | 11 |
| CTBP2 | 3.525179 | 0.320471 | 11 |
| CACNA1C | 3.372955 | 0.306632 | 11 |
| AKAP13 | 5.056953 | 0.505695 | 10 |
| CHST11 | 3.124458 | 0.312446 | 10 |
| RGS12 | 3.122263 | 0.312226 | 10 |
| TSPAN4 | 3.114551 | 0.311455 | 10 |
| TRAPPC12 | 4.011072 | 0.445675 | 9 |
| ATP11A | 3.780115 | 0.420013 | 9 |
| SND1 | 3.550011 | 0.394446 | 9 |
| RUNX1 | 3.508329 | 0.389814 | 9 |
| CACNA2D4 | 3.410833 | 0.378981 | 9 |
| MGMT | 3.143697 | 0.3493 | 9 |
| ADAMTS2 | 3.099666 | 0.344407 | 9 |
| NOTCH1 | 3.071767 | 0.341307 | 9 |
| DNMT3A | 4.219117 | 0.52739 | 8 |
| DLEU1 | 4.091619 | 0.511452 | 8 |
| ESRRG | 3.813668 | 0.476709 | 8 |
| MCC | 3.480227 | 0.435028 | 8 |
| MSRA | 3.13775 | 0.392219 | 8 |
| AFF3 | 3.097254 | 0.387157 | 8 |
| LINC00311 | 3.083062 | 0.385383 | 8 |
| NAV1 | 4.437205 | 0.633886 | 7 |
| LHPP | 3.999415 | 0.571345 | 7 |
| C19orf25 | 3.883883 | 0.55484 | 7 |
| MIR548H4 | 3.465819 | 0.495117 | 7 |
| FOXP4 | 3.315285 | 0.473612 | 7 |
| LINC01140 | 3.25579 | 0.465113 | 7 |
| RXRA | 3.076949 | 0.439564 | 7 |
| SLC22A18AS | 4.438269 | 0.739711 | 6 |
| FBXL18 | 3.916143 | 0.65269 | 6 |
| RUNDC3A | 4.641016 | 0.928203 | 5 |
| TSNAX-DISC1 | 3.590508 | 0.718102 | 5 |
| STAP2 | 3.380822 | 0.845206 | 4 |
| IGDCC4 | 3.084475 | 0.771119 | 4 |
| DAGLB | 3.187697 | 1.062566 | 3 |

TABLE 10
Cancer Type CHORDM

| Gene site | imp_sum | imp_mean | n |
|---|---|---|---|
| PTPRN2 | 16.55238 | 0.201858 | 82 |
| PRDM16 | 14.25707 | 0.200804 | 71 |
| PCDHGA1 | 7.664046 | 0.129899 | 59 |
| PCDHGA2 | 7.34766 | 0.128906 | 57 |
| PCDHGA3 | 7.031274 | 0.130209 | 54 |
| PCDHGB1 | 7.031274 | 0.132666 | 53 |
| PCDHGA4 | 7.031274 | 0.137868 | 51 |
| PCDHGB2 | 7.031274 | 0.143495 | 49 |
| PCDHGA5 | 6.714888 | 0.14287 | 47 |
| PCDHGB3 | 6.082116 | 0.141445 | 43 |
| PCDHGA6 | 6.398502 | 0.159963 | 40 |
| HDAC4 | 21.54355 | 0.582258 | 37 |
| PCDHGA7 | 7.031274 | 0.190034 | 37 |
| PAX6 | 10.37192 | 0.296341 | 35 |
| RBFOX3 | 8.759702 | 0.250277 | 35 |
| PCDHGB4 | 7.031274 | 0.200894 | 35 |
| PCDHGA8 | 7.031274 | 0.200894 | 35 |
| DIP2C | 12.96907 | 0.405283 | 32 |
| PCDHGB5 | 6.714888 | 0.20984 | 32 |
| PCDHGA9 | 6.714888 | 0.216609 | 31 |
| PCDHGB6 | 6.398502 | 0.220638 | 29 |
| SOX2-OT | 6.1506 | 0.21209 | 29 |
| PCDHGA10 | 5.967975 | 0.213142 | 28 |
| GALNT9 | 6.874988 | 0.254629 | 27 |
| SHANK2 | 6.202549 | 0.23856 | 26 |
| AGAP1 | 12.407 | 0.49628 | 25 |
| CAMTA1 | 5.741739 | 0.22967 | 25 |
| SATB2 | 5.401018 | 0.225042 | 24 |
| PCDHGB7 | 5.335203 | 0.2223 | 24 |
| RPTOR | 11.37436 | 0.494538 | 23 |
| NCOR2 | 10.30472 | 0.448031 | 23 |
| INPP5A | 6.682606 | 0.290548 | 23 |
| NXN | 5.454332 | 0.237145 | 23 |
| PCDHGA11 | 5.335203 | 0.231965 | 23 |
| RIMBP2 | 5.27324 | 0.229271 | 23 |
| PRKCZ | 6.818188 | 0.309918 | 22 |
| SKI | 9.865213 | 0.469772 | 21 |
| FRMD4A | 6.525814 | 0.326291 | 20 |
| SDK1 | 5.35532 | 0.267766 | 20 |
| MAD1L1 | 13.4089 | 0.705732 | 19 |
| CASZ1 | 6.812935 | 0.358576 | 19 |
| ZNF423 | 6.718331 | 0.353596 | 19 |
| SMG1P2 | 5.821967 | 0.306419 | 19 |
| BOLA2 | 5.821967 | 0.306419 | 19 |
| LOC613038 | 5.821967 | 0.306419 | 19 |
| FOXK1 | 8.589269 | 0.477182 | 18 |
| TBC1D16 | 7.431356 | 0.412853 | 18 |
| ANKRD11 | 5.957897 | 0.330994 | 18 |
| SEPTIN9 | 5.504379 | 0.305799 | 18 |
| OPCML | 4.593892 | 0.270229 | 17 |
| FOXP1 | 6.10553 | 0.381596 | 16 |
| SORBS2 | 6.052013 | 0.378251 | 16 |
| EBF3 | 5.932069 | 0.370754 | 16 |
| NAV2 | 5.279409 | 0.329963 | 16 |
| ZBTB20 | 6.598775 | 0.439918 | 15 |
| GLI2 | 5.800381 | 0.386692 | 15 |
| NFIX | 5.646003 | 0.3764 | 15 |
| SLX1B- | 5.321711 | 0.354781 | 15 |
| SULT1A4 | | | |
| SLX1A | 5.321711 | 0.354781 | 15 |
| LOC606724 | 5.321711 | 0.354781 | 15 |
| BAIAP2 | 4.860121 | 0.324008 | 15 |
| KNDC1 | 4.851891 | 0.323459 | 15 |
| CUX1 | 7.205997 | 0.514714 | 14 |
| RPS6KA2 | 6.180081 | 0.441434 | 14 |
| IQSEC1 | 5.85971 | 0.418551 | 14 |
| C7orf50 | 5.675578 | 0.405398 | 14 |
| PRKAG2 | 5.473467 | 0.390962 | 14 |
| ARHGEF10 | 4.720729 | 0.337195 | 14 |
| MSI2 | 7.483359 | 0.575643 | 13 |
| MYT1L | 5.628405 | 0.432954 | 13 |
| GSE1 | 5.108727 | 0.392979 | 13 |
| RFX4 | 5.022644 | 0.386357 | 13 |
| CMIP | 6.303599 | 0.5253 | 12 |
| FBRSL1 | 5.567028 | 0.463919 | 12 |
| RASA3 | 5.536303 | 0.461359 | 12 |
| ZC3H3 | 5.072695 | 0.422725 | 12 |
| MIRLET7BHG | 4.778244 | 0.398187 | 12 |
| TNS3 | 4.728176 | 0.394015 | 12 |
| ZC3H12D | 5.34907 | 0.486279 | 11 |
| RAD51B | 5.248837 | 0.477167 | 11 |
| CTBP2 | 4.770185 | 0.433653 | 11 |
| ACOT7 | 6.555788 | 0.655579 | 10 |
| TSPAN4 | 5.56361 | 0.556361 | 10 |
| KLHL29 | 4.70729 | 0.470729 | 10 |
| ATP11A | 8.056261 | 0.89514 | 9 |
| SND1 | 6.661356 | 0.740151 | 9 |
| ADAMTS2 | 6.218541 | 0.690949 | 9 |
| CACNA2D4 | 5.379067 | 0.597674 | 9 |
| TSPAN9 | 4.561383 | 0.50682 | 9 |
| MSRA | 4.804979 | 0.600622 | 8 |
| SMAD3 | 4.791134 | 0.598892 | 8 |
| DNMT3A | 4.742032 | 0.592754 | 8 |
| SYNJ2 | 4.676059 | 0.584507 | 8 |
| C19orf25 | 5.429518 | 0.775645 | 7 |
| GAK | 5.087383 | 0.726769 | 7 |
| VPS13D | 4.969722 | 0.70996 | 7 |
| FBXL18 | 5.310933 | 0.885156 | 6 |
| TSNAX-DISC1 | 6.356626 | 1.271325 | 5 |
| RUNDC3A | 5.285637 | 1.057127 | 5 |
| ARHGEF7 | 5.257238 | 1.051448 | 5 |

TABLE 11
Cancer Type CN

| Gene site | imp_sum | imp_mean | n |
|---|---|---|---|
| PTPRN2 | 17.41315 | 0.212355 | 82 |
| PRDM16 | 18.11757 | 0.255177 | 71 |
| PCDHGA1 | 4.439372 | 0.075244 | 59 |
| PCDHGA2 | 4.439372 | 0.077884 | 57 |
| PCDHGA3 | 4.755758 | 0.08807 | 54 |
| PCDHGB1 | 4.755758 | 0.089731 | 53 |
| PCDHGA4 | 4.755758 | 0.09325 | 51 |
| PCDHGB2 | 4.439372 | 0.090599 | 49 |
| PCDHGA5 | 4.122986 | 0.087723 | 47 |
| PCDHGB3 | 3.501677 | 0.081434 | 43 |
| HDAC4 | 9.842804 | 0.266022 | 37 |
| PAX6 | 8.660398 | 0.24744 | 35 |
| RBFOX3 | 8.540415 | 0.244012 | 35 |
| DIP2C | 8.478792 | 0.264962 | 32 |
| SOX2-OT | 9.240267 | 0.31863 | 29 |
| GALNT9 | 4.333948 | 0.160517 | 27 |
| ADARB2 | 5.603375 | 0.215514 | 26 |
| SHANK2 | 4.911326 | 0.188897 | 26 |
| AGAP1 | 8.213638 | 0.328546 | 25 |
| CAMTA1 | 6.099428 | 0.243977 | 25 |
| SATB2 | 5.464538 | 0.227689 | 24 |
| RPTOR | 10.66881 | 0.463861 | 23 |
| HOXB3 | 5.490551 | 0.23872 | 23 |
| NCOR2 | 4.956795 | 0.215513 | 23 |
| INPP5A | 3.816948 | 0.165954 | 23 |
| PRKCZ | 6.234103 | 0.283368 | 22 |
| SKI | 11.48203 | 0.546763 | 21 |
| ZIC4 | 3.924716 | 0.186891 | 21 |
| SIM2 | 3.534931 | 0.16833 | 21 |
| ABR | 7.657151 | 0.382858 | 20 |
| FRMD4A | 6.170234 | 0.308512 | 20 |
| SDK1 | 4.298032 | 0.214902 | 20 |
| MAD1L1 | 10.78128 | 0.567436 | 19 |
| ZNF423 | 7.597013 | 0.399843 | 19 |
| SMG1P2 | 6.87194 | 0.361681 | 19 |
| BOLA2 | 6.87194 | 0.361681 | 19 |
| LOC613038 | 6.87194 | 0.361681 | 19 |
| CASZ1 | 5.104204 | 0.268642 | 19 |
| TBC1D16 | 6.092089 | 0.338449 | 18 |
| FOXK1 | 6.044418 | 0.335801 | 18 |
| SEPTIN9 | 4.550265 | 0.252792 | 18 |
| OPCML | 7.381886 | 0.434229 | 17 |
| TBX15 | 3.551385 | 0.208905 | 17 |
| FOXP1 | 4.744313 | 0.29652 | 16 |
| NAV2 | 4.17554 | 0.260971 | 16 |
| GLI2 | 9.66338 | 0.644225 | 15 |
| SLX1B- | 4.42696 | 0.295131 | 15 |
| SULT1A4 | | | |
| SLX1A | 4.42696 | 0.295131 | 15 |
| LOC606724 | 4.42696 | 0.295131 | 15 |
| BAIAP2 | 4.293779 | 0.286252 | 15 |
| ZBTB20 | 3.970811 | 0.264721 | 15 |
| NFIX | 3.576827 | 0.238455 | 15 |
| PRKAG2 | 5.562683 | 0.397335 | 14 |
| RPS6KA2 | 4.538682 | 0.324192 | 14 |
| MOB2 | 3.632116 | 0.259437 | 14 |
| IQSEC1 | 3.623361 | 0.258811 | 14 |
| MSI2 | 7.276147 | 0.559704 | 13 |
| GSE1 | 4.103655 | 0.315666 | 13 |
| MYTIL | 3.811088 | 0.293161 | 13 |
| CLYBL | 3.726201 | 0.286631 | 13 |
| MAML3 | 5.722683 | 0.47689 | 12 |
| MIRLET7BHG | 4.931143 | 0.410929 | 12 |
| ZC3H3 | 4.921139 | 0.410095 | 12 |
| CMIP | 4.50246 | 0.375205 | 12 |
| TNS3 | 4.033096 | 0.336091 | 12 |
| MEGF6 | 3.679307 | 0.306609 | 12 |
| ZC3H12D | 5.752693 | 0.522972 | 11 |
| VGLL4 | 4.195828 | 0.381439 | 11 |
| SPON2 | 4.119606 | 0.37451 | 11 |
| GLUD1P2 | 3.612424 | 0.328402 | 11 |
| ACOT7 | 4.552161 | 0.455216 | 10 |
| ATP11A | 5.824264 | 0.64714 | 9 |
| TRAPPC12 | 4.941906 | 0.549101 | 9 |
| SND1 | 4.597402 | 0.510823 | 9 |
| KCNH2 | 4.245815 | 0.471757 | 9 |
| CACNA2D4 | 4.064338 | 0.451593 | 9 |
| AXIN2 | 3.940874 | 0.437875 | 9 |
| ADAMTS2 | 3.932094 | 0.436899 | 9 |
| TSPAN9 | 3.817944 | 0.424216 | 9 |
| GPC6 | 3.730134 | 0.414459 | 9 |
| LHX4 | 4.812097 | 0.601512 | 8 |
| LINC00311 | 3.881015 | 0.485127 | 8 |
| MSRA | 3.742145 | 0.467768 | 8 |
| AFF3 | 3.68184 | 0.46023 | 8 |
| RORA | 3.582455 | 0.447807 | 8 |
| RXRA | 4.956798 | 0.708114 | 7 |
| DUSP6 | 4.574231 | 0.653462 | 7 |
| NAV1 | 4.421833 | 0.63169 | 7 |
| VPS13D | 3.505702 | 0.500815 | 7 |
| FMNL2 | 4.738833 | 0.789805 | 6 |
| FBXL18 | 4.621327 | 0.770221 | 6 |
| ARHGEF7 | 4.827002 | 0.9654 | 5 |
| TSNAX-DISC1 | 4.246502 | 0.8493 | 5 |
| TOLLIP | 3.980093 | 0.796019 | 5 |
| AP2A2 | 3.538338 | 0.707668 | 5 |
| RBMS3 | 5.039035 | 1.259759 | 4 |
| DTNA | 3.667401 | 0.91685 | 4 |
| SLC25A22 | 3.735059 | 1.24502 | 3 |
| SLC25A10 | 4.452157 | 2.226079 | 2 |
| ANKLE2 | 4.048098 | 2.024049 | 2 |

TABLE 12
Cancer Type CNS_NB_FOXR2

| Gene site | imp_sum | imp_mean | n |
|---|---|---|---|
| PTPRN2 | 22.2855 | 0.271774 | 82 |
| PRDM16 | 8.402066 | 0.118339 | 71 |
| HDAC4 | 10.81953 | 0.29242 | 37 |
| RBFOX3 | 8.390319 | 0.239723 | 35 |
| PAX6 | 3.863507 | 0.110386 | 35 |
| DIP2C | 9.245805 | 0.288931 | 32 |
| SOX2-OT | 8.203317 | 0.282873 | 29 |
| GALNT9 | 3.830935 | 0.141886 | 27 |
| SHANK2 | 5.300173 | 0.203853 | 26 |
| ADARB2 | 5.192971 | 0.19973 | 26 |
| AGAP1 | 8.539411 | 0.341576 | 25 |
| CAMTA1 | 8.451029 | 0.338041 | 25 |
| PDGFRA | 7.359602 | 0.294384 | 25 |
| SATB2 | 4.178537 | 0.174106 | 24 |
| RPTOR | 8.841747 | 0.384424 | 23 |
| INPP5A | 5.291318 | 0.230057 | 23 |
| NCOR2 | 4.690211 | 0.203922 | 23 |
| RIMBP2 | 4.348611 | 0.18907 | 23 |
| HOXB3 | 4.035728 | 0.175466 | 23 |
| SKI | 9.461609 | 0.450553 | 21 |
| HOXA-AS3 | 3.253921 | 0.154949 | 21 |
| SIM2 | 3.19159 | 0.15198 | 21 |
| FRMD4A | 4.992572 | 0.249629 | 20 |
| ABR | 4.973264 | 0.248663 | 20 |
| SDK1 | 4.302409 | 0.21512 | 20 |
| MAD1L1 | 11.44015 | 0.602113 | 19 |
| ZNF423 | 7.98033 | 0.420017 | 19 |
| CASZ1 | 6.244159 | 0.32864 | 19 |
| SMG1P2 | 6.101449 | 0.321129 | 19 |
| BOLA2 | 6.101449 | 0.321129 | 19 |
| LOC613038 | 6.101449 | 0.321129 | 19 |
| KCNQ1 | 4.178427 | 0.219917 | 19 |
| FOXK1 | 6.189604 | 0.343867 | 18 |
| ANKRD11 | 4.543665 | 0.252426 | 18 |
| MCF2L | 3.783785 | 0.21021 | 18 |
| SEPTIN9 | 3.743418 | 0.207968 | 18 |
| OPCML | 6.010054 | 0.353533 | 17 |
| FOXP1 | 5.119723 | 0.319983 | 16 |
| GLI2 | 8.505799 | 0.567053 | 15 |
| DLX6-AS1 | 8.040784 | 0.536052 | 15 |
| BAIAP2 | 4.472712 | 0.298181 | 15 |
| COL23A1 | 3.569903 | 0.237994 | 15 |
| SLX1B- | 3.137898 | 0.209193 | 15 |
| SULT1A4 | | | |
| SLX1A | 3.137898 | 0.209193 | 15 |
| LOC606724 | 3.137898 | 0.209193 | 15 |
| RPS6KA2 | 6.920327 | 0.494309 | 14 |
| CUX1 | 5.050344 | 0.360739 | 14 |
| IQSEC1 | 4.966123 | 0.354723 | 14 |
| PRKAG2 | 4.891786 | 0.349413 | 14 |
| GNG7 | 3.327657 | 0.23769 | 14 |
| MSI2 | 6.349105 | 0.488393 | 13 |
| MYT1L | 5.132238 | 0.394788 | 13 |
| MIRLET7BHG | 4.702356 | 0.391863 | 12 |
| ADGRD1 | 4.548518 | 0.379043 | 12 |
| CMIP | 4.280517 | 0.35671 | 12 |
| ZC3H3 | 3.399395 | 0.283283 | 12 |
| VGLL4 | 4.005113 | 0.364101 | 11 |
| GLUD1P2 | 3.982516 | 0.362047 | 11 |
| RAD51B | 3.957538 | 0.359776 | 11 |
| CTBP2 | 3.237034 | 0.294276 | 11 |
| SH3RF3 | 5.121554 | 0.512155 | 10 |
| ACOT7 | 4.581365 | 0.458136 | 10 |
| ETS1 | 3.628299 | 0.36283 | 10 |
| NR2F1-AS1 | 3.550673 | 0.355067 | 10 |
| ATP11A | 6.369748 | 0.70775 | 9 |
| SND1 | 6.008691 | 0.667632 | 9 |
| TRAPPC12 | 5.27194 | 0.585771 | 9 |
| TSPAN9 | 5.194926 | 0.577214 | 9 |
| ADAMTS2 | 4.498595 | 0.499844 | 9 |
| AXIN2 | 4.294901 | 0.477211 | 9 |
| CACNA2D4 | 3.895577 | 0.432842 | 9 |
| ASAP1 | 3.653458 | 0.40594 | 9 |
| APBA2 | 3.36757 | 0.374174 | 9 |
| LINC00311 | 4.87739 | 0.609674 | 8 |
| DNMT3A | 4.17539 | 0.521924 | 8 |
| DLX5 | 3.590566 | 0.448821 | 8 |
| MSRA | 3.448761 | 0.431095 | 8 |
| ASPSCR1 | 3.408459 | 0.426057 | 8 |
| NAV1 | 5.037875 | 0.719696 | 7 |
| DUSP6 | 4.399055 | 0.628436 | 7 |
| VPS13D | 3.75286 | 0.536123 | 7 |
| LINC00461 | 3.67187 | 0.524553 | 7 |
| FBXL18 | 4.805531 | 0.800922 | 6 |
| FAM181A | 3.87676 | 0.646127 | 6 |
| RUNDC3A | 5.224921 | 1.044984 | 5 |
| ARHGEF7 | 4.53184 | 0.906368 | 5 |
| PRR5L | 4.04784 | 0.809568 | 5 |
| TSNAX-DISC1 | 4.001967 | 0.800393 | 5 |
| ASAP2 | 3.215839 | 0.643168 | 5 |
| DNAAF5 | 3.191462 | 0.638292 | 5 |
| RBMS3 | 4.467137 | 1.116784 | 4 |
| STAP2 | 4.100788 | 1.025197 | 4 |
| VOPP1 | 3.416731 | 0.854183 | 4 |
| DAGLB | 3.791019 | 1.263673 | 3 |
| GRIN2B | 3.759161 | 1.253054 | 3 |
| SOX10 | 4.869568 | 2.434784 | 2 |
| KIF21B | 3.835147 | 1.917573 | 2 |
| SLC25A10 | 3.765673 | 1.882836 | 2 |
| ANKLE2 | 3.723663 | 1.861831 | 2 |
| CHTF18 | 3.366331 | 1.683166 | 2 |

TABLE 13
Cancer Type CNS_SARC_DICER

| Gene site | imp_sum | imp_mean | n |
|---|---|---|---|
| PTPRN2 | 11.53676 | 0.140692 | 82 |
| PRDM16 | 6.861192 | 0.096637 | 71 |
| HDAC4 | 8.635581 | 0.233394 | 37 |
| RBFOX3 | 5.971672 | 0.170619 | 35 |
| PAX6 | 3.621629 | 0.103475 | 35 |
| DIP2C | 3.328282 | 0.104009 | 32 |
| SOX2-OT | 2.161325 | 0.074528 | 29 |
| GALNT9 | 6.89057 | 0.255206 | 27 |
| ADARB2 | 2.571709 | 0.098912 | 26 |
| SHANK2 | 2.41474 | 0.092875 | 26 |
| AGAP1 | 5.858976 | 0.234359 | 25 |
| CAMTA1 | 3.003147 | 0.120126 | 25 |
| PDGFRA | 2.160727 | 0.086429 | 25 |
| NCOR2 | 3.343412 | 0.145366 | 23 |
| RPTOR | 3.27489 | 0.142387 | 23 |
| RIMBP2 | 2.615112 | 0.113701 | 23 |
| HOXB3 | 1.836799 | 0.079861 | 23 |
| INPP5A | 1.791248 | 0.07788 | 23 |
| PRKCZ | 4.651515 | 0.211433 | 22 |
| SKI | 4.121479 | 0.196261 | 21 |
| SDK1 | 4.28274 | 0.214137 | 20 |
| ABR | 2.438093 | 0.121905 | 20 |
| FRMD4A | 2.286896 | 0.114345 | 20 |
| MAD1L1 | 10.02104 | 0.527423 | 19 |
| ZNF423 | 3.349011 | 0.176264 | 19 |
| CFAP46 | 2.950856 | 0.155308 | 19 |
| SMG1P2 | 2.053511 | 0.10808 | 19 |
| BOLA2 | 2.053511 | 0.10808 | 19 |
| LOC613038 | 2.053511 | 0.10808 | 19 |
| KCNQ1 | 1.872165 | 0.098535 | 19 |
| FOXK1 | 3.115821 | 0.173101 | 18 |
| ANKRD11 | 2.45527 | 0.136404 | 18 |
| SEPTIN9 | 1.799112 | 0.099951 | 18 |
| OPCML | 3.581783 | 0.210693 | 17 |
| FOXP1 | 3.24319 | 0.202699 | 16 |
| GLI2 | 6.248451 | 0.416563 | 15 |
| KNDC1 | 5.155305 | 0.343687 | 15 |
| BAIAP2 | 3.131474 | 0.208765 | 15 |
| KIRREL3 | 2.629434 | 0.175296 | 15 |
| LRMDA | 1.991942 | 0.132796 | 15 |
| ZBTB20 | 1.813691 | 0.120913 | 15 |
| RPS6KA2 | 6.042836 | 0.431631 | 14 |
| IQSEC1 | 2.371576 | 0.169398 | 14 |
| CUX1 | 2.200599 | 0.157186 | 14 |
| MSI2 | 4.261561 | 0.327812 | 13 |
| GSE1 | 2.42283 | 0.186372 | 13 |
| RFX4 | 2.042377 | 0.157106 | 13 |
| CLYBL | 1.986742 | 0.152826 | 13 |
| MYT1L | 1.894854 | 0.145758 | 13 |
| FBRSL1 | 2.967181 | 0.247265 | 12 |
| MEGF6 | 2.13011 | 0.177509 | 12 |
| ADGRD1 | 2.11279 | 0.176066 | 12 |
| ZC3H3 | 2.061065 | 0.171755 | 12 |
| MAML3 | 1.949386 | 0.162449 | 12 |
| RASA3 | 1.929851 | 0.160821 | 12 |
| COL4A1 | 2.574608 | 0.234055 | 11 |
| ZC3H12D | 1.892763 | 0.172069 | 11 |
| ESR1 | 1.792318 | 0.162938 | 11 |
| AKAP13 | 2.77468 | 0.277468 | 10 |
| SH3RF3 | 2.737184 | 0.273718 | 10 |
| TSPAN4 | 2.500322 | 0.250032 | 10 |
| KLHL29 | 2.492991 | 0.249299 | 10 |
| IGF1R | 2.051063 | 0.205106 | 10 |
| ACOT7 | 1.938008 | 0.193801 | 10 |
| SND1 | 2.848127 | 0.316459 | 9 |
| CACNA2D4 | 2.749816 | 0.305535 | 9 |
| MGMT | 2.501468 | 0.277941 | 9 |
| KCNMA1 | 1.810327 | 0.201147 | 9 |
| DLEU1 | 2.865375 | 0.358172 | 8 |
| CRISPLD2 | 2.669829 | 0.333729 | 8 |
| SYNJ2 | 2.371457 | 0.296432 | 8 |
| MACROD1 | 2.280948 | 0.285119 | 8 |
| TRAPPC9 | 2.117258 | 0.264657 | 8 |
| VRK2 | 2.064327 | 0.258041 | 8 |
| AFF3 | 2.032248 | 0.254031 | 8 |
| WWP2 | 2.029504 | 0.253688 | 8 |
| CDH4 | 1.948911 | 0.243614 | 8 |
| LINC00311 | 1.834155 | 0.229269 | 8 |
| CACHD1 | 1.801775 | 0.225222 | 8 |
| C19orf25 | 3.067579 | 0.438226 | 7 |
| GAK | 2.484219 | 0.354888 | 7 |
| LINC01749 | 2.383224 | 0.340461 | 7 |
| FOXP4 | 1.929913 | 0.275702 | 7 |
| TRIM2 | 1.835568 | 0.262224 | 7 |
| FBXL18 | 3.350944 | 0.558491 | 6 |
| ANKS1A | 2.362196 | 0.393699 | 6 |
| STRA6 | 2.263036 | 0.377173 | 6 |
| CRADD | 2.148496 | 0.358083 | 6 |
| RUNDC3A | 4.048412 | 0.809682 | 5 |
| BCAR1 | 2.566179 | 0.513236 | 5 |
| TSNAX-DISC1 | 2.53612 | 0.507224 | 5 |
| VAV2 | 2.223338 | 0.444668 | 5 |
| TK1 | 2.093538 | 0.418708 | 5 |
| ARHGEF7 | 2.014566 | 0.402913 | 5 |
| OLFM1 | 2.567071 | 0.641768 | 4 |
| DICER1 | 2.027828 | 0.675943 | 3 |
| KLHL26 | 1.803271 | 0.60109 | 3 |
| TBC1D7 | 1.799689 | 0.599896 | 3 |
| DISC1 | 2.624109 | 1.312055 | 2 |
| RNF216 | 1.834681 | 0.917341 | 2 |

TABLE 14
Cancer Type CPC_A

| Gene site | imp_sum | imp_mean | n |
|---|---|---|---|
| PTPRN2 | 16.00842 | 0.195225 | 82 |
| PRDM16 | 17.72925 | 0.249708 | 71 |
| PCDHGA1 | 4.050169 | 0.068647 | 59 |
| PCDHGA2 | 4.050169 | 0.071056 | 57 |
| PCDHGA3 | 3.749203 | 0.06943 | 54 |
| PCDHGB1 | 3.432817 | 0.06477 | 53 |
| PCDHGA4 | 3.432817 | 0.06731 | 51 |
| HDAC4 | 17.89076 | 0.483534 | 37 |
| PAX6 | 7.824002 | 0.223543 | 35 |
| RBFOX3 | 4.83382 | 0.138109 | 35 |
| DIP2C | 6.771467 | 0.211608 | 32 |
| SOX2-OT | 8.34411 | 0.287728 | 29 |
| GALNT9 | 6.145555 | 0.227613 | 27 |
| SHANK2 | 5.143475 | 0.197826 | 26 |
| AGAP1 | 11.69691 | 0.467877 | 25 |
| PDGFRA | 7.713638 | 0.308546 | 25 |
| CAMTA1 | 7.140097 | 0.285604 | 25 |
| SATB2 | 6.589201 | 0.27455 | 24 |
| RPTOR | 12.02057 | 0.522634 | 23 |
| NXN | 9.125426 | 0.396758 | 23 |
| INPP5A | 7.926578 | 0.344634 | 23 |
| NCOR2 | 7.898032 | 0.343393 | 23 |
| RIMBP2 | 5.93563 | 0.258071 | 23 |
| PRKCZ | 6.332177 | 0.287826 | 22 |
| SKI | 9.294558 | 0.442598 | 21 |
| ZIC4 | 5.636609 | 0.26841 | 21 |
| SDK1 | 6.150119 | 0.307506 | 20 |
| FRMD4A | 4.477427 | 0.223871 | 20 |
| MAD1L1 | 11.13833 | 0.586228 | 19 |
| ZNF423 | 6.304675 | 0.331825 | 19 |
| SMG1P2 | 4.879903 | 0.256837 | 19 |
| BOLA2 | 4.879903 | 0.256837 | 19 |
| LOC613038 | 4.879903 | 0.256837 | 19 |
| CASZ1 | 4.189655 | 0.220508 | 19 |
| KCNQ1 | 3.413829 | 0.179675 | 19 |
| FOXK1 | 6.901213 | 0.383401 | 18 |
| SEPTIN9 | 5.266403 | 0.292578 | 18 |
| ANKRD11 | 3.946175 | 0.219232 | 18 |
| PAX6-AS1 | 4.201016 | 0.247119 | 17 |
| RCN1 | 4.201016 | 0.247119 | 17 |
| OPCML | 3.583486 | 0.210793 | 17 |
| HBG2 | 3.561709 | 0.209512 | 17 |
| EBF3 | 4.986091 | 0.311631 | 16 |
| SORBS2 | 4.218948 | 0.263684 | 16 |
| NAV2 | 4.216962 | 0.26356 | 16 |
| FOXP1 | 3.885851 | 0.242866 | 16 |
| SLX1B- | 4.717464 | 0.314498 | 15 |
| SULT1A4 | | | |
| SLX1A | 4.717464 | 0.314498 | 15 |
| LOC606724 | 4.717464 | 0.314498 | 15 |
| KIRREL3 | 4.545293 | 0.30302 | 15 |
| LRMDA | 4.192857 | 0.279524 | 15 |
| GLI2 | 4.087578 | 0.272505 | 15 |
| BAIAP2 | 3.473124 | 0.231542 | 15 |
| IQSEC1 | 6.528853 | 0.466347 | 14 |
| MIR548F5 | 6.386218 | 0.456158 | 14 |
| RPS6KA2 | 5.41149 | 0.386535 | 14 |
| CUX1 | 5.263852 | 0.375989 | 14 |
| C7orf50 | 4.43927 | 0.317091 | 14 |
| ARHGEF10 | 4.314892 | 0.308207 | 14 |
| PRKAG2 | 3.594082 | 0.25672 | 14 |
| MSI2 | 5.326164 | 0.409705 | 13 |
| RFX4 | 3.666617 | 0.282047 | 13 |
| GSE1 | 3.615205 | 0.278093 | 13 |
| GNA12 | 4.872908 | 0.406076 | 12 |
| CMIP | 4.719319 | 0.393277 | 12 |
| ZC3H3 | 4.661378 | 0.388448 | 12 |
| MAML3 | 4.122071 | 0.343506 | 12 |
| TNS3 | 3.910643 | 0.325887 | 12 |
| FBRSL1 | 3.519862 | 0.293322 | 12 |
| CTBP2 | 4.266982 | 0.387907 | 11 |
| RAD51B | 3.992868 | 0.362988 | 11 |
| ANAPC16 | 3.804301 | 0.345846 | 11 |
| VGLLA | 3.651058 | 0.331914 | 11 |
| NR5A2 | 4.686618 | 0.468662 | 10 |
| AKAP13 | 4.170628 | 0.417063 | 10 |
| NBEA | 3.853657 | 0.385366 | 10 |
| TSPAN4 | 3.472743 | 0.347274 | 10 |
| EBF1 | 3.38921 | 0.338921 | 10 |
| ANKS1B | 3.359524 | 0.335952 | 10 |
| SND1 | 6.548215 | 0.727579 | 9 |
| ADAMTS2 | 4.747935 | 0.527548 | 9 |
| TSPAN9 | 4.682856 | 0.520317 | 9 |
| ATP11A | 4.673193 | 0.519244 | 9 |
| TRAPPC12 | 3.411332 | 0.379037 | 9 |
| VRK2 | 6.497503 | 0.812188 | 8 |
| LINC00311 | 4.600767 | 0.575096 | 8 |
| MSRA | 4.151404 | 0.518926 | 8 |
| SYNJ2 | 4.120538 | 0.515067 | 8 |
| DLEU1 | 4.017219 | 0.502152 | 8 |
| MCIDAS | 3.434927 | 0.429366 | 8 |
| MIR548H4 | 4.040935 | 0.577276 | 7 |
| NAV1 | 3.918137 | 0.559734 | 7 |
| RXRA | 3.704701 | 0.529243 | 7 |
| GAK | 3.380035 | 0.482862 | 7 |
| CRADD | 4.051051 | 0.675175 | 6 |
| ARHGAP18 | 3.476569 | 0.579428 | 6 |
| ARHGEF7 | 4.898215 | 0.979643 | 5 |
| RUNDC3A | 4.211512 | 0.842302 | 5 |
| NDRG4 | 3.330074 | 0.666015 | 5 |
| CHTF18 | 4.714201 | 2.3571 | 2 |

TABLE 15
Cancer Type CPC_B

| Gene site | imp_sum | imp_mean | n |
|---|---|---|---|
| PTPRN2 | 3.995573 | 0.048726 | 82 |
| PCDHGA1 | 4.32325 | 0.073275 | 59 |
| PCDHGA2 | 4.32325 | 0.075846 | 57 |
| PCDHGA3 | 4.006864 | 0.074201 | 54 |
| PCDHGB1 | 4.006864 | 0.075601 | 53 |
| PCDHGA4 | 4.006864 | 0.078566 | 51 |
| PCDHGB2 | 3.374092 | 0.068859 | 49 |
| PCDHGA5 | 3.374092 | 0.071789 | 47 |
| PCDHGB3 | 2.531088 | 0.058863 | 43 |
| PCDHGA6 | 2.531088 | 0.063277 | 40 |
| HDAC4 | 3.015967 | 0.081513 | 37 |
| PCDHGA7 | 2.531088 | 0.068408 | 37 |
| PCDHGB4 | 2.531088 | 0.072317 | 35 |
| PCDHGA8 | 2.531088 | 0.072317 | 35 |
| RBFOX3 | 1.87321 | 0.05352 | 35 |
| DIP2C | 2.239472 | 0.069984 | 32 |
| PCDHGB5 | 1.898316 | 0.059322 | 32 |
| PCDHGA9 | 1.898316 | 0.061236 | 31 |
| PCDHGB6 | 1.58193 | 0.054549 | 29 |
| PCDHGA10 | 1.58193 | 0.056498 | 28 |
| AGAP1 | 2.988213 | 0.119529 | 25 |
| CAMTA1 | 2.533234 | 0.101329 | 25 |
| RPTOR | 3.283683 | 0.142769 | 23 |
| NXN | 1.518958 | 0.066042 | 23 |
| HOXB3 | 1.488788 | 0.06473 | 23 |
| SIM2 | 1.812383 | 0.086304 | 21 |
| SKI | 1.525215 | 0.072629 | 21 |
| SDK1 | 1.998018 | 0.099901 | 20 |
| MAD1L1 | 4.696756 | 0.247198 | 19 |
| SMG1P2 | 2.474409 | 0.130232 | 19 |
| BOLA2 | 2.474409 | 0.130232 | 19 |
| LOC613038 | 2.474409 | 0.130232 | 19 |
| FOXK1 | 2.382865 | 0.132381 | 18 |
| TBX15 | 2.255946 | 0.132703 | 17 |
| FOXP1 | 2.77394 | 0.173371 | 16 |
| SORBS2 | 1.712981 | 0.107061 | 16 |
| GLI2 | 1.673968 | 0.111598 | 15 |
| CUX1 | 3.02004 | 0.215717 | 14 |
| C7orf50 | 1.96638 | 0.140456 | 14 |
| GSE1 | 2.337064 | 0.179774 | 13 |
| MYT1L | 2.080863 | 0.160066 | 13 |
| MAML3 | 1.713439 | 0.142787 | 12 |
| ADGRD1 | 1.684387 | 0.140366 | 12 |
| CCDC140 | 2.964768 | 0.269524 | 11 |
| FGFR2 | 2.171443 | 0.197404 | 11 |
| RAD51B | 1.737753 | 0.157978 | 11 |
| LBX1-AS1 | 2.690424 | 0.269042 | 10 |
| TFAP2B | 2.118207 | 0.211821 | 10 |
| AKAP13 | 1.830847 | 0.183085 | 10 |
| ACOT7 | 1.631082 | 0.163108 | 10 |
| WT1 | 1.593231 | 0.159323 | 10 |
| BCL11B | 1.588108 | 0.158811 | 10 |
| TSPAN4 | 1.538438 | 0.153844 | 10 |
| SND1 | 3.245597 | 0.360622 | 9 |
| ZNF833P | 3.156911 | 0.350768 | 9 |
| PAX3 | 2.274132 | 0.252681 | 9 |
| ATP11A | 2.166285 | 0.240698 | 9 |
| KCNH2 | 2.02368 | 0.224853 | 9 |
| CACNA2D4 | 1.837571 | 0.204175 | 9 |
| TRAPPC12 | 1.681783 | 0.186865 | 9 |
| TSPAN9 | 1.574946 | 0.174994 | 9 |
| MSRA | 2.697729 | 0.337216 | 8 |
| MACROD1 | 2.641009 | 0.330126 | 8 |
| VRK2 | 2.342444 | 0.292806 | 8 |
| DNMT3A | 2.147233 | 0.268404 | 8 |
| SYNJ2 | 1.672535 | 0.209067 | 8 |
| PPP2R2B | 1.66247 | 0.207809 | 8 |
| RORA | 1.527647 | 0.190956 | 8 |
| SHROOM3 | 1.407036 | 0.17588 | 8 |
| LINC00461 | 2.12156 | 0.30308 | 7 |
| HOTAIR | 1.935889 | 0.276556 | 7 |
| ITPK1 | 1.647546 | 0.235364 | 7 |
| MIR548H4 | 1.469684 | 0.209955 | 7 |
| RXRA | 1.445779 | 0.20654 | 7 |
| PAX1 | 3.520315 | 0.586719 | 6 |
| COLEC11 | 2.263679 | 0.37728 | 6 |
| SLC22A18AS | 2.124858 | 0.354143 | 6 |
| FBXL18 | 1.670225 | 0.278371 | 6 |
| RUNDC3A | 2.723196 | 0.544639 | 5 |
| TSNAX-DISC1 | 2.175881 | 0.435176 | 5 |
| CASP8 | 1.593029 | 0.318606 | 5 |
| MLC1 | 2.23873 | 0.559683 | 4 |
| GSG1 | 1.790305 | 0.447576 | 4 |
| IGSF21 | 1.765871 | 0.441468 | 4 |
| GRHL2 | 1.718594 | 0.429648 | 4 |
| DTNA | 1.632281 | 0.40807 | 4 |
| FLJ12825 | 1.600283 | 0.400071 | 4 |
| TUBA1C | 1.482734 | 0.370684 | 4 |
| VOPP1 | 1.451522 | 0.36288 | 4 |
| CAPG | 1.412244 | 0.353061 | 4 |
| KCNIP1 | 1.712071 | 0.57069 | 3 |
| DICER1 | 1.670578 | 0.556859 | 3 |
| HOTTIP | 1.55145 | 0.51715 | 3 |
| SLC6A9 | 1.45193 | 0.483977 | 3 |
| BFSP2 | 1.441111 | 0.48037 | 3 |
| CHTF18 | 3.676269 | 1.838134 | 2 |
| TRIM65 | 2.778116 | 1.389058 | 2 |
| TSPAN14 | 1.626202 | 0.813101 | 2 |
| SLC25A10 | 1.562957 | 0.781479 | 2 |
| C6orf223 | 1.553416 | 1.553416 | 1 |

TABLE 16
Cancer Type CPH_ADM

| Gene site | imp_sum | imp_mean | n |
|---|---|---|---|
| PTPRN2 | 12.29209 | 0.149904 | 82 |
| PRDM16 | 11.69095 | 0.164661 | 71 |
| PCDHGA1 | 4.493803 | 0.076166 | 59 |
| PCDHGA2 | 4.177417 | 0.073288 | 57 |
| PCDHGA3 | 3.544645 | 0.065642 | 54 |
| PCDHGB1 | 3.544645 | 0.06688 | 53 |
| PCDHGA4 | 3.544645 | 0.069503 | 51 |
| HDAC4 | 14.58025 | 0.394061 | 37 |
| RBFOX3 | 7.388665 | 0.211105 | 35 |
| PAX6 | 4.641956 | 0.132627 | 35 |
| DIP2C | 8.478668 | 0.264958 | 32 |
| SOX2-OT | 4.977386 | 0.171634 | 29 |
| SHANK2 | 6.65119 | 0.255815 | 26 |
| AGAP1 | 8.820289 | 0.352812 | 25 |
| CAMTA1 | 6.518146 | 0.260726 | 25 |
| PDGFRA | 4.49589 | 0.179836 | 25 |
| RPTOR | 10.7314 | 0.466583 | 23 |
| NCOR2 | 6.327405 | 0.275105 | 23 |
| NXN | 5.500813 | 0.239166 | 23 |
| RIMBP2 | 4.098597 | 0.1782 | 23 |
| INPP5A | 3.38079 | 0.146991 | 23 |
| PRKCZ | 5.020701 | 0.228214 | 22 |
| SKI | 8.543431 | 0.40683 | 21 |
| ABR | 4.556746 | 0.227837 | 20 |
| FRMD4A | 4.506761 | 0.225338 | 20 |
| SDK1 | 3.860832 | 0.193042 | 20 |
| MAD1L1 | 14.50828 | 0.763594 | 19 |
| SMG1P2 | 5.448495 | 0.286763 | 19 |
| BOLA2 | 5.448495 | 0.286763 | 19 |
| LOC613038 | 5.448495 | 0.286763 | 19 |
| CASZ1 | 5.147721 | 0.270933 | 19 |
| ZNF423 | 4.71975 | 0.248408 | 19 |
| KCNQ1 | 3.549108 | 0.186795 | 19 |
| FOXK1 | 5.453911 | 0.302995 | 18 |
| SEPTIN9 | 4.703173 | 0.261287 | 18 |
| TBC1D16 | 3.984165 | 0.221342 | 18 |
| ANKRD11 | 3.756247 | 0.20868 | 18 |
| OPCML | 4.20818 | 0.24754 | 17 |
| HBG2 | 3.602584 | 0.211917 | 17 |
| FOXP1 | 6.343187 | 0.396449 | 16 |
| NAV2 | 3.50163 | 0.218852 | 16 |
| GLI2 | 6.478656 | 0.43191 | 15 |
| KIRREL3 | 4.649562 | 0.309971 | 15 |
| NFIX | 3.772506 | 0.2515 | 15 |
| BAIAP2 | 3.692668 | 0.246178 | 15 |
| ZBTB20 | 3.549662 | 0.236644 | 15 |
| RPS6KA2 | 7.461138 | 0.532938 | 14 |
| IQSEC1 | 5.061474 | 0.361534 | 14 |
| CUX1 | 4.846724 | 0.346195 | 14 |
| ARHGEF10 | 4.598722 | 0.32848 | 14 |
| C7orf50 | 3.766058 | 0.269004 | 14 |
| MOB2 | 3.730462 | 0.266462 | 14 |
| MSI2 | 5.49049 | 0.422345 | 13 |
| GSE1 | 4.094565 | 0.314967 | 13 |
| MYT1L | 3.791384 | 0.291645 | 13 |
| RFX4 | 3.533487 | 0.271807 | 13 |
| CMIP | 5.387646 | 0.44897 | 12 |
| ZC3H3 | 4.529418 | 0.377451 | 12 |
| FBRSL1 | 4.508729 | 0.375727 | 12 |
| GNA12 | 4.186371 | 0.348864 | 12 |
| RASA3 | 3.47519 | 0.289599 | 12 |
| VGLLA | 4.800447 | 0.436404 | 11 |
| TBCD | 3.965128 | 0.360466 | 11 |
| CTBP2 | 3.827094 | 0.347918 | 11 |
| FGFR2 | 3.47253 | 0.315685 | 11 |
| RAD51B | 3.396735 | 0.308794 | 11 |
| TSPAN4 | 3.432232 | 0.343223 | 10 |
| KLHL29 | 3.36824 | 0.336824 | 10 |
| SND1 | 5.50511 | 0.611679 | 9 |
| ATP11A | 5.258679 | 0.584298 | 9 |
| TSPAN9 | 4.32151 | 0.480168 | 9 |
| CACNA2D4 | 4.154955 | 0.461662 | 9 |
| MGMT | 3.560993 | 0.395666 | 9 |
| AXIN2 | 3.380254 | 0.375584 | 9 |
| NOTCH1 | 3.374999 | 0.375 | 9 |
| LINC00311 | 5.384992 | 0.673124 | 8 |
| VRK2 | 4.874748 | 0.609343 | 8 |
| AFF3 | 3.800927 | 0.475116 | 8 |
| DNMT3A | 3.791412 | 0.473927 | 8 |
| MSRA | 3.519684 | 0.439961 | 8 |
| NAV1 | 4.601684 | 0.657383 | 7 |
| MIR548H4 | 4.217779 | 0.60254 | 7 |
| C19orf25 | 4.178021 | 0.59686 | 7 |
| GAK | 3.726453 | 0.53235 | 7 |
| VPS13D | 3.699749 | 0.528536 | 7 |
| CRADD | 3.663532 | 0.610589 | 6 |
| FBXL18 | 3.652621 | 0.60877 | 6 |
| MYO16 | 3.51998 | 0.586663 | 6 |
| SLC22A18AS | 3.508111 | 0.584685 | 6 |
| KDM4B | 3.339818 | 0.556636 | 6 |
| RERE | 3.31663 | 0.552772 | 6 |
| TSNAX-DISC1 | 4.961219 | 0.992244 | 5 |
| ARHGEF7 | 4.614511 | 0.922902 | 5 |
| RUNDC3A | 4.443008 | 0.888602 | 5 |
| NHSL1 | 3.883288 | 0.970822 | 4 |
| GSG1 | 3.562403 | 0.890601 | 4 |
| DAGLB | 3.468613 | 1.156204 | 3 |
| SLC25A10 | 3.744963 | 1.872481 | 2 |
| ANKLE2 | 3.742803 | 1.871401 | 2 |
| CHTF18 | 3.59738 | 1.79869 | 2 |

TABLE 17
Cancer Type CPH_PAP

| Gene site | imp_sum | imp_mean | n |
|---|---|---|---|
| PTPRN2 | 15.76305 | 0.192232 | 82 |
| PRDM16 | 13.67823 | 0.192651 | 71 |
| PCDHGA1 | 5.703731 | 0.096673 | 59 |
| PCDHGA2 | 6.020117 | 0.105616 | 57 |
| PCDHGA3 | 5.703731 | 0.105625 | 54 |
| PCDHGB1 | 5.703731 | 0.107618 | 53 |
| PCDHGA4 | 5.387345 | 0.105634 | 51 |
| PCDHGB2 | 5.387345 | 0.109946 | 49 |
| PCDHGA5 | 5.387345 | 0.114624 | 47 |
| PCDHGB3 | 5.387345 | 0.125287 | 43 |
| PCDHGA6 | 4.987145 | 0.124679 | 40 |
| HDAC4 | 20.3413 | 0.549765 | 37 |
| PCDHGA7 | 4.54013 | 0.122706 | 37 |
| PAX6 | 9.788933 | 0.279684 | 35 |
| RBFOX3 | 5.926882 | 0.169339 | 35 |
| PCDHGB4 | 4.54013 | 0.129718 | 35 |
| PCDHGA8 | 4.54013 | 0.129718 | 35 |
| DIP2C | 10.39729 | 0.324915 | 32 |
| PCDHGB5 | 4.54013 | 0.141879 | 32 |
| PCDHGA9 | 4.54013 | 0.146456 | 31 |
| SOX2-OT | 6.276694 | 0.216438 | 29 |
| PCDHGB6 | 4.093199 | 0.141145 | 29 |
| PCDHGA10 | 4.093199 | 0.146186 | 28 |
| SHANK2 | 6.600753 | 0.253875 | 26 |
| ADARB2 | 4.821925 | 0.185459 | 26 |
| AGAP1 | 12.15099 | 0.48604 | 25 |
| CAMTA1 | 7.096096 | 0.283844 | 25 |
| PDGFRA | 6.559998 | 0.2624 | 25 |
| RPTOR | 13.67435 | 0.594537 | 23 |
| NXN | 8.651145 | 0.376137 | 23 |
| NCOR2 | 8.222368 | 0.357494 | 23 |
| RIMBP2 | 4.835142 | 0.210224 | 23 |
| PRKCZ | 5.785762 | 0.262989 | 22 |
| SKI | 7.781461 | 0.370546 | 21 |
| FRMD4A | 5.631758 | 0.281588 | 20 |
| SDK1 | 5.359402 | 0.26797 | 20 |
| ABR | 4.898258 | 0.244913 | 20 |
| MAD1L1 | 12.41947 | 0.653656 | 19 |
| ZNF423 | 5.52617 | 0.290851 | 19 |
| SMG1P2 | 5.363616 | 0.282296 | 19 |
| BOLA2 | 5.363616 | 0.282296 | 19 |
| LOC613038 | 5.363616 | 0.282296 | 19 |
| CASZ1 | 5.225511 | 0.275027 | 19 |
| KCNQ1 | 4.215948 | 0.221892 | 19 |
| FOXK1 | 7.879019 | 0.437723 | 18 |
| TBC1D16 | 6.176091 | 0.343116 | 18 |
| MCF2L | 5.990435 | 0.332802 | 18 |
| PAX6-AS1 | 4.363491 | 0.256676 | 17 |
| RCN1 | 4.363491 | 0.256676 | 17 |
| OPCML | 4.322223 | 0.254248 | 17 |
| FOXP1 | 7.606903 | 0.475431 | 16 |
| NAV2 | 5.920485 | 0.37003 | 16 |
| EBF3 | 4.823856 | 0.301491 | 16 |
| SORBS2 | 4.427937 | 0.276746 | 16 |
| GLI2 | 6.928675 | 0.461912 | 15 |
| KIRREL3 | 5.898037 | 0.393202 | 15 |
| ZBTB20 | 5.401269 | 0.360085 | 15 |
| SLX1B- | 4.904351 | 0.326957 | 15 |
| SULT1A4 | | | |
| SLX1A | 4.904351 | 0.326957 | 15 |
| LOC606724 | 4.904351 | 0.326957 | 15 |
| BAIAP2 | 4.79365 | 0.319577 | 15 |
| NFIX | 4.373374 | 0.291558 | 15 |
| RPS6KA2 | 6.634642 | 0.473903 | 14 |
| C7orf50 | 6.268865 | 0.447776 | 14 |
| CUX1 | 6.209467 | 0.443533 | 14 |
| IQSEC1 | 5.122236 | 0.365874 | 14 |
| PRKAG2 | 4.918648 | 0.351332 | 14 |
| MSI2 | 7.371489 | 0.567038 | 13 |
| MYTIL | 4.530897 | 0.348531 | 13 |
| GSE1 | 4.466342 | 0.343565 | 13 |
| RFX4 | 4.465521 | 0.343502 | 13 |
| CMIP | 7.333738 | 0.611145 | 12 |
| FBRSL1 | 5.930377 | 0.494198 | 12 |
| GNA12 | 5.617094 | 0.468091 | 12 |
| ZC3H3 | 5.118353 | 0.426529 | 12 |
| RAD51B | 5.26413 | 0.478557 | 11 |
| TBCD | 4.663455 | 0.42395 | 11 |
| CTBP2 | 4.094029 | 0.372184 | 11 |
| CHST11 | 4.802943 | 0.480294 | 10 |
| AKAP13 | 4.651205 | 0.46512 | 10 |
| ACOT7 | 4.501323 | 0.450132 | 10 |
| TSPAN4 | 4.229275 | 0.422928 | 10 |
| SND1 | 7.744689 | 0.860521 | 9 |
| ATP11A | 6.174457 | 0.686051 | 9 |
| TRAPPC12 | 5.034399 | 0.559378 | 9 |
| ADAMTS2 | 4.879392 | 0.542155 | 9 |
| TSPAN9 | 4.564063 | 0.507118 | 9 |
| LINC00311 | 5.309574 | 0.663697 | 8 |
| MSRA | 4.863272 | 0.607909 | 8 |
| VRK2 | 4.291413 | 0.536427 | 8 |
| C19orf25 | 5.576676 | 0.796668 | 7 |
| NAV1 | 4.89231 | 0.698901 | 7 |
| MIR548H4 | 4.148861 | 0.592694 | 7 |
| STK10 | 4.361242 | 0.726874 | 6 |
| SLC22A18AS | 4.298423 | 0.716404 | 6 |
| CRADD | 4.076431 | 0.679405 | 6 |
| TSNAX-DISC1 | 5.131162 | 1.026232 | 5 |
| KLHL25 | 4.900367 | 0.980073 | 5 |
| RUNDC3A | 4.785457 | 0.957091 | 5 |
| NHSL1 | 4.953431 | 1.238358 | 4 |

TABLE 18
Cancer Type CPP_AD

| Gene site | imp_sum | imp_mean | n |
|---|---|---|---|
| PTPRN2 | 11.31281 | 0.137961 | 82 |
| PRDM16 | 13.74184 | 0.193547 | 71 |
| PCDHGA1 | 3.610679 | 0.061198 | 59 |
| PCDHGA2 | 3.294293 | 0.057795 | 57 |
| PCDHGA3 | 2.977907 | 0.055146 | 54 |
| PCDHGB1 | 2.977907 | 0.056187 | 53 |
| PCDHGA4 | 2.977907 | 0.05839 | 51 |
| PCDHGB2 | 2.977907 | 0.060774 | 49 |
| PCDHGA5 | 2.977907 | 0.06336 | 47 |
| PCDHGB3 | 3.294293 | 0.076611 | 43 |
| PCDHGA6 | 2.977907 | 0.074448 | 40 |
| HDAC4 | 12.8492 | 0.347276 | 37 |
| PCDHGA7 | 2.977907 | 0.080484 | 37 |
| RBFOX3 | 5.853322 | 0.167238 | 35 |
| DIP2C | 9.700563 | 0.303143 | 32 |
| SOX2-OT | 3.208169 | 0.110627 | 29 |
| GALNT9 | 3.005051 | 0.111298 | 27 |
| SHANK2 | 5.434307 | 0.209012 | 26 |
| AGAP1 | 6.813914 | 0.272557 | 25 |
| CAMTA1 | 3.302831 | 0.132113 | 25 |
| MEIS1 | 5.0502 | 0.210425 | 24 |
| RPTOR | 11.01185 | 0.478776 | 23 |
| NXN | 6.149227 | 0.267358 | 23 |
| NCOR2 | 5.110155 | 0.222181 | 23 |
| PRKCZ | 5.866388 | 0.266654 | 22 |
| SKI | 10.44832 | 0.497539 | 21 |
| ZIC4 | 3.92162 | 0.186744 | 21 |
| FRMD4A | 4.297019 | 0.214851 | 20 |
| ABR | 3.536087 | 0.176804 | 20 |
| MAD1L1 | 8.027724 | 0.422512 | 19 |
| CASZ1 | 4.119798 | 0.216831 | 19 |
| ZNF423 | 4.010193 | 0.211063 | 19 |
| SMG1P2 | 2.998275 | 0.157804 | 19 |
| BOLA2 | 2.998275 | 0.157804 | 19 |
| LOC613038 | 2.998275 | 0.157804 | 19 |
| FOXK1 | 4.862215 | 0.270123 | 18 |
| TBC1D16 | 4.487671 | 0.249315 | 18 |
| SEPTIN9 | 4.384937 | 0.243608 | 18 |
| ANKRD11 | 3.167504 | 0.175972 | 18 |
| OPCML | 5.13777 | 0.302222 | 17 |
| FOXP1 | 5.439543 | 0.339971 | 16 |
| EBF3 | 4.678157 | 0.292385 | 16 |
| NAV2 | 4.315649 | 0.269728 | 16 |
| SORBS2 | 3.006473 | 0.187905 | 16 |
| NFIX | 4.173358 | 0.278224 | 15 |
| GLI2 | 3.837164 | 0.255811 | 15 |
| BAIAP2 | 3.482668 | 0.232178 | 15 |
| KIRREL3 | 3.370273 | 0.224685 | 15 |
| NFATC1 | 3.068066 | 0.204538 | 15 |
| RPS6KA2 | 5.846022 | 0.417573 | 14 |
| CUX1 | 4.552806 | 0.3252 | 14 |
| PRKAG2 | 4.5192 | 0.3228 | 14 |
| MIR548F5 | 3.732932 | 0.266638 | 14 |
| TBX5 | 3.406149 | 0.243296 | 14 |
| C7orf50 | 3.159648 | 0.225689 | 14 |
| GNG7 | 3.099068 | 0.221362 | 14 |
| MYT1L | 3.688104 | 0.2837 | 13 |
| GSE1 | 3.54579 | 0.272753 | 13 |
| MSI2 | 3.162515 | 0.24327 | 13 |
| CMIP | 3.815283 | 0.31794 | 12 |
| GNA12 | 3.335193 | 0.277933 | 12 |
| TNS3 | 3.209968 | 0.267497 | 12 |
| ADGRD1 | 3.129744 | 0.260812 | 12 |
| MIRLET7BHG | 3.055175 | 0.254598 | 12 |
| ZC3H12D | 3.93079 | 0.357345 | 11 |
| RAD51B | 3.279301 | 0.298118 | 11 |
| SPON2 | 3.277534 | 0.297958 | 11 |
| VGLL4 | 3.177852 | 0.288896 | 11 |
| FGFR2 | 3.173879 | 0.288534 | 11 |
| TSPAN4 | 3.933783 | 0.393378 | 10 |
| AKAP13 | 3.582406 | 0.358241 | 10 |
| KLHL29 | 3.303085 | 0.330308 | 10 |
| AUTS2 | 2.990605 | 0.29906 | 10 |
| SND1 | 6.386064 | 0.709563 | 9 |
| ATP11A | 4.668347 | 0.518705 | 9 |
| ADAMTS2 | 4.469375 | 0.496597 | 9 |
| TSPAN9 | 4.339742 | 0.482194 | 9 |
| TRAPPC12 | 3.951345 | 0.439038 | 9 |
| CACNA2D4 | 3.72499 | 0.413888 | 9 |
| GPC6 | 3.711232 | 0.412359 | 9 |
| KCNH2 | 3.473724 | 0.385969 | 9 |
| SSBP3 | 3.197893 | 0.355321 | 9 |
| RUNX1 | 3.146465 | 0.349607 | 9 |
| VRK2 | 4.205316 | 0.525664 | 8 |
| DLEU1 | 3.95583 | 0.494479 | 8 |
| PPP2R2B | 3.906005 | 0.488251 | 8 |
| MSRA | 3.845906 | 0.480738 | 8 |
| NAV1 | 3.707811 | 0.529687 | 7 |
| PITPNC1 | 3.328507 | 0.475501 | 7 |
| CXXC5 | 3.101939 | 0.443134 | 7 |
| LINC01140 | 3.012474 | 0.430353 | 7 |
| SLC22A18AS | 3.909045 | 0.651507 | 6 |
| CRADD | 3.165654 | 0.527609 | 6 |
| RUNDC3A | 4.433736 | 0.886747 | 5 |
| TSNAX-DISC1 | 3.732736 | 0.746547 | 5 |
| ARHGEF7 | 3.234689 | 0.646938 | 5 |
| EXT1 | 3.532838 | 0.88321 | 4 |
| CRB2 | 3.04556 | 0.76139 | 4 |
| KCNIP1 | 2.970068 | 0.990023 | 3 |
| TRIM65 | 3.537311 | 1.768656 | 2 |

TABLE 19
Cancer Type CPP_INF

| Gene site | imp_sum | imp_mean | n |
|---|---|---|---|
| PTPRN2 | 15.19001 | 0.185244 | 82 |
| PRDM16 | 14.43299 | 0.203282 | 71 |
| PCDHGA1 | 3.724804 | 0.063132 | 59 |
| PCDHGA2 | 3.408418 | 0.059797 | 57 |
| PCDHGA3 | 3.092032 | 0.05726 | 54 |
| PCDHGB1 | 3.092032 | 0.05834 | 53 |
| PCDHGB2 | 3.092032 | 0.063103 | 49 |
| HDAC4 | 10.31392 | 0.278755 | 37 |
| RBFOX3 | 6.644166 | 0.189833 | 35 |
| PAX6 | 3.977644 | 0.113647 | 35 |
| DIP2C | 5.98807 | 0.187127 | 32 |
| SOX2-OT | 4.371246 | 0.150733 | 29 |
| GALNT9 | 4.601184 | 0.170414 | 27 |
| SHANK2 | 4.820486 | 0.185403 | 26 |
| AGAP1 | 7.010968 | 0.280439 | 25 |
| CAMTA1 | 5.642138 | 0.225686 | 25 |
| RPTOR | 11.11451 | 0.48324 | 23 |
| NXN | 6.525128 | 0.283701 | 23 |
| RIMBP2 | 4.030315 | 0.175231 | 23 |
| NCOR2 | 3.582323 | 0.155753 | 23 |
| PRKCZ | 6.332197 | 0.287827 | 22 |
| SKI | 7.47976 | 0.356179 | 21 |
| ZIC4 | 4.477112 | 0.213196 | 21 |
| SDK1 | 4.570761 | 0.228538 | 20 |
| FRMD4A | 3.647532 | 0.182377 | 20 |
| ABR | 3.602999 | 0.18015 | 20 |
| MAD1L1 | 7.775015 | 0.409211 | 19 |
| ZNF423 | 5.623971 | 0.295998 | 19 |
| SMG1P2 | 4.520349 | 0.237913 | 19 |
| BOLA2 | 4.520349 | 0.237913 | 19 |
| LOC613038 | 4.520349 | 0.237913 | 19 |
| CASZ1 | 4.385646 | 0.230823 | 19 |
| KCNQ1 | 3.410898 | 0.179521 | 19 |
| FOXK1 | 4.972638 | 0.276258 | 18 |
| SEPTIN9 | 4.438428 | 0.246579 | 18 |
| OPCML | 3.528898 | 0.207582 | 17 |
| TBX15 | 3.24008 | 0.190593 | 17 |
| NAV2 | 6.568887 | 0.410555 | 16 |
| FOXP1 | 5.218166 | 0.326135 | 16 |
| EBF3 | 3.681068 | 0.230067 | 16 |
| GLI2 | 5.955313 | 0.397021 | 15 |
| KIRREL3 | 3.935595 | 0.262373 | 15 |
| ZBTB20 | 3.197168 | 0.213145 | 15 |
| BAIAP2 | 3.103791 | 0.206919 | 15 |
| RPS6KA2 | 5.853346 | 0.418096 | 14 |
| CUX1 | 5.323808 | 0.380272 | 14 |
| IQSEC1 | 3.75573 | 0.268266 | 14 |
| PRKAG2 | 3.191906 | 0.227993 | 14 |
| C7orf50 | 3.078872 | 0.219919 | 14 |
| CACNA1H | 2.971891 | 0.212278 | 14 |
| MSI2 | 5.777816 | 0.444447 | 13 |
| MYTIL | 3.567409 | 0.274416 | 13 |
| RFX4 | 3.279066 | 0.252236 | 13 |
| SPTBN4 | 3.22895 | 0.248381 | 13 |
| GSE1 | 3.121687 | 0.24013 | 13 |
| KIF26B | 2.894191 | 0.22263 | 13 |
| ADGRD1 | 4.78956 | 0.39913 | 12 |
| ZC3H3 | 4.638332 | 0.386528 | 12 |
| CMIP | 3.69183 | 0.307652 | 12 |
| MIRLET7BHG | 3.548295 | 0.295691 | 12 |
| MEGF6 | 3.341803 | 0.278484 | 12 |
| TNS3 | 3.257131 | 0.271428 | 12 |
| MAML3 | 2.939116 | 0.244926 | 12 |
| RAD51B | 4.043203 | 0.367564 | 11 |
| CTBP2 | 3.630376 | 0.330034 | 11 |
| VGLL4 | 3.285303 | 0.298664 | 11 |
| TBCD | 3.162087 | 0.287462 | 11 |
| SPON2 | 3.057463 | 0.277951 | 11 |
| TSPAN4 | 4.814937 | 0.481494 | 10 |
| AKAP13 | 3.798065 | 0.379806 | 10 |
| ACOT7 | 3.29048 | 0.329048 | 10 |
| KLHL29 | 3.284723 | 0.328472 | 10 |
| AUTS2 | 2.927169 | 0.292717 | 10 |
| SND1 | 6.036166 | 0.670685 | 9 |
| ATP11A | 4.604429 | 0.511603 | 9 |
| TSPAN9 | 3.7764 | 0.4196 | 9 |
| ADAMTS2 | 3.507534 | 0.389726 | 9 |
| KCNH2 | 3.472232 | 0.385804 | 9 |
| AXIN2 | 3.263217 | 0.36258 | 9 |
| CACNA2D4 | 3.066299 | 0.3407 | 9 |
| NOTCH1 | 2.973379 | 0.330375 | 9 |
| PPP2R2B | 4.877357 | 0.60967 | 8 |
| VRK2 | 4.873352 | 0.609169 | 8 |
| LINC00311 | 3.42386 | 0.427983 | 8 |
| GAK | 3.4657 | 0.4951 | 7 |
| MIR548H4 | 3.216472 | 0.459496 | 7 |
| RXRA | 3.162505 | 0.451786 | 7 |
| NAV1 | 3.044468 | 0.434924 | 7 |
| PACRG | 3.023698 | 0.431957 | 7 |
| SLC22A18AS | 3.344646 | 0.557441 | 6 |
| COLEC11 | 2.917414 | 0.486236 | 6 |
| RUNDC3A | 4.628337 | 0.925667 | 5 |
| TSNAX-DISC1 | 3.530465 | 0.706093 | 5 |
| PRR5L | 3.35567 | 0.671134 | 5 |
| ARHGEF7 | 3.14822 | 0.629644 | 5 |
| EXT1 | 3.444927 | 0.861232 | 4 |
| DAGLB | 3.089325 | 1.029775 | 3 |
| TRIM65 | 3.467956 | 1.733978 | 2 |
| SLC25A10 | 2.9975 | 1.49875 | 2 |
| ANKLE2 | 2.970224 | 1.485112 | 2 |

TABLE 20
Cancer Type CRINET

| Gene site | imp_sum | imp_mean | n |
|---|---|---|---|
| PTPRN2 | 10.96688 | 0.133742 | 82 |
| PRDM16 | 3.231634 | 0.045516 | 71 |
| HDAC4 | 9.014051 | 0.243623 | 37 |
| RBFOX3 | 2.723093 | 0.077803 | 35 |
| DIP2C | 5.186759 | 0.162086 | 32 |
| SOX2-OT | 2.214702 | 0.076369 | 29 |
| SHANK2 | 3.170026 | 0.121924 | 26 |
| AGAP1 | 6.532723 | 0.261309 | 25 |
| PDGFRA | 2.020678 | 0.080827 | 25 |
| CAMTA1 | 1.94058 | 0.077623 | 25 |
| MEIS1 | 2.337064 | 0.097378 | 24 |
| RPTOR | 5.3942 | 0.23453 | 23 |
| NXN | 3.022357 | 0.131407 | 23 |
| PRKCZ | 2.86389 | 0.130177 | 22 |
| SKI | 5.215756 | 0.248369 | 21 |
| FRMD4A | 3.17079 | 0.158539 | 20 |
| ABR | 2.662139 | 0.133107 | 20 |
| MAD1L1 | 4.844803 | 0.25499 | 19 |
| KCNQ1 | 2.893974 | 0.152314 | 19 |
| SMG1P2 | 2.681757 | 0.141145 | 19 |
| BOLA2 | 2.681757 | 0.141145 | 19 |
| LOC613038 | 2.681757 | 0.141145 | 19 |
| ZNF423 | 2.506076 | 0.131899 | 19 |
| CASZ1 | 2.414157 | 0.127061 | 19 |
| RBFOX1 | 4.229047 | 0.234947 | 18 |
| FOXK1 | 3.165101 | 0.175839 | 18 |
| MCF2L | 2.018677 | 0.112149 | 18 |
| SEPTIN9 | 1.986037 | 0.110335 | 18 |
| OPCML | 2.287588 | 0.134564 | 17 |
| FOXP1 | 2.606269 | 0.162892 | 16 |
| NAV2 | 2.149384 | 0.134336 | 16 |
| GLI2 | 4.099938 | 0.273329 | 15 |
| KIRREL3 | 3.891284 | 0.259419 | 15 |
| ZBTB20 | 3.184826 | 0.212322 | 15 |
| SLX1B- | 2.560456 | 0.170697 | 15 |
| SULT1A4 | | | |
| SLX1A | 2.560456 | 0.170697 | 15 |
| LOC606724 | 2.560456 | 0.170697 | 15 |
| BAIAP2 | 2.554968 | 0.170331 | 15 |
| LRMDA | 2.029367 | 0.135291 | 15 |
| RPS6KA2 | 4.199917 | 0.299994 | 14 |
| C7orf50 | 2.496931 | 0.178352 | 14 |
| CUX1 | 2.305252 | 0.164661 | 14 |
| IQSEC1 | 2.012079 | 0.14372 | 14 |
| MYTIL | 2.987968 | 0.229844 | 13 |
| MSI2 | 2.073547 | 0.159504 | 13 |
| CMIP | 4.596826 | 0.383069 | 12 |
| ADGRD1 | 2.993272 | 0.249439 | 12 |
| ZC3H3 | 2.864994 | 0.23875 | 12 |
| FBRSL1 | 2.627979 | 0.218998 | 12 |
| RAD51B | 2.654735 | 0.24134 | 11 |
| CTBP2 | 2.1824 | 0.1984 | 11 |
| AKAP13 | 2.799577 | 0.279958 | 10 |
| TSPAN4 | 2.775921 | 0.277592 | 10 |
| ACOT7 | 2.749893 | 0.274989 | 10 |
| SH3RF3 | 2.591023 | 0.259102 | 10 |
| RGS12 | 2.235544 | 0.223554 | 10 |
| ASIC2 | 1.994926 | 0.199493 | 10 |
| ADAMTS2 | 3.822137 | 0.424682 | 9 |
| SND1 | 3.643114 | 0.40479 | 9 |
| KCNH2 | 3.47615 | 0.386239 | 9 |
| ATP11A | 3.127011 | 0.347446 | 9 |
| RUNX1 | 2.356786 | 0.261865 | 9 |
| TRAPPC12 | 2.069967 | 0.229996 | 9 |
| CACNA2D4 | 2.067426 | 0.229714 | 9 |
| ASAP1 | 1.936216 | 0.215135 | 9 |
| DLEU1 | 3.183968 | 0.397996 | 8 |
| SYNJ2 | 2.551492 | 0.318936 | 8 |
| LINC00311 | 2.02507 | 0.253134 | 8 |
| MIR548H4 | 2.87209 | 0.410299 | 7 |
| NAV1 | 2.631564 | 0.375938 | 7 |
| VPS13D | 2.378957 | 0.339851 | 7 |
| TRIM2 | 2.313096 | 0.330442 | 7 |
| RXRA | 2.205592 | 0.315085 | 7 |
| CXXC5 | 2.127757 | 0.303965 | 7 |
| FBXL18 | 3.631538 | 0.605256 | 6 |
| CRADD | 2.401529 | 0.400255 | 6 |
| ANKS1A | 2.142732 | 0.357122 | 6 |
| FMNL2 | 1.920409 | 0.320068 | 6 |
| PRKCH | 1.886246 | 0.314374 | 6 |
| RUNDC3A | 3.235876 | 0.647175 | 5 |
| ARHGEF7 | 3.176019 | 0.635204 | 5 |
| ATXN7L1 | 2.714337 | 0.542867 | 5 |
| TSNAX-DISC1 | 2.582524 | 0.516505 | 5 |
| BACH2 | 2.486198 | 0.49724 | 5 |
| ATP2B4 | 2.417072 | 0.483414 | 5 |
| DNM3 | 2.151421 | 0.430284 | 5 |
| RAPGEF4 | 2.05881 | 0.411762 | 5 |
| TMEM132C | 1.994235 | 0.398847 | 5 |
| PRR5L | 1.891281 | 0.378256 | 5 |
| NHSL1 | 3.397888 | 0.849472 | 4 |
| IGSF21 | 2.815659 | 0.703915 | 4 |
| RBMS3 | 2.310324 | 0.577581 | 4 |
| DTNA | 2.266953 | 0.566738 | 4 |
| SLC6A9 | 2.544667 | 0.848222 | 3 |
| SPATA13 | 2.438531 | 0.812844 | 3 |
| DICER1 | 2.094806 | 0.698269 | 3 |
| RALGAPA2 | 3.044181 | 1.52209 | 2 |
| CACNA1D | 2.116989 | 1.058494 | 2 |
| SLC25A10 | 2.067739 | 1.033869 | 2 |
| RUBCN | 1.946876 | 1.946876 | 1 |

TABLE 21
Cancer Type DGONC

| Gene site | imp_sum | imp_mean | n |
|---|---|---|---|
| PTPRN2 | 13.13503 | 0.160183 | 82 |
| PRDM16 | 10.3477 | 0.145742 | 71 |
| HDAC4 | 11.05626 | 0.298818 | 37 |
| RBFOX3 | 8.461747 | 0.241764 | 35 |
| PAX6 | 6.129446 | 0.175127 | 35 |
| DIP2C | 6.563504 | 0.205109 | 32 |
| SOX2-OT | 6.35483 | 0.219132 | 29 |
| GALNT9 | 2.974276 | 0.110158 | 27 |
| SHANK2 | 4.935714 | 0.189835 | 26 |
| CAMTA1 | 6.542261 | 0.26169 | 25 |
| AGAP1 | 6.192129 | 0.247685 | 25 |
| PDGFRA | 5.486155 | 0.219446 | 25 |
| MEIS1 | 3.384971 | 0.14104 | 24 |
| RPTOR | 6.534565 | 0.284112 | 23 |
| HOXB3 | 3.613134 | 0.157093 | 23 |
| RIMBP2 | 3.415794 | 0.148513 | 23 |
| NXN | 2.923121 | 0.127092 | 23 |
| PRKCZ | 4.393011 | 0.199682 | 22 |
| SKI | 9.18904 | 0.437573 | 21 |
| FRMD4A | 5.480103 | 0.274005 | 20 |
| ABR | 3.264658 | 0.163233 | 20 |
| MAD1L1 | 10.47917 | 0.551535 | 19 |
| SMG1P2 | 7.187217 | 0.378275 | 19 |
| BOLA2 | 7.187217 | 0.378275 | 19 |
| LOC613038 | 7.187217 | 0.378275 | 19 |
| ZNF423 | 7.024963 | 0.369735 | 19 |
| CASZ1 | 4.495115 | 0.236585 | 19 |
| ANKRD11 | 4.490421 | 0.249468 | 18 |
| SEPTIN9 | 4.125948 | 0.229219 | 18 |
| FOXK1 | 4.076412 | 0.226467 | 18 |
| RBFOX1 | 3.121084 | 0.173394 | 18 |
| OPCML | 5.364502 | 0.315559 | 17 |
| FOXP1 | 5.925927 | 0.37037 | 16 |
| NAV2 | 3.796292 | 0.237268 | 16 |
| GLI2 | 9.47517 | 0.631678 | 15 |
| BAIAP2 | 3.763679 | 0.250912 | 15 |
| ZBTB20 | 3.758867 | 0.250591 | 15 |
| LRMDA | 3.368728 | 0.224582 | 15 |
| RPS6KA2 | 6.19269 | 0.442335 | 14 |
| PRKAG2 | 3.71711 | 0.265508 | 14 |
| C7orf50 | 3.299165 | 0.235655 | 14 |
| IQSEC1 | 3.229465 | 0.230676 | 14 |
| ARHGEF10 | 2.978949 | 0.212782 | 14 |
| MSI2 | 4.797151 | 0.369012 | 13 |
| MYTIL | 3.091459 | 0.237805 | 13 |
| CMIP | 5.628687 | 0.469057 | 12 |
| MEGF6 | 4.733266 | 0.394439 | 12 |
| ZC3H3 | 4.539162 | 0.378264 | 12 |
| MIRLET7BHG | 4.231054 | 0.352588 | 12 |
| FBRSL1 | 4.164398 | 0.347033 | 12 |
| CTNNA2 | 3.999547 | 0.333296 | 12 |
| TNS3 | 3.194033 | 0.266169 | 12 |
| ADGRD1 | 3.077153 | 0.256429 | 12 |
| RAD51B | 4.43364 | 0.403058 | 11 |
| VGLL4 | 3.615133 | 0.328648 | 11 |
| CTBP2 | 3.204323 | 0.291302 | 11 |
| FGFR2 | 2.960961 | 0.269178 | 11 |
| ACOT7 | 4.589562 | 0.458956 | 10 |
| ATP11A | 6.140285 | 0.682254 | 9 |
| SND1 | 5.557866 | 0.617541 | 9 |
| ASAP1 | 4.317153 | 0.479684 | 9 |
| AXIN2 | 4.179311 | 0.464368 | 9 |
| ADGRB1 | 3.586638 | 0.398515 | 9 |
| ADAMTS2 | 3.585293 | 0.398366 | 9 |
| TSPAN9 | 3.570083 | 0.396676 | 9 |
| TRAPPC12 | 3.478144 | 0.38646 | 9 |
| PACS2 | 3.445642 | 0.382849 | 9 |
| RUNX1 | 3.322449 | 0.369161 | 9 |
| CACNA2D4 | 3.235785 | 0.359532 | 9 |
| LINC00311 | 4.871942 | 0.608993 | 8 |
| GRIK2 | 3.741669 | 0.467709 | 8 |
| MSRA | 3.510317 | 0.43879 | 8 |
| RORA | 3.03757 | 0.379696 | 8 |
| DLEU1 | 3.024723 | 0.37809 | 8 |
| NAV1 | 4.171854 | 0.595979 | 7 |
| LINC00461 | 3.869468 | 0.552781 | 7 |
| DUSP6 | 3.7407 | 0.534386 | 7 |
| LINC01140 | 3.17112 | 0.453017 | 7 |
| CXXC5 | 3.156982 | 0.450997 | 7 |
| FBXL18 | 4.736061 | 0.789343 | 6 |
| KDM4B | 3.908086 | 0.651348 | 6 |
| MYO16 | 3.643539 | 0.607256 | 6 |
| CRADD | 3.620798 | 0.603466 | 6 |
| FAM181A | 3.100463 | 0.516744 | 6 |
| COQ8A | 2.955684 | 0.492614 | 6 |
| FMNL2 | 2.906814 | 0.484469 | 6 |
| RUNDC3A | 4.876724 | 0.975345 | 5 |
| TSNAX-DISC1 | 3.841281 | 0.768256 | 5 |
| ARHGEF7 | 3.637038 | 0.727408 | 5 |
| SLC8A2 | 3.142738 | 0.628548 | 5 |
| TEAD1 | 3.001606 | 0.600321 | 5 |
| RBMS3 | 4.49997 | 1.124992 | 4 |
| STAP2 | 3.308779 | 0.827195 | 4 |
| GRIN2B | 3.874143 | 1.291381 | 3 |
| SRRM3 | 3.759727 | 1.253242 | 3 |
| TTC12 | 3.117951 | 1.039317 | 3 |
| DAGLB | 2.897008 | 0.965669 | 3 |
| SOX10 | 4.815607 | 2.407804 | 2 |
| SLC25A10 | 3.451075 | 1.725538 | 2 |
| ANKLE2 | 3.363035 | 1.681517 | 2 |

TABLE 22
Cancer Type DLBCL

| Gene site | imp_sum | imp_mean | n |
|---|---|---|---|
| PTPRN2 | 7.35736 | 0.089724 | 82 |
| PRDM16 | 5.048598 | 0.071107 | 71 |
| PCDHGA1 | 2.529679 | 0.042876 | 59 |
| PCDHGA2 | 2.529679 | 0.04438 | 57 |
| PCDHGA3 | 2.529679 | 0.046846 | 54 |
| PCDHGB1 | 2.529679 | 0.04773 | 53 |
| PCDHGA4 | 2.213293 | 0.043398 | 51 |
| HDAC4 | 10.21894 | 0.276188 | 37 |
| PAX6 | 6.266407 | 0.17904 | 35 |
| RBFOX3 | 3.511339 | 0.100324 | 35 |
| DIP2C | 3.718857 | 0.116214 | 32 |
| SOX2-OT | 4.25213 | 0.146625 | 29 |
| SHANK2 | 2.849971 | 0.109614 | 26 |
| AGAP1 | 4.49937 | 0.179975 | 25 |
| PDGFRA | 2.749791 | 0.109992 | 25 |
| SATB2 | 3.286222 | 0.136926 | 24 |
| MEIS1 | 3.073452 | 0.128061 | 24 |
| INPP5A | 2.628684 | 0.114291 | 23 |
| NCOR2 | 2.577036 | 0.112045 | 23 |
| SKI | 5.349457 | 0.254736 | 21 |
| HOXA-AS3 | 3.448386 | 0.164209 | 21 |
| SIM2 | 2.978525 | 0.141835 | 21 |
| SDK1 | 2.685795 | 0.13429 | 20 |
| ABR | 2.520912 | 0.126046 | 20 |
| MAD1L1 | 7.437988 | 0.391473 | 19 |
| ZNF423 | 3.677587 | 0.193557 | 19 |
| CASZ1 | 3.599919 | 0.189469 | 19 |
| SMG1P2 | 2.65989 | 0.139994 | 19 |
| BOLA2 | 2.65989 | 0.139994 | 19 |
| LOC613038 | 2.65989 | 0.139994 | 19 |
| SEPTIN9 | 3.787837 | 0.210435 | 18 |
| FOXK1 | 3.702087 | 0.205671 | 18 |
| TBC1D16 | 2.563787 | 0.142433 | 18 |
| HOXA3 | 2.37731 | 0.132073 | 18 |
| TBX15 | 2.44435 | 0.143785 | 17 |
| EBF3 | 4.650985 | 0.290687 | 16 |
| FOXP1 | 2.433564 | 0.152098 | 16 |
| SLX1B- | 2.486581 | 0.165772 | 15 |
| SULT1A4 | | | |
| SLX1A | 2.486581 | 0.165772 | 15 |
| LOC606724 | 2.486581 | 0.165772 | 15 |
| CUX1 | 3.773402 | 0.269529 | 14 |
| IQSEC1 | 3.532998 | 0.252357 | 14 |
| RPS6KA2 | 3.149474 | 0.224962 | 14 |
| ARHGEF10 | 2.925318 | 0.208951 | 14 |
| PPP2R2A | 2.730323 | 0.195023 | 14 |
| TBX5 | 2.275259 | 0.162518 | 14 |
| SYCP2L | 2.187062 | 0.156219 | 14 |
| RFX4 | 3.210626 | 0.246971 | 13 |
| MSI2 | 2.979907 | 0.229224 | 13 |
| HOXA10- | 2.337064 | 0.179774 | 13 |
| HOXA9 | | | |
| CMIP | 4.129253 | 0.344104 | 12 |
| FBRSL1 | 3.906961 | 0.32558 | 12 |
| CTNNA2 | 3.079083 | 0.25659 | 12 |
| ISLR2 | 2.956629 | 0.246386 | 12 |
| ZC3H3 | 2.838728 | 0.236561 | 12 |
| GNA12 | 2.558761 | 0.21323 | 12 |
| ADGRD1 | 2.332938 | 0.194411 | 12 |
| MAML3 | 2.121208 | 0.176767 | 12 |
| ZC3H12D | 3.371605 | 0.30651 | 11 |
| RAD51B | 3.168855 | 0.288078 | 11 |
| GLUD1P2 | 2.92937 | 0.266306 | 11 |
| VGLL4 | 2.276061 | 0.206915 | 11 |
| ACOT7 | 4.342496 | 0.43425 | 10 |
| SKOR1 | 2.667111 | 0.266711 | 10 |
| AKAP13 | 2.526244 | 0.252624 | 10 |
| JUP | 2.2755 | 0.22755 | 10 |
| NR2F1-AS1 | 2.098752 | 0.209875 | 10 |
| ATP11A | 4.725982 | 0.525109 | 9 |
| SND1 | 3.979144 | 0.442127 | 9 |
| ADAMTS2 | 3.896946 | 0.432994 | 9 |
| MGMT | 2.34924 | 0.261027 | 9 |
| RUNX1 | 2.314993 | 0.257221 | 9 |
| VAX1 | 2.125157 | 0.236129 | 9 |
| LHX4 | 3.689458 | 0.461182 | 8 |
| MSRA | 3.232702 | 0.404088 | 8 |
| LMX1B | 2.456416 | 0.307052 | 8 |
| TRAPPC9 | 2.186304 | 0.273288 | 8 |
| CXXC5 | 3.199163 | 0.457023 | 7 |
| WWOX | 2.715789 | 0.38797 | 7 |
| ITPK1 | 2.388983 | 0.341283 | 7 |
| IQCE | 2.341671 | 0.334524 | 7 |
| LINC01140 | 2.282949 | 0.326136 | 7 |
| LDLRAD4 | 2.247761 | 0.321109 | 7 |
| VPS13D | 2.207715 | 0.315388 | 7 |
| CLDN10 | 2.124797 | 0.303542 | 7 |
| FBXL18 | 3.068542 | 0.511424 | 6 |
| FMNL2 | 2.730825 | 0.455137 | 6 |
| LRRFIP1 | 2.390845 | 0.398474 | 6 |
| MIR548G | 2.275784 | 0.379297 | 6 |
| LYPD1 | 2.127456 | 0.354576 | 6 |
| ARHGEF7 | 3.512343 | 0.702469 | 5 |
| CCR6 | 2.624993 | 0.524999 | 5 |
| AP2A2 | 2.257238 | 0.451448 | 5 |
| NHSL1 | 2.697164 | 0.674291 | 4 |
| SPTBN1 | 2.676614 | 0.669154 | 4 |
| DTNA | 2.447217 | 0.611804 | 4 |
| TBC1D7 | 2.617603 | 0.872534 | 3 |
| DICER1 | 2.396974 | 0.798991 | 3 |
| CDC42BPB | 2.22176 | 0.740587 | 3 |
| DAGLB | 2.118044 | 0.706015 | 3 |

TABLE 23
Cancer Type DLGNT_1

| Gene site | imp_sum | imp_mean | n |
|---|---|---|---|
| PTPRN2 | 17.73156 | 0.216239 | 82 |
| PRDM16 | 8.961345 | 0.126216 | 71 |
| PCDHGA1 | 3.540457 | 0.060008 | 59 |
| PCDHGA2 | 3.540457 | 0.062113 | 57 |
| PCDHGA3 | 3.115981 | 0.057703 | 54 |
| PCDHGB1 | 3.115981 | 0.058792 | 53 |
| PCDHGA4 | 3.432367 | 0.067301 | 51 |
| PCDHGB2 | 3.432367 | 0.070048 | 49 |
| PCDHGA5 | 3.432367 | 0.073029 | 47 |
| HDAC4 | 10.20179 | 0.275724 | 37 |
| PAX6 | 7.077885 | 0.202225 | 35 |
| RBFOX3 | 4.135104 | 0.118146 | 35 |
| DIP2C | 7.384183 | 0.230756 | 32 |
| SOX2-OT | 6.020509 | 0.207604 | 29 |
| GALNT9 | 3.126337 | 0.11579 | 27 |
| ADARB2 | 4.454864 | 0.171341 | 26 |
| SHANK2 | 3.51474 | 0.135182 | 26 |
| AGAP1 | 8.824816 | 0.352993 | 25 |
| PDGFRA | 4.565095 | 0.182604 | 25 |
| CAMTA1 | 3.907532 | 0.156301 | 25 |
| MEIS1 | 6.510303 | 0.271263 | 24 |
| SATB2 | 4.395429 | 0.183143 | 24 |
| HOXB3 | 10.90119 | 0.473965 | 23 |
| RPTOR | 7.373151 | 0.320572 | 23 |
| NCOR2 | 5.682337 | 0.247058 | 23 |
| INPP5A | 4.658587 | 0.202547 | 23 |
| NXN | 4.158511 | 0.180805 | 23 |
| RIMBP2 | 3.499651 | 0.152159 | 23 |
| SKI | 8.889427 | 0.423306 | 21 |
| FRMD4A | 5.673992 | 0.2837 | 20 |
| ABR | 4.382257 | 0.219113 | 20 |
| MAD1L1 | 8.172234 | 0.430118 | 19 |
| ZNF423 | 7.770215 | 0.408959 | 19 |
| SMG1P2 | 4.301612 | 0.226401 | 19 |
| BOLA2 | 4.301612 | 0.226401 | 19 |
| LOC613038 | 4.301612 | 0.226401 | 19 |
| FOXK1 | 5.49026 | 0.305014 | 18 |
| ANKRD11 | 4.019946 | 0.22333 | 18 |
| MCF2L | 3.058393 | 0.169911 | 18 |
| OPCML | 6.360814 | 0.374166 | 17 |
| NAV2 | 3.273524 | 0.204595 | 16 |
| GLI2 | 9.264765 | 0.617651 | 15 |
| BAIAP2 | 4.361371 | 0.290758 | 15 |
| EMX2OS | 2.952614 | 0.196841 | 15 |
| CACNA1H | 3.460287 | 0.247163 | 14 |
| C7orf50 | 3.304953 | 0.236068 | 14 |
| RPS6KA2 | 3.05343 | 0.218102 | 14 |
| CUX1 | 2.937762 | 0.20984 | 14 |
| MSI2 | 4.465639 | 0.343511 | 13 |
| GSE1 | 3.69265 | 0.28405 | 13 |
| KIF26B | 3.240362 | 0.249259 | 13 |
| MYTIL | 2.91326 | 0.224097 | 13 |
| CMIP | 5.886653 | 0.490554 | 12 |
| ZC3H3 | 3.878974 | 0.323248 | 12 |
| MIRLET7BHG | 3.866699 | 0.322225 | 12 |
| ADGRD1 | 3.850417 | 0.320868 | 12 |
| MAML3 | 3.735777 | 0.311315 | 12 |
| FGFR2 | 4.667649 | 0.424332 | 11 |
| RAD51B | 4.545562 | 0.413233 | 11 |
| GLUD1P2 | 3.061923 | 0.278357 | 11 |
| ZC3H12D | 3.043476 | 0.27668 | 11 |
| AKAP13 | 4.186819 | 0.418682 | 10 |
| KLHL29 | 4.089224 | 0.408922 | 10 |
| TSPAN4 | 3.372985 | 0.337299 | 10 |
| GRID1 | 3.178463 | 0.317846 | 10 |
| SND1 | 5.409044 | 0.601005 | 9 |
| ATP11A | 4.057139 | 0.450793 | 9 |
| TRAPPC12 | 3.789579 | 0.421064 | 9 |
| ASAP1 | 3.622777 | 0.402531 | 9 |
| TSPAN9 | 3.493469 | 0.388163 | 9 |
| AXIN2 | 3.097557 | 0.344173 | 9 |
| PACS2 | 2.99983 | 0.333314 | 9 |
| ADGRB1 | 2.994008 | 0.332668 | 9 |
| SLC22A18 | 2.950168 | 0.327796 | 9 |
| SSBP3 | 2.93931 | 0.32659 | 9 |
| NOTCH1 | 2.92436 | 0.324929 | 9 |
| ADAMTS2 | 2.919976 | 0.324442 | 9 |
| LINC00311 | 4.667601 | 0.58345 | 8 |
| GRIK2 | 3.593081 | 0.449135 | 8 |
| MSRA | 3.52281 | 0.440351 | 8 |
| DPP6 | 2.871326 | 0.358916 | 8 |
| DUSP6 | 5.050046 | 0.721435 | 7 |
| LINC00461 | 4.063855 | 0.580551 | 7 |
| NAV1 | 3.68482 | 0.526403 | 7 |
| HOXB-AS3 | 3.328612 | 0.475516 | 7 |
| FHIT | 3.055776 | 0.436539 | 7 |
| C19orf25 | 2.863584 | 0.409083 | 7 |
| FAM181A | 3.778152 | 0.629692 | 6 |
| COQ8A | 3.077893 | 0.512982 | 6 |
| CRADD | 2.969012 | 0.494835 | 6 |
| RUNDC3A | 4.806159 | 0.961232 | 5 |
| ARHGEF7 | 3.251554 | 0.650311 | 5 |
| PRR5L | 3.176393 | 0.635279 | 5 |
| TSNAX-DISC1 | 2.850348 | 0.57007 | 5 |
| RBMS3 | 3.900037 | 0.975009 | 4 |
| CRB2 | 3.186812 | 0.796703 | 4 |
| LINC00856 | 3.068772 | 0.767193 | 4 |
| GRIN2B | 3.258367 | 1.086122 | 3 |
| LOXL3 | 2.79616 | 0.932053 | 3 |
| SOX10 | 4.490155 | 2.245078 | 2 |

TABLE 24
Cancer Type DLGNT_2

| Gene site | imp_sum | imp_mean | n |
|---|---|---|---|
| PTPRN2 | 7.060492 | 0.086104 | 82 |
| PRDM16 | 6.311401 | 0.088893 | 71 |
| PCDHGA1 | 4.401863 | 0.074608 | 59 |
| PCDHGA2 | 4.401863 | 0.077226 | 57 |
| PCDHGA3 | 5.097912 | 0.094406 | 54 |
| PCDHGB1 | 5.097912 | 0.096187 | 53 |
| PCDHGA4 | 5.414298 | 0.106163 | 51 |
| PCDHGB2 | 5.414298 | 0.110496 | 49 |
| PCDHGA5 | 5.414298 | 0.115198 | 47 |
| PCDHGB3 | 4.336825 | 0.100856 | 43 |
| PCDHGA6 | 3.279577 | 0.081989 | 40 |
| HDAC4 | 5.169197 | 0.139708 | 37 |
| PCDHGA7 | 2.431053 | 0.065704 | 37 |
| PAX6 | 6.464383 | 0.184697 | 35 |
| PCDHGB4 | 2.431053 | 0.069459 | 35 |
| PCDHGA8 | 2.431053 | 0.069459 | 35 |
| RBFOX3 | 2.376116 | 0.067889 | 35 |
| DIP2C | 5.085695 | 0.158928 | 32 |
| SOX2-OT | 3.01975 | 0.104129 | 29 |
| GALNT9 | 3.107066 | 0.115077 | 27 |
| SHANK2 | 3.110309 | 0.119627 | 26 |
| AGAP1 | 6.999717 | 0.279989 | 25 |
| PDGFRA | 4.465416 | 0.178617 | 25 |
| SATB2 | 5.084407 | 0.21185 | 24 |
| MEIS1 | 3.433495 | 0.143062 | 24 |
| NXN | 4.316404 | 0.18767 | 23 |
| RPTOR | 3.892675 | 0.169247 | 23 |
| PRKCZ | 3.490803 | 0.158673 | 22 |
| SKI | 5.236229 | 0.249344 | 21 |
| FRMD4A | 4.39425 | 0.219713 | 20 |
| ABR | 2.5481 | 0.127405 | 20 |
| MAD1L1 | 6.792536 | 0.357502 | 19 |
| CASZ1 | 3.666051 | 0.19295 | 19 |
| SMG1P2 | 3.356343 | 0.17665 | 19 |
| BOLA2 | 3.356343 | 0.17665 | 19 |
| LOC613038 | 3.356343 | 0.17665 | 19 |
| ZNF423 | 2.657667 | 0.139877 | 19 |
| ANKRD11 | 4.535455 | 0.25197 | 18 |
| MCF2L | 4.054608 | 0.225256 | 18 |
| FOXK1 | 3.405545 | 0.189197 | 18 |
| OPCML | 5.077194 | 0.298658 | 17 |
| FOXP1 | 4.235477 | 0.264717 | 16 |
| SORBS2 | 2.589215 | 0.161826 | 16 |
| GLI2 | 4.691495 | 0.312766 | 15 |
| RPS6KA2 | 3.790283 | 0.270734 | 14 |
| CUX1 | 2.480754 | 0.177197 | 14 |
| IQSEC1 | 2.470793 | 0.176485 | 14 |
| MSI2 | 3.922805 | 0.301754 | 13 |
| MYT1L | 3.569878 | 0.274606 | 13 |
| MIR9-3HG | 2.559278 | 0.196868 | 13 |
| KIF26B | 2.340501 | 0.180039 | 13 |
| GSE1 | 2.253312 | 0.173332 | 13 |
| ADGRD1 | 3.133694 | 0.261141 | 12 |
| FBRSL1 | 2.796324 | 0.233027 | 12 |
| CMIP | 2.782287 | 0.231857 | 12 |
| TNS3 | 2.531411 | 0.210951 | 12 |
| MIRLET7BHG | 2.453634 | 0.20447 | 12 |
| RAD51B | 2.998745 | 0.272613 | 11 |
| SLC9A3 | 2.70451 | 0.245865 | 11 |
| SPON2 | 2.249612 | 0.20451 | 11 |
| LBX1-AS1 | 3.804831 | 0.380483 | 10 |
| GRID1 | 3.744038 | 0.374404 | 10 |
| AKAP13 | 3.081928 | 0.308193 | 10 |
| ACOT7 | 2.348144 | 0.234814 | 10 |
| SH3RF3 | 2.321484 | 0.232148 | 10 |
| NR2F1-AS1 | 2.227467 | 0.222747 | 10 |
| SND1 | 4.69145 | 0.521272 | 9 |
| ATP11A | 4.206191 | 0.467355 | 9 |
| NOTCH1 | 3.06654 | 0.340727 | 9 |
| ASAP1 | 2.962156 | 0.329128 | 9 |
| TSPAN9 | 2.632807 | 0.292534 | 9 |
| ADAMTS2 | 2.358105 | 0.262012 | 9 |
| KCNMA1 | 2.311715 | 0.256857 | 9 |
| CACNA2D4 | 2.278375 | 0.253153 | 9 |
| MSRA | 3.321819 | 0.415227 | 8 |
| ESRRG | 2.820181 | 0.352523 | 8 |
| HMGA2 | 2.564935 | 0.320617 | 8 |
| LINC00311 | 2.477684 | 0.309711 | 8 |
| DUSP6 | 3.322224 | 0.474603 | 7 |
| NAV1 | 3.275629 | 0.467947 | 7 |
| CDYL | 2.77406 | 0.396294 | 7 |
| TACC2 | 2.509948 | 0.358564 | 7 |
| VPS13D | 2.346989 | 0.335284 | 7 |
| TOX2 | 2.226045 | 0.318006 | 7 |
| FAM181A | 2.772031 | 0.462005 | 6 |
| SLC22A18AS | 2.612686 | 0.435448 | 6 |
| FMNL2 | 2.316991 | 0.386165 | 6 |
| WFIKKN2 | 2.263369 | 0.377228 | 6 |
| RUNDC3A | 3.855633 | 0.771127 | 5 |
| TSNAX-DISC1 | 3.171449 | 0.63429 | 5 |
| ARHGEF7 | 2.9695 | 0.5939 | 5 |
| STARD13 | 2.39862 | 0.479724 | 5 |
| RBMS3 | 2.645573 | 0.661393 | 4 |
| LINC00856 | 2.427806 | 0.606951 | 4 |
| VOPP1 | 2.323359 | 0.58084 | 4 |
| GRIN2B | 3.269344 | 1.089781 | 3 |
| DICER1 | 2.681425 | 0.893808 | 3 |
| TTC12 | 2.289017 | 0.763006 | 3 |
| SOX10 | 4.151197 | 2.075598 | 2 |
| SLC25A10 | 2.504357 | 1.252178 | 2 |

TABLE 25
Cancer Type DMG_EGFR

| Gene site | imp_sum | imp_mean | n |
|---|---|---|---|
| PTPRN2 | 15.85834 | 0.193394 | 82 |
| PRDM16 | 12.21921 | 0.172102 | 71 |
| PCDHGA1 | 6.245608 | 0.105858 | 59 |
| PCDHGA2 | 6.561994 | 0.115123 | 57 |
| PCDHGA3 | 5.929222 | 0.1098 | 54 |
| PCDHGB1 | 5.929222 | 0.111872 | 53 |
| PCDHGA4 | 5.612836 | 0.110056 | 51 |
| PCDHGB2 | 5.612836 | 0.114548 | 49 |
| PCDHGA5 | 5.29645 | 0.11269 | 47 |
| PCDHGB3 | 4.663678 | 0.108458 | 43 |
| PCDHGA6 | 4.085106 | 0.102128 | 40 |
| HDAC4 | 9.855461 | 0.266364 | 37 |
| PCDHGA7 | 4.085106 | 0.110408 | 37 |
| PAX6 | 8.05116 | 0.230033 | 35 |
| RBFOX3 | 4.758746 | 0.135964 | 35 |
| PCDHGB4 | 4.085106 | 0.116717 | 35 |
| PCDHGA8 | 4.085106 | 0.116717 | 35 |
| DIP2C | 4.051875 | 0.126621 | 32 |
| PCDHGB5 | 3.76872 | 0.117772 | 32 |
| PCDHGA9 | 3.452334 | 0.111366 | 31 |
| SOX2-OT | 6.608075 | 0.227865 | 29 |
| GALNT9 | 3.416686 | 0.126544 | 27 |
| ADARB2 | 6.029704 | 0.231912 | 26 |
| SHANK2 | 5.422076 | 0.208541 | 26 |
| AGAP1 | 6.047859 | 0.241914 | 25 |
| CAMTA1 | 5.252322 | 0.210093 | 25 |
| PDGFRA | 4.033234 | 0.161329 | 25 |
| SATB2 | 8.554768 | 0.356449 | 24 |
| MEIS1 | 3.819655 | 0.159152 | 24 |
| RPTOR | 8.828935 | 0.383867 | 23 |
| INPP5A | 5.385072 | 0.234134 | 23 |
| NCOR2 | 5.028779 | 0.218643 | 23 |
| NXN | 3.427883 | 0.149038 | 23 |
| SKI | 5.322244 | 0.25344 | 21 |
| FRMD4A | 3.658609 | 0.18293 | 20 |
| ABR | 3.419208 | 0.17096 | 20 |
| MAD1L1 | 8.348755 | 0.439408 | 19 |
| CASZ1 | 5.312578 | 0.279609 | 19 |
| ZNF423 | 4.896747 | 0.257724 | 19 |
| SMG1P2 | 4.675455 | 0.246077 | 19 |
| BOLA2 | 4.675455 | 0.246077 | 19 |
| LOC613038 | 4.675455 | 0.246077 | 19 |
| KCNQ1 | 3.153024 | 0.165949 | 19 |
| FOXK1 | 7.009082 | 0.389393 | 18 |
| SEPTIN9 | 4.708469 | 0.261582 | 18 |
| OPCML | 4.150794 | 0.244164 | 17 |
| PAX6-AS1 | 3.578693 | 0.210511 | 17 |
| RCN1 | 3.578693 | 0.210511 | 17 |
| FOXP1 | 4.90985 | 0.306866 | 16 |
| GLI2 | 9.248652 | 0.616577 | 15 |
| ZBTB20 | 3.101754 | 0.206784 | 15 |
| CUX1 | 3.980969 | 0.284355 | 14 |
| RPS6KA2 | 3.593044 | 0.256646 | 14 |
| SYCP2L | 3.104278 | 0.221734 | 14 |
| MSI2 | 4.747729 | 0.36521 | 13 |
| RFX4 | 4.046308 | 0.311254 | 13 |
| MYT1L | 3.388034 | 0.260618 | 13 |
| GSE1 | 3.351157 | 0.257781 | 13 |
| CLYBL | 3.188773 | 0.24529 | 13 |
| ISLR2 | 4.716973 | 0.393081 | 12 |
| TNS3 | 4.219632 | 0.351636 | 12 |
| CMIP | 3.56734 | 0.297278 | 12 |
| ZC3H3 | 3.444859 | 0.287072 | 12 |
| ADGRD1 | 3.195367 | 0.266281 | 12 |
| ZC3H12D | 4.377418 | 0.397947 | 11 |
| VGLL4 | 3.693413 | 0.335765 | 11 |
| ACOT7 | 4.221232 | 0.422123 | 10 |
| NR2F1-AS1 | 3.314474 | 0.331447 | 10 |
| GAS7 | 3.254024 | 0.325402 | 10 |
| IGF1R | 3.193725 | 0.319373 | 10 |
| SH3RF3 | 3.144937 | 0.314494 | 10 |
| OTX1 | 3.111864 | 0.311186 | 10 |
| NTM | 3.077721 | 0.307772 | 10 |
| ATP11A | 5.154603 | 0.572734 | 9 |
| SND1 | 4.57076 | 0.507862 | 9 |
| TSPAN9 | 4.039484 | 0.448832 | 9 |
| GPC6 | 3.707782 | 0.411976 | 9 |
| ADAMTS2 | 3.279404 | 0.364378 | 9 |
| APBA2 | 3.119427 | 0.346603 | 9 |
| ASAP1 | 3.082338 | 0.342482 | 9 |
| ESRRG | 4.257093 | 0.532137 | 8 |
| DLEU1 | 3.977631 | 0.497204 | 8 |
| LINC00311 | 3.497257 | 0.437157 | 8 |
| SHROOM3 | 3.441927 | 0.430241 | 8 |
| CACHD1 | 3.393871 | 0.424234 | 8 |
| NR2E1 | 3.173751 | 0.396719 | 8 |
| LRRC61 | 3.162027 | 0.395253 | 8 |
| MBP | 3.081164 | 0.385145 | 8 |
| RBM20 | 5.516208 | 0.78803 | 7 |
| DUSP6 | 4.582044 | 0.654578 | 7 |
| CDYL | 4.232254 | 0.604608 | 7 |
| SATB2-AS1 | 4.553871 | 0.758978 | 6 |
| LYPD1 | 3.684283 | 0.614047 | 6 |
| FAM181A | 3.570674 | 0.595112 | 6 |
| FBXL18 | 3.354561 | 0.559094 | 6 |
| ARHGEF7 | 3.328795 | 0.665759 | 5 |
| TSNAX-DISC1 | 3.270572 | 0.654114 | 5 |
| SOX10 | 3.962391 | 1.981196 | 2 |
| SLC25A10 | 3.492986 | 1.746493 | 2 |
| PITX3 | 3.419494 | 1.709747 | 2 |

TABLE 26
Cancer Type DMG_K27

| Gene site | imp_sum | imp_mean | n |
|---|---|---|---|
| PTPRN2 | 27.0199 | 0.329511 | 82 |
| PRDM16 | 16.37316 | 0.230608 | 71 |
| PCDHGA1 | 5.539625 | 0.093892 | 59 |
| PCDHGA2 | 5.223239 | 0.091636 | 57 |
| PCDHGA3 | 4.143029 | 0.076723 | 54 |
| PCDHGB1 | 4.143029 | 0.07817 | 53 |
| PCDHGA4 | 4.143029 | 0.081236 | 51 |
| PCDHGB2 | 4.143029 | 0.084552 | 49 |
| PCDHGA5 | 4.065802 | 0.086506 | 47 |
| HDAC4 | 10.96991 | 0.296484 | 37 |
| PAX6 | 10.49824 | 0.29995 | 35 |
| RBFOX3 | 9.787693 | 0.279648 | 35 |
| PCDHGB4 | 4.075303 | 0.116437 | 35 |
| PCDHGA8 | 4.075303 | 0.116437 | 35 |
| DIP2C | 8.807282 | 0.275228 | 32 |
| SOX2-OT | 9.756366 | 0.336426 | 29 |
| GALNT9 | 5.452091 | 0.201929 | 27 |
| SHANK2 | 7.383968 | 0.283999 | 26 |
| ADARB2 | 6.762464 | 0.260095 | 26 |
| AGAP1 | 8.206947 | 0.328278 | 25 |
| PDGFRA | 8.082227 | 0.323289 | 25 |
| CAMTA1 | 6.751014 | 0.270041 | 25 |
| SATB2 | 8.80167 | 0.366736 | 24 |
| MEIS1 | 6.106283 | 0.254428 | 24 |
| RPTOR | 10.21494 | 0.444128 | 23 |
| INPP5A | 5.743264 | 0.249707 | 23 |
| RIMBP2 | 4.992673 | 0.217073 | 23 |
| PRKCZ | 5.61555 | 0.255252 | 22 |
| SKI | 8.819106 | 0.419957 | 21 |
| SIM2 | 5.705069 | 0.27167 | 21 |
| FRMD4A | 6.527279 | 0.326364 | 20 |
| ABR | 5.269892 | 0.263495 | 20 |
| SDK1 | 3.978181 | 0.198909 | 20 |
| MAD1L1 | 11.64079 | 0.612673 | 19 |
| ZNF423 | 8.071874 | 0.424835 | 19 |
| SMG1P2 | 6.846055 | 0.360319 | 19 |
| BOLA2 | 6.846055 | 0.360319 | 19 |
| LOC613038 | 6.846055 | 0.360319 | 19 |
| CASZ1 | 6.291507 | 0.331132 | 19 |
| KCNQ1 | 4.355987 | 0.229262 | 19 |
| MCF2L | 5.979139 | 0.332174 | 18 |
| FOXK1 | 5.014289 | 0.278572 | 18 |
| SEPTIN9 | 4.42487 | 0.245826 | 18 |
| OPCML | 6.324302 | 0.372018 | 17 |
| FOXP1 | 6.538128 | 0.408633 | 16 |
| SORBS2 | 4.894695 | 0.305918 | 16 |
| NAV2 | 4.071884 | 0.254493 | 16 |
| GLI2 | 9.212083 | 0.614139 | 15 |
| BAIAP2 | 6.044562 | 0.402971 | 15 |
| ZBTB20 | 5.38983 | 0.359322 | 15 |
| LRMDA | 4.689959 | 0.312664 | 15 |
| SLX1B-SULT1A4 | 4.034964 | 0.268998 | 15 |
| SLX1A | 4.034964 | 0.268998 | 15 |
| LOC606724 | 4.034964 | 0.268998 | 15 |
| RPS6KA2 | 7.032418 | 0.502316 | 14 |
| PRKAG2 | 5.203722 | 0.371694 | 14 |
| CACNA1H | 4.995215 | 0.356801 | 14 |
| CUX1 | 4.433446 | 0.316675 | 14 |
| ARHGEF10 | 4.264465 | 0.304605 | 14 |
| MSI2 | 6.463358 | 0.497181 | 13 |
| MYT1L | 5.756885 | 0.442837 | 13 |
| GSE1 | 4.627927 | 0.355994 | 13 |
| MIRLET7BHG | 4.998906 | 0.416576 | 12 |
| CMIP | 4.933786 | 0.411149 | 12 |
| ZC3H3 | 4.313245 | 0.359437 | 12 |
| FBRSL1 | 4.041739 | 0.336812 | 12 |
| ZC3H12D | 6.425285 | 0.584117 | 11 |
| VGLL4 | 5.302111 | 0.48201 | 11 |
| GLUD1P2 | 5.213483 | 0.473953 | 11 |
| RAD51B | 4.828441 | 0.438949 | 11 |
| LBX1-AS1 | 6.635166 | 0.663517 | 10 |
| TFAP2A | 6.403444 | 0.640344 | 10 |
| NTM | 4.444618 | 0.444462 | 10 |
| ACOT7 | 4.423884 | 0.442388 | 10 |
| ATP11A | 6.416854 | 0.712984 | 9 |
| SND1 | 5.460144 | 0.606683 | 9 |
| ADGRB1 | 5.015126 | 0.557236 | 9 |
| TSPAN9 | 4.762758 | 0.529195 | 9 |
| TRAPPC12 | 4.673668 | 0.519296 | 9 |
| ASAP1 | 4.649147 | 0.516572 | 9 |
| ADAMTS2 | 4.59228 | 0.510253 | 9 |
| AXIN2 | 4.006386 | 0.445154 | 9 |
| LINC00311 | 4.851372 | 0.606421 | 8 |
| GRIK2 | 4.699392 | 0.587424 | 8 |
| MSRA | 4.565799 | 0.570725 | 8 |
| ESRRG | 4.179633 | 0.522454 | 8 |
| NXPH1 | 3.939175 | 0.492397 | 8 |
| RBM20 | 4.642311 | 0.663187 | 7 |
| LINC00461 | 4.476811 | 0.639544 | 7 |
| SOX6 | 4.441231 | 0.634462 | 7 |
| DUSP6 | 4.180105 | 0.597158 | 7 |
| FBXL18 | 4.11915 | 0.686525 | 6 |
| RUNDC3A | 5.093146 | 1.018629 | 5 |
| TSNAX-DISC1 | 4.796075 | 0.959215 | 5 |
| HHEX | 4.600647 | 0.920129 | 5 |
| LOC100132215 | 4.562513 | 0.912503 | 5 |
| STAP2 | 4.697057 | 1.174264 | 4 |
| RBMS3 | 4.522479 | 1.13062 | 4 |
| GRIN2B | 4.179322 | 1.393107 | 3 |
| SOX10 | 5.183544 | 2.591772 | 2 |

TABLE 27
Cancer Type DMT_SMARCB1

| Gene site | imp_sum | imp_mean | n |
|---|---|---|---|
| PTPRN2 | 5.17006 | 0.06305 | 82 |
| PRDM16 | 6.362014 | 0.089606 | 71 |
| PCDHGA1 | 5.844879 | 0.099066 | 59 |
| PCDHGA2 | 5.528493 | 0.096991 | 57 |
| PCDHGA3 | 5.528493 | 0.102379 | 54 |
| PCDHGB1 | 5.528493 | 0.104311 | 53 |
| PCDHGA4 | 5.528493 | 0.108402 | 51 |
| PCDHGB2 | 5.844879 | 0.119283 | 49 |
| PCDHGA5 | 5.528493 | 0.117628 | 47 |
| PCDHGB3 | 5.528493 | 0.12857 | 43 |
| PCDHGA6 | 4.773358 | 0.119334 | 40 |
| HDAC4 | 12.66161 | 0.342206 | 37 |
| PCDHGA7 | 5.089744 | 0.137561 | 37 |
| PCDHGB4 | 5.089744 | 0.145421 | 35 |
| PCDHGA8 | 5.089744 | 0.145421 | 35 |
| PAX6 | 4.859457 | 0.138842 | 35 |
| DIP2C | 7.547304 | 0.235853 | 32 |
| PCDHGB5 | 4.327758 | 0.135242 | 32 |
| PCDHGA9 | 4.327758 | 0.139605 | 31 |
| PCDHGB6 | 4.011372 | 0.138323 | 29 |
| SOX2-OT | 3.122386 | 0.107668 | 29 |
| PCDHGA10 | 4.011372 | 0.143263 | 28 |
| SHANK2 | 2.884832 | 0.110955 | 26 |
| AGAP1 | 9.038532 | 0.361541 | 25 |
| CAMTA1 | 4.948669 | 0.197947 | 25 |
| PDGFRA | 2.775512 | 0.11102 | 25 |
| PCDHGB7 | 3.694986 | 0.153958 | 24 |
| RPTOR | 7.462939 | 0.324476 | 23 |
| NCOR2 | 4.665983 | 0.202869 | 23 |
| INPP5A | 4.39195 | 0.190954 | 23 |
| PCDHGA11 | 3.694986 | 0.160652 | 23 |
| NXN | 2.795014 | 0.121522 | 23 |
| SKI | 7.436983 | 0.354142 | 21 |
| FRMD4A | 3.768225 | 0.188411 | 20 |
| SDK1 | 2.96255 | 0.148127 | 20 |
| ABR | 2.65345 | 0.132673 | 20 |
| MAD1L1 | 6.562907 | 0.345416 | 19 |
| ZNF423 | 4.355779 | 0.229252 | 19 |
| CASZ1 | 3.440739 | 0.181092 | 19 |
| KCNQ1 | 3.203313 | 0.168595 | 19 |
| SMG1P2 | 2.831309 | 0.149016 | 19 |
| BOLA2 | 2.831309 | 0.149016 | 19 |
| LOC613038 | 2.831309 | 0.149016 | 19 |
| FOXK1 | 7.395893 | 0.410883 | 18 |
| TBC1D16 | 3.543282 | 0.196849 | 18 |
| SEPTIN9 | 2.916372 | 0.162021 | 18 |
| ANKRD11 | 2.809903 | 0.156106 | 18 |
| EBF3 | 3.501225 | 0.218827 | 16 |
| BAIAP2 | 3.977481 | 0.265165 | 15 |
| GLI2 | 3.757937 | 0.250529 | 15 |
| KIRREL3 | 2.516101 | 0.16774 | 15 |
| RPS6KA2 | 4.560523 | 0.325752 | 14 |
| CUX1 | 3.824346 | 0.273168 | 14 |
| IQSEC1 | 3.614146 | 0.258153 | 14 |
| ARHGEF10 | 3.410766 | 0.243626 | 14 |
| PCDHGA12 | 3.3786 | 0.241329 | 14 |
| PRKAG2 | 2.733286 | 0.195235 | 14 |
| MSI2 | 2.809603 | 0.216123 | 13 |
| CMIP | 4.493421 | 0.374452 | 12 |
| ZC3H3 | 3.334721 | 0.277893 | 12 |
| FBRSL1 | 3.011552 | 0.250963 | 12 |
| GNA12 | 2.547348 | 0.212279 | 12 |
| RAD51B | 3.828061 | 0.348006 | 11 |
| FGFR2 | 3.088996 | 0.280818 | 11 |
| PCDHGC3 | 2.604336 | 0.236758 | 11 |
| TSPAN4 | 3.397272 | 0.339727 | 10 |
| CHST11 | 3.113301 | 0.31133 | 10 |
| FMN1 | 2.877649 | 0.287765 | 10 |
| MAML2 | 2.793081 | 0.279308 | 10 |
| AKAP13 | 2.737725 | 0.273772 | 10 |
| ATP11A | 5.858672 | 0.650964 | 9 |
| SND1 | 5.645283 | 0.627254 | 9 |
| TRAPPC12 | 3.39871 | 0.377634 | 9 |
| MGMT | 3.231188 | 0.359021 | 9 |
| KCNH2 | 2.502517 | 0.278057 | 9 |
| DNMT3A | 3.015792 | 0.376974 | 8 |
| VEPH1 | 2.685126 | 0.335641 | 8 |
| SMAD3 | 2.591666 | 0.323958 | 8 |
| RORA | 2.493642 | 0.311705 | 8 |
| GAK | 3.52123 | 0.503033 | 7 |
| C19orf25 | 3.213252 | 0.459036 | 7 |
| ITPKB | 3.073253 | 0.439036 | 7 |
| NAV1 | 2.840115 | 0.405731 | 7 |
| VPS13D | 2.710978 | 0.387283 | 7 |
| GLT8D2 | 3.456794 | 0.576132 | 6 |
| FBXL18 | 3.165773 | 0.527629 | 6 |
| CRADD | 2.900562 | 0.483427 | 6 |
| ANKS1A | 2.847804 | 0.474634 | 6 |
| SH3BP4 | 2.516224 | 0.419371 | 6 |
| COQ8A | 2.506326 | 0.417721 | 6 |
| RUNDC3A | 4.169424 | 0.833885 | 5 |
| ARHGEF7 | 3.675151 | 0.73503 | 5 |
| TSNAX-DISC1 | 3.532458 | 0.706492 | 5 |
| ATXN7L1 | 3.259591 | 0.651918 | 5 |
| BCAR1 | 2.875345 | 0.575069 | 5 |
| NPHP4 | 2.611543 | 0.522309 | 5 |
| NHSL1 | 3.377846 | 0.844462 | 4 |
| ABAT | 3.052387 | 0.763097 | 4 |
| SPATA13 | 2.604406 | 0.868135 | 3 |
| RALGAPA2 | 4.200075 | 2.100037 | 2 |

TABLE 28
Cancer Type DNET

| Gene site | imp_sum | imp_mean | n |
|---|---|---|---|
| PTPRN2 | 26.04532 | 0.317626 | 82 |
| PRDM16 | 17.79369 | 0.250615 | 71 |
| PCDHGA1 | 6.699804 | 0.113556 | 59 |
| PCDHGA2 | 6.383418 | 0.11199 | 57 |
| PCDHGA3 | 7.332576 | 0.135788 | 54 |
| PCDHGB1 | 7.332576 | 0.13835 | 53 |
| PCDHGA4 | 7.648962 | 0.14998 | 51 |
| PCDHGB2 | 7.648962 | 0.156101 | 49 |
| PCDHGA5 | 7.01619 | 0.149281 | 47 |
| PCDHGB3 | 6.699804 | 0.155809 | 43 |
| PCDHGA6 | 6.075185 | 0.15188 | 40 |
| HDAC4 | 14.4597 | 0.390803 | 37 |
| PCDHGA7 | 5.710249 | 0.154331 | 37 |
| PAX6 | 10.60999 | 0.303143 | 35 |
| RBFOX3 | 10.5905 | 0.302586 | 35 |
| PCDHGB4 | 5.435549 | 0.155301 | 35 |
| PCDHGA8 | 5.435549 | 0.155301 | 35 |
| DIP2C | 12.4335 | 0.388547 | 32 |
| SOX2-OT | 13.19713 | 0.455073 | 29 |
| SHANK2 | 6.302076 | 0.242388 | 26 |
| AGAP1 | 11.54586 | 0.461835 | 25 |
| CAMTA1 | 9.288115 | 0.371525 | 25 |
| PDGFRA | 8.112691 | 0.324508 | 25 |
| MEIS1 | 8.001583 | 0.333399 | 24 |
| SATB2 | 6.968141 | 0.290339 | 24 |
| RPTOR | 12.74644 | 0.554193 | 23 |
| NCOR2 | 8.19049 | 0.356108 | 23 |
| INPP5A | 6.71395 | 0.291911 | 23 |
| HOXB3 | 5.973479 | 0.259716 | 23 |
| NXN | 5.910295 | 0.256969 | 23 |
| PRKCZ | 8.038706 | 0.365396 | 22 |
| SKI | 13.61224 | 0.648202 | 21 |
| SIM2 | 7.657535 | 0.364645 | 21 |
| ZIC4 | 5.477019 | 0.26081 | 21 |
| FRMD4A | 9.657993 | 0.4829 | 20 |
| ABR | 7.607979 | 0.380399 | 20 |
| SDK1 | 6.329743 | 0.316487 | 20 |
| MAD1L1 | 13.60926 | 0.716277 | 19 |
| ZNF423 | 11.35844 | 0.597813 | 19 |
| SMG1P2 | 9.201404 | 0.484284 | 19 |
| BOLA2 | 9.201404 | 0.484284 | 19 |
| LOC613038 | 9.201404 | 0.484284 | 19 |
| FOXK1 | 8.735914 | 0.485329 | 18 |
| SEPTIN9 | 6.772426 | 0.376246 | 18 |
| MCF2L | 6.663531 | 0.370196 | 18 |
| TBC1D16 | 5.385253 | 0.299181 | 18 |
| OPCML | 8.057438 | 0.473967 | 17 |
| TBX15 | 5.724624 | 0.336743 | 17 |
| PAX6-AS1 | 5.605127 | 0.329713 | 17 |
| RCN1 | 5.605127 | 0.329713 | 17 |
| FOXP1 | 6.955576 | 0.434724 | 16 |
| SORBS2 | 5.457054 | 0.341066 | 16 |
| NAV2 | 5.057675 | 0.316105 | 16 |
| GLI2 | 12.35834 | 0.82389 | 15 |
| ZBTB20 | 6.868129 | 0.457875 | 15 |
| LRMDA | 5.440614 | 0.362708 | 15 |
| KIRREL3 | 5.046605 | 0.33644 | 15 |
| EMX2OS | 4.94183 | 0.329455 | 15 |
| IQSEC1 | 8.156287 | 0.582592 | 14 |
| RPS6KA2 | 6.561333 | 0.468667 | 14 |
| CUX1 | 6.051219 | 0.43223 | 14 |
| PRKAG2 | 4.96462 | 0.354616 | 14 |
| MSI2 | 8.776704 | 0.675131 | 13 |
| RFX4 | 6.597553 | 0.507504 | 13 |
| MYT1L | 5.581442 | 0.429342 | 13 |
| CMIP | 7.341354 | 0.61178 | 12 |
| ADGRD1 | 6.359399 | 0.52995 | 12 |
| ZC3H3 | 6.332313 | 0.527693 | 12 |
| MIRLET7BHG | 5.644003 | 0.470334 | 12 |
| CTNNA2 | 5.265326 | 0.438777 | 12 |
| RAD51B | 6.834098 | 0.621282 | 11 |
| VGLL4 | 5.941739 | 0.540158 | 11 |
| FGFR2 | 5.805118 | 0.527738 | 11 |
| CCDC140 | 5.399858 | 0.490896 | 11 |
| LBX1-AS1 | 6.466089 | 0.646609 | 10 |
| ACOT7 | 5.880168 | 0.588017 | 10 |
| SH3RF3 | 5.368831 | 0.536883 | 10 |
| AKAP13 | 5.073876 | 0.507388 | 10 |
| CHST11 | 4.895963 | 0.489596 | 10 |
| ATP11A | 6.921049 | 0.769005 | 9 |
| SND1 | 6.468896 | 0.718766 | 9 |
| KCNMA1 | 5.922196 | 0.658022 | 9 |
| NOTCH1 | 5.900979 | 0.655664 | 9 |
| ADGRB1 | 5.876715 | 0.652968 | 9 |
| TSPAN9 | 5.852712 | 0.650301 | 9 |
| TRAPPC12 | 5.310382 | 0.590042 | 9 |
| ASAP1 | 5.147062 | 0.571896 | 9 |
| RUNX1 | 5.012481 | 0.556942 | 9 |
| ADAMTS2 | 5.011711 | 0.556857 | 9 |
| LINC00311 | 5.629979 | 0.703747 | 8 |
| MSRA | 5.060013 | 0.632502 | 8 |
| DLEU1 | 5.004066 | 0.625508 | 8 |
| BAHCC1 | 4.914394 | 0.614299 | 8 |
| DUSP6 | 7.849487 | 1.121355 | 7 |
| LINC00461 | 6.097674 | 0.871096 | 7 |
| FBXL18 | 5.180878 | 0.86348 | 6 |
| RUNDC3A | 5.74448 | 1.148896 | 5 |
| TSNAX-DISC1 | 5.218257 | 1.043651 | 5 |
| RBMS3 | 5.248101 | 1.312025 | 4 |
| SOX10 | 5.594431 | 2.797216 | 2 |

TABLE 29
Cancer Type EFT_CIC

| Gene site | imp_sum | imp_mean | n |
|---|---|---|---|
| PTPRN2 | 15.69893 | 0.19145 | 82 |
| PRDM16 | 10.37322 | 0.146102 | 71 |
| PCDHGA1 | 3.849692 | 0.065249 | 59 |
| PCDHGA2 | 3.849692 | 0.067538 | 57 |
| PCDHGA3 | 4.296947 | 0.079573 | 54 |
| PCDHGB1 | 4.296947 | 0.081074 | 53 |
| PCDHGA4 | 4.296947 | 0.084254 | 51 |
| PCDHGB2 | 4.296947 | 0.087693 | 49 |
| PCDHGA5 | 4.296947 | 0.091424 | 47 |
| PCDHGB3 | 3.542328 | 0.08238 | 43 |
| HDAC4 | 20.06051 | 0.542176 | 37 |
| RBFOX3 | 7.234492 | 0.2067 | 35 |
| DIP2C | 9.369931 | 0.29281 | 32 |
| GALNT9 | 3.307723 | 0.122508 | 27 |
| AGAP1 | 11.98824 | 0.47953 | 25 |
| CAMTA1 | 6.759721 | 0.270389 | 25 |
| PDGFRA | 4.565291 | 0.182612 | 25 |
| MEIS1 | 3.306195 | 0.137758 | 24 |
| RPTOR | 14.38339 | 0.625365 | 23 |
| NCOR2 | 8.787906 | 0.382083 | 23 |
| RIMBP2 | 5.939037 | 0.258219 | 23 |
| INPP5A | 5.394275 | 0.234534 | 23 |
| NXN | 3.774468 | 0.164107 | 23 |
| PRKCZ | 4.532974 | 0.206044 | 22 |
| SKI | 9.570696 | 0.455747 | 21 |
| ZIC4 | 4.057271 | 0.193203 | 21 |
| FRMD4A | 6.351301 | 0.317565 | 20 |
| SDK1 | 3.556188 | 0.177809 | 20 |
| ABR | 3.35357 | 0.167679 | 20 |
| MAD1L1 | 11.30899 | 0.59521 | 19 |
| CASZ1 | 4.205329 | 0.221333 | 19 |
| KCNQ1 | 4.153197 | 0.218589 | 19 |
| SMG1P2 | 3.946729 | 0.207723 | 19 |
| BOLA2 | 3.946729 | 0.207723 | 19 |
| LOC613038 | 3.946729 | 0.207723 | 19 |
| FOXK1 | 9.052327 | 0.502907 | 18 |
| TBC1D16 | 7.005745 | 0.389208 | 18 |
| ANKRD11 | 4.84078 | 0.268932 | 18 |
| SEPTIN9 | 4.804021 | 0.26689 | 18 |
| OPCML | 4.784635 | 0.281449 | 17 |
| HBG2 | 3.396259 | 0.19978 | 17 |
| FOXP1 | 5.207881 | 0.325493 | 16 |
| EBF3 | 3.74803 | 0.234252 | 16 |
| NAV2 | 3.705764 | 0.23161 | 16 |
| GLI2 | 5.479074 | 0.365272 | 15 |
| ZBTB20 | 5.327162 | 0.355144 | 15 |
| NFIX | 3.577441 | 0.238496 | 15 |
| RPS6KA2 | 8.859121 | 0.632794 | 14 |
| CUX1 | 5.914514 | 0.422465 | 14 |
| IQSEC1 | 5.317055 | 0.37979 | 14 |
| PRKAG2 | 3.27492 | 0.233923 | 14 |
| MYT1L | 4.496364 | 0.345874 | 13 |
| MSI2 | 4.48584 | 0.345065 | 13 |
| GSE1 | 4.053829 | 0.311833 | 13 |
| GNA12 | 8.060213 | 0.671684 | 12 |
| ZC3H3 | 4.269692 | 0.355808 | 12 |
| CMIP | 3.859055 | 0.321588 | 12 |
| FBRSL1 | 3.514157 | 0.292846 | 12 |
| RASA3 | 3.397433 | 0.283119 | 12 |
| ISLR2 | 3.288839 | 0.27407 | 12 |
| VGLL4 | 4.146115 | 0.37692 | 11 |
| ZC3H12D | 4.014933 | 0.364994 | 11 |
| CTBP2 | 3.450046 | 0.313641 | 11 |
| TBCD | 3.342356 | 0.303851 | 11 |
| TSPAN4 | 5.379919 | 0.537992 | 10 |
| AKAP13 | 4.374475 | 0.437448 | 10 |
| ACOT7 | 4.174203 | 0.41742 | 10 |
| SH3RF3 | 3.868139 | 0.386814 | 10 |
| CHST11 | 3.349543 | 0.334954 | 10 |
| FMN1 | 3.297768 | 0.329777 | 10 |
| ETS1 | 3.294779 | 0.329478 | 10 |
| SND1 | 7.89485 | 0.877206 | 9 |
| ATP11A | 7.543381 | 0.838153 | 9 |
| TSPAN9 | 4.661157 | 0.517906 | 9 |
| ADAMTS2 | 4.265749 | 0.473972 | 9 |
| PACS2 | 4.158122 | 0.462014 | 9 |
| AXIN2 | 3.966172 | 0.440686 | 9 |
| CACNA2D4 | 3.653871 | 0.405986 | 9 |
| DLEU1 | 4.601812 | 0.575227 | 8 |
| MACROD1 | 3.917303 | 0.489663 | 8 |
| VRK2 | 3.883965 | 0.485496 | 8 |
| SMAD3 | 3.497736 | 0.437217 | 8 |
| DNMT3A | 3.26916 | 0.408645 | 8 |
| NAV1 | 5.350086 | 0.764298 | 7 |
| C19orf25 | 4.618985 | 0.659855 | 7 |
| GAK | 4.613203 | 0.659029 | 7 |
| VPS13D | 4.405545 | 0.629364 | 7 |
| CXXC5 | 4.085912 | 0.583702 | 7 |
| RXRA | 3.73027 | 0.532896 | 7 |
| FBXL18 | 4.445815 | 0.740969 | 6 |
| RADIL | 3.640124 | 0.606687 | 6 |
| SLC22A18AS | 3.310195 | 0.551699 | 6 |
| RUNDC3A | 4.686968 | 0.937394 | 5 |
| IDI2 | 4.480619 | 0.896124 | 5 |
| ARHGEF7 | 4.161226 | 0.832245 | 5 |
| TSNAX-DISC1 | 3.98883 | 0.797766 | 5 |
| TEAD1 | 3.752391 | 0.750478 | 5 |
| BACH2 | 3.39684 | 0.679368 | 5 |
| BCAR1 | 3.264798 | 0.65296 | 5 |
| LPCAT1 | 3.317234 | 0.829308 | 4 |

TABLE 30
Cancer Type EMB_ND_A

| Gene site | imp_sum | imp_mean | n |
|---|---|---|---|
| PTPRN2 | 6.81907 | 0.083159 | 82 |
| PRDM16 | 6.657308 | 0.093765 | 71 |
| HDAC4 | 2.10005 | 0.056758 | 37 |
| RBFOX3 | 2.716649 | 0.077619 | 35 |
| DIP2C | 2.712477 | 0.084765 | 32 |
| SOX2-OT | 1.898316 | 0.065459 | 29 |
| GALNT9 | 2.996064 | 0.110965 | 27 |
| SHANK2 | 1.976531 | 0.07602 | 26 |
| ADARB2 | 1.947008 | 0.074885 | 26 |
| CAMTA1 | 7.662871 | 0.306515 | 25 |
| AGAP1 | 3.756501 | 0.15026 | 25 |
| PDGFRA | 1.823498 | 0.07294 | 25 |
| SATB2 | 1.712981 | 0.071374 | 24 |
| NCOR2 | 3.21767 | 0.139899 | 23 |
| INPP5A | 2.483872 | 0.107994 | 23 |
| RIMBP2 | 1.898316 | 0.082535 | 23 |
| RPTOR | 1.837491 | 0.079891 | 23 |
| PRKCZ | 3.665876 | 0.166631 | 22 |
| FRMD4A | 2.923035 | 0.146152 | 20 |
| SDK1 | 2.866507 | 0.143325 | 20 |
| ABR | 2.14641 | 0.107321 | 20 |
| MAD1L1 | 10.86609 | 0.571899 | 19 |
| CASZ1 | 3.960455 | 0.208445 | 19 |
| SMG1P2 | 2.340821 | 0.123201 | 19 |
| BOLA2 | 2.340821 | 0.123201 | 19 |
| LOC613038 | 2.340821 | 0.123201 | 19 |
| KCNQ1 | 1.712981 | 0.090157 | 19 |
| CFAP46 | 1.704292 | 0.0897 | 19 |
| MCF2L | 2.826414 | 0.157023 | 18 |
| ANKRD11 | 2.77096 | 0.153942 | 18 |
| RBFOX1 | 2.604038 | 0.144669 | 18 |
| FOXK1 | 2.189679 | 0.121649 | 18 |
| TBC1D16 | 1.699622 | 0.094423 | 18 |
| BAIAP2 | 2.568393 | 0.171226 | 15 |
| NFIX | 2.442774 | 0.162852 | 15 |
| KIRREL3 | 1.630378 | 0.108692 | 15 |
| ARHGEF10 | 2.854761 | 0.203912 | 14 |
| IQSEC1 | 2.333749 | 0.166696 | 14 |
| PRKAG2 | 1.783804 | 0.127415 | 14 |
| MSI2 | 5.218074 | 0.40139 | 13 |
| CLYBL | 1.712981 | 0.131768 | 13 |
| FBRSL1 | 3.203264 | 0.266939 | 12 |
| ZC3H3 | 2.935532 | 0.244628 | 12 |
| CMIP | 2.058885 | 0.171574 | 12 |
| MEGF6 | 1.704495 | 0.142041 | 12 |
| RAD51B | 2.142947 | 0.194813 | 11 |
| ZC3H12D | 1.801775 | 0.163798 | 11 |
| AKAP13 | 2.707485 | 0.270749 | 10 |
| AUTS2 | 2.447964 | 0.244796 | 10 |
| SPPL2B | 1.898316 | 0.189832 | 10 |
| LMF1 | 1.699622 | 0.169962 | 10 |
| ADAMTS2 | 4.204788 | 0.467199 | 9 |
| SSBP3 | 2.535213 | 0.28169 | 9 |
| TRAPPC12 | 2.528214 | 0.280913 | 9 |
| ATP11A | 2.339968 | 0.259996 | 9 |
| GPC6 | 2.309533 | 0.256615 | 9 |
| TSPAN9 | 2.27613 | 0.252903 | 9 |
| CPNE4 | 1.626078 | 0.180675 | 9 |
| PPP2R2B | 2.901208 | 0.362651 | 8 |
| VRK2 | 2.560103 | 0.320013 | 8 |
| MSRA | 2.175092 | 0.271887 | 8 |
| MACROD1 | 2.015901 | 0.251988 | 8 |
| POU6F2 | 1.898316 | 0.237289 | 8 |
| DNMT3A | 1.853521 | 0.23169 | 8 |
| LINC00311 | 1.747994 | 0.218499 | 8 |
| ESRRG | 1.676804 | 0.2096 | 8 |
| PRKCA | 2.295029 | 0.327861 | 7 |
| PACRG | 2.279764 | 0.325681 | 7 |
| RXRA | 2.098188 | 0.299741 | 7 |
| TBR1 | 2.028354 | 0.289765 | 7 |
| PITPNC1 | 1.86804 | 0.266863 | 7 |
| MIR548H4 | 1.663976 | 0.237711 | 7 |
| NAV1 | 1.662738 | 0.237534 | 7 |
| IQCE | 1.633709 | 0.233387 | 7 |
| LHX2 | 1.622807 | 0.23183 | 7 |
| KDM4B | 2.039913 | 0.339986 | 6 |
| TSNAX-DISC1 | 3.035165 | 0.607033 | 5 |
| SNX29 | 2.269418 | 0.453884 | 5 |
| ARHGEF7 | 2.229606 | 0.445921 | 5 |
| CHN2 | 1.950905 | 0.390181 | 5 |
| TK1 | 1.933623 | 0.386725 | 5 |
| PRR5L | 1.854182 | 0.370836 | 5 |
| CCDC88C | 1.76954 | 0.353908 | 5 |
| SDK2 | 1.745977 | 0.349195 | 5 |
| GSG1 | 3.227564 | 0.806891 | 4 |
| TUBA1C | 3.217455 | 0.804364 | 4 |
| CPE | 1.630466 | 0.407616 | 4 |
| PARD3B | 1.625209 | 0.406302 | 4 |
| DICER1 | 2.028776 | 0.676259 | 3 |
| RASGRP3 | 1.741203 | 0.580401 | 3 |
| ANKLE2 | 3.330966 | 1.665483 | 2 |
| KIF21B | 2.313804 | 1.156902 | 2 |
| CHTF18 | 2.289967 | 1.144983 | 2 |
| DISC1 | 1.885237 | 0.942618 | 2 |
| SLC7A5 | 1.810281 | 0.90514 | 2 |
| SLC25A10 | 1.742511 | 0.871255 | 2 |
| ERI3 | 1.687948 | 0.843974 | 2 |
| DNAJC27 | 1.831026 | 1.831026 | 1 |
| ARL6IP6 | 1.658743 | 1.658743 | 1 |
| GTF2E2 | 1.613845 | 1.613845 | 1 |

TABLE 31
Cancer Type ENB

| Gene site | imp_sum | imp_mean | n |
|---|---|---|---|
| PTPRN2 | 15.29415 | 0.186514 | 82 |
| PRDM16 | 15.30242 | 0.215527 | 71 |
| HDAC4 | 17.79599 | 0.480973 | 37 |
| RBFOX3 | 10.28258 | 0.293788 | 35 |
| PAX6 | 4.405568 | 0.125873 | 35 |
| DIP2C | 8.96023 | 0.280007 | 32 |
| GALNT9 | 4.383891 | 0.162366 | 27 |
| SHANK2 | 7.017624 | 0.269909 | 26 |
| AGAP1 | 10.51418 | 0.420567 | 25 |
| CAMTA1 | 7.082051 | 0.283282 | 25 |
| SATB2 | 5.011261 | 0.208803 | 24 |
| MEIS1 | 4.017727 | 0.167405 | 24 |
| RPTOR | 8.723779 | 0.379295 | 23 |
| NXN | 7.212264 | 0.313577 | 23 |
| INPP5A | 6.465217 | 0.281096 | 23 |
| NCOR2 | 5.465209 | 0.237618 | 23 |
| RIMBP2 | 4.603744 | 0.200163 | 23 |
| PRKCZ | 5.805332 | 0.263879 | 22 |
| SKI | 8.012568 | 0.381551 | 21 |
| ZIC4 | 4.212597 | 0.2006 | 21 |
| HOXA-AS3 | 3.507593 | 0.167028 | 21 |
| ABR | 3.548115 | 0.177406 | 20 |
| FRMD4A | 3.209784 | 0.160489 | 20 |
| MAD1L1 | 7.124601 | 0.374979 | 19 |
| SMG1P2 | 6.130362 | 0.322651 | 19 |
| BOLA2 | 6.130362 | 0.322651 | 19 |
| LOC613038 | 6.130362 | 0.322651 | 19 |
| CASZ1 | 5.65431 | 0.297595 | 19 |
| KCNQ1 | 5.43857 | 0.286241 | 19 |
| ZNF423 | 4.858426 | 0.255707 | 19 |
| FOXK1 | 6.753271 | 0.375182 | 18 |
| MCF2L | 5.352531 | 0.297363 | 18 |
| ANKRD11 | 5.20414 | 0.289119 | 18 |
| HOXA3 | 4.506994 | 0.250389 | 18 |
| TBC1D16 | 4.213596 | 0.234089 | 18 |
| SEPTIN9 | 3.215852 | 0.178658 | 18 |
| RBFOX1 | 3.208115 | 0.178229 | 18 |
| OPCML | 4.373813 | 0.257283 | 17 |
| PAX6-AS1 | 3.665276 | 0.215604 | 17 |
| RCN1 | 3.665276 | 0.215604 | 17 |
| SORBS2 | 3.618661 | 0.226166 | 16 |
| FOXP1 | 3.471364 | 0.21696 | 16 |
| NAV2 | 3.225146 | 0.201572 | 16 |
| GLI2 | 5.610039 | 0.374003 | 15 |
| ZBTB20 | 4.909148 | 0.327277 | 15 |
| SLX1B-SULT1A4 | 4.84874 | 0.323249 | 15 |
| SLX1A | 4.84874 | 0.323249 | 15 |
| LOC606724 | 4.84874 | 0.323249 | 15 |
| BAIAP2 | 4.556419 | 0.303761 | 15 |
| DLX6-AS1 | 4.249325 | 0.283288 | 15 |
| KIRREL3 | 3.858567 | 0.257238 | 15 |
| LRMDA | 3.23644 | 0.215763 | 15 |
| RPS6KA2 | 5.007312 | 0.357665 | 14 |
| MOB2 | 4.504779 | 0.32177 | 14 |
| IQSEC1 | 4.409895 | 0.314993 | 14 |
| CUX1 | 4.066748 | 0.290482 | 14 |
| CACNA1H | 4.052721 | 0.28948 | 14 |
| MIR548F5 | 3.380989 | 0.241499 | 14 |
| GNG7 | 3.198749 | 0.228482 | 14 |
| GSE1 | 5.068009 | 0.389847 | 13 |
| MSI2 | 4.956654 | 0.381281 | 13 |
| RFX4 | 3.670637 | 0.282357 | 13 |
| CMIP | 7.143086 | 0.595257 | 12 |
| ZC3H3 | 5.709299 | 0.475775 | 12 |
| GNA12 | 4.857636 | 0.404803 | 12 |
| TNS3 | 4.451887 | 0.370991 | 12 |
| FBRSL1 | 4.206857 | 0.350571 | 12 |
| ADGRD1 | 4.040292 | 0.336691 | 12 |
| MEGF6 | 3.908699 | 0.325725 | 12 |
| CTBP2 | 4.783155 | 0.434832 | 11 |
| FGFR2 | 3.28003 | 0.298185 | 11 |
| TSPAN4 | 4.591197 | 0.45912 | 10 |
| AKAP13 | 4.440316 | 0.444032 | 10 |
| ACOT7 | 3.995017 | 0.399502 | 10 |
| BCL11B | 3.458283 | 0.345828 | 10 |
| CHST11 | 3.347793 | 0.334779 | 10 |
| IGF1R | 3.325429 | 0.332543 | 10 |
| AUTS2 | 3.281351 | 0.328135 | 10 |
| SND1 | 7.441603 | 0.826845 | 9 |
| ATP11A | 6.169478 | 0.685498 | 9 |
| ADAMTS2 | 4.343738 | 0.482638 | 9 |
| VRK2 | 4.873592 | 0.609199 | 8 |
| TRAPPC9 | 4.102197 | 0.512775 | 8 |
| LINC00311 | 3.840759 | 0.480095 | 8 |
| DLEU1 | 3.8326 | 0.479075 | 8 |
| PPP2R2B | 3.383298 | 0.422912 | 8 |
| RORA | 3.341857 | 0.417732 | 8 |
| DNMT3A | 3.198196 | 0.399774 | 8 |
| MIR548H4 | 3.907537 | 0.55822 | 7 |
| NAV1 | 3.394831 | 0.484976 | 7 |
| C19orf25 | 3.289949 | 0.469993 | 7 |
| TSNAX-DISC1 | 4.775104 | 0.955021 | 5 |
| ARHGEF7 | 3.753903 | 0.750781 | 5 |
| RUNDC3A | 3.589411 | 0.717882 | 5 |
| PRR5L | 3.44163 | 0.688326 | 5 |
| AP2A2 | 3.376591 | 0.675318 | 5 |
| LIPE-AS1 | 3.656927 | 0.914232 | 4 |
| DAGLB | 3.708907 | 1.236302 | 3 |
| DICER1 | 3.585845 | 1.195282 | 3 |
| TRIO | 3.300107 | 1.100036 | 3 |

TABLE 32
Cancer Type EPN_MPE

| Gene site | imp_sum | imp_mean | n |
|---|---|---|---|
| PTPRN2 | 14.32221 | 0.174661 | 82 |
| PRDM16 | 16.92066 | 0.238319 | 71 |
| PCDHGA1 | 6.198403 | 0.105058 | 59 |
| PCDHGA2 | 5.882017 | 0.103193 | 57 |
| PCDHGA3 | 5.565631 | 0.103067 | 54 |
| PCDHGB1 | 5.565631 | 0.105012 | 53 |
| PCDHGA4 | 5.565631 | 0.10913 | 51 |
| PCDHGB2 | 5.249245 | 0.107127 | 49 |
| PCDHGA5 | 5.565631 | 0.118418 | 47 |
| PCDHGB3 | 5.249245 | 0.122075 | 43 |
| PCDHGA6 | 4.932859 | 0.123321 | 40 |
| HDAC4 | 10.4859 | 0.283403 | 37 |
| PCDHGA7 | 4.886933 | 0.132079 | 37 |
| RBFOX3 | 7.484427 | 0.213841 | 35 |
| PCDHGB4 | 4.886933 | 0.139627 | 35 |
| PCDHGA8 | 4.886933 | 0.139627 | 35 |
| DIP2C | 11.24452 | 0.351391 | 32 |
| PCDHGB5 | 4.570547 | 0.14283 | 32 |
| PCDHGA9 | 4.254161 | 0.137231 | 31 |
| SOX2-OT | 4.810056 | 0.165864 | 29 |
| PCDHGB6 | 3.86752 | 0.133363 | 29 |
| SHANK2 | 4.851686 | 0.186603 | 26 |
| ADARB2 | 4.570843 | 0.175802 | 26 |
| AGAP1 | 7.877983 | 0.315119 | 25 |
| CAMTA1 | 5.644876 | 0.225795 | 25 |
| SATB2 | 3.821489 | 0.159229 | 24 |
| RPTOR | 10.40549 | 0.452412 | 23 |
| HOXB3 | 6.248789 | 0.271686 | 23 |
| NCOR2 | 5.752322 | 0.250101 | 23 |
| INPP5A | 3.534761 | 0.153685 | 23 |
| SKI | 8.303878 | 0.395423 | 21 |
| SIM2 | 3.533503 | 0.168262 | 21 |
| FRMD4A | 4.183428 | 0.209171 | 20 |
| ABR | 3.920332 | 0.196017 | 20 |
| SDK1 | 3.803673 | 0.190184 | 20 |
| MAD1L1 | 11.24071 | 0.591616 | 19 |
| ZNF423 | 8.169802 | 0.42999 | 19 |
| CASZ1 | 5.379156 | 0.283113 | 19 |
| CFAP46 | 4.035361 | 0.212387 | 19 |
| FOXK1 | 4.71225 | 0.261792 | 18 |
| TBC1D16 | 4.476315 | 0.248684 | 18 |
| RBFOX1 | 3.56034 | 0.197797 | 18 |
| OPCML | 7.709194 | 0.453482 | 17 |
| FOXP1 | 5.359968 | 0.334998 | 16 |
| NAV2 | 4.168476 | 0.26053 | 16 |
| GLI2 | 6.447499 | 0.429833 | 15 |
| ZBTB20 | 4.319508 | 0.287967 | 15 |
| LRMDA | 3.985014 | 0.265668 | 15 |
| NFIX | 3.73468 | 0.248979 | 15 |
| CUX1 | 6.207969 | 0.443426 | 14 |
| RPS6KA2 | 5.815656 | 0.415404 | 14 |
| PRKAG2 | 4.811351 | 0.343668 | 14 |
| ARHGEF10 | 3.644336 | 0.26031 | 14 |
| C7orf50 | 3.528157 | 0.252011 | 14 |
| HOXC4 | 6.713735 | 0.516441 | 13 |
| MSI2 | 6.683626 | 0.514125 | 13 |
| RFX4 | 5.185562 | 0.398889 | 13 |
| MYT1L | 4.949706 | 0.380747 | 13 |
| KIF26B | 4.137998 | 0.318308 | 13 |
| CLYBL | 3.641455 | 0.280112 | 13 |
| MIRLET7BHG | 6.049958 | 0.504163 | 12 |
| ADGRD1 | 4.478436 | 0.373203 | 12 |
| ZC3H3 | 3.849677 | 0.320806 | 12 |
| TNS3 | 3.798714 | 0.31656 | 12 |
| CMIP | 3.686039 | 0.30717 | 12 |
| MEGF6 | 3.541811 | 0.295151 | 12 |
| ZC3H12D | 5.475938 | 0.497813 | 11 |
| VGLL4 | 4.601871 | 0.418352 | 11 |
| CTBP2 | 4.487393 | 0.407945 | 11 |
| RAD51B | 3.608856 | 0.328078 | 11 |
| ACOT7 | 4.626879 | 0.462688 | 10 |
| AKAP13 | 4.587557 | 0.458756 | 10 |
| KLHL29 | 4.04698 | 0.404698 | 10 |
| FMN1 | 3.83224 | 0.383224 | 10 |
| TSPAN4 | 3.7268 | 0.37268 | 10 |
| SND1 | 5.70032 | 0.633369 | 9 |
| ATP11A | 5.41207 | 0.601341 | 9 |
| ADAMTS2 | 5.056659 | 0.561851 | 9 |
| ASAP1 | 4.247257 | 0.471917 | 9 |
| AXIN2 | 4.138498 | 0.459833 | 9 |
| TSPAN9 | 4.122258 | 0.458029 | 9 |
| TRAPPC12 | 3.624908 | 0.402768 | 9 |
| RUNX1 | 3.610029 | 0.401114 | 9 |
| LINC00311 | 4.495447 | 0.561931 | 8 |
| LHX4 | 4.416192 | 0.552024 | 8 |
| DLEU1 | 3.893139 | 0.486642 | 8 |
| MACROD1 | 3.759084 | 0.469885 | 8 |
| MCC | 3.698126 | 0.462266 | 8 |
| WWP2 | 3.540691 | 0.442586 | 8 |
| SYNJ2 | 3.510006 | 0.438751 | 8 |
| NAV1 | 5.25118 | 0.750169 | 7 |
| RXRA | 4.033838 | 0.576263 | 7 |
| FBXL18 | 3.917171 | 0.652862 | 6 |
| LRRFIP1 | 3.740917 | 0.623486 | 6 |
| SLC22A18AS | 3.641649 | 0.606941 | 6 |
| RUNDC3A | 4.523264 | 0.904653 | 5 |
| TSNAX-DISC1 | 4.43698 | 0.887396 | 5 |
| PRR5L | 3.555141 | 0.711028 | 5 |
| SLC25A10 | 4.694753 | 2.347376 | 2 |
| ANKLE2 | 3.867527 | 1.933764 | 2 |

TABLE 33
Cancer Type EPN_PF_SE

| Gene site | imp_sum | imp_mean | n |
|---|---|---|---|
| PTPRN2 | 16.74131 | 0.204162 | 82 |
| PRDM16 | 18.68393 | 0.263154 | 71 |
| PCDHGA1 | 5.212948 | 0.088355 | 59 |
| PCDHGA2 | 5.212948 | 0.091455 | 57 |
| PCDHGA3 | 5.212948 | 0.096536 | 54 |
| PCDHGB1 | 5.212948 | 0.098358 | 53 |
| PCDHGA4 | 5.212948 | 0.102215 | 51 |
| PCDHGB2 | 5.212948 | 0.106387 | 49 |
| PCDHGA5 | 5.212948 | 0.110914 | 47 |
| PCDHGB3 | 4.580176 | 0.106516 | 43 |
| HDAC4 | 13.05699 | 0.352892 | 37 |
| PAX6 | 14.08594 | 0.402455 | 35 |
| RBFOX3 | 9.531626 | 0.272332 | 35 |
| DIP2C | 11.05853 | 0.345579 | 32 |
| SOX2-OT | 10.77132 | 0.371425 | 29 |
| GALNT9 | 6.548071 | 0.242521 | 27 |
| SHANK2 | 7.222144 | 0.277775 | 26 |
| ADARB2 | 7.06597 | 0.271768 | 26 |
| AGAP1 | 9.531944 | 0.381278 | 25 |
| CAMTA1 | 6.908462 | 0.276338 | 25 |
| SATB2 | 4.923948 | 0.205165 | 24 |
| NCOR2 | 9.16504 | 0.39848 | 23 |
| RPTOR | 9.035759 | 0.392859 | 23 |
| INPP5A | 6.803703 | 0.295813 | 23 |
| RIMBP2 | 6.063599 | 0.263635 | 23 |
| HOXB3 | 6.055053 | 0.263263 | 23 |
| NXN | 5.033246 | 0.218837 | 23 |
| PRKCZ | 7.013904 | 0.318814 | 22 |
| SKI | 12.7486 | 0.607076 | 21 |
| ZIC4 | 6.09695 | 0.290331 | 21 |
| SDK1 | 6.579672 | 0.328984 | 20 |
| ABR | 5.743593 | 0.28718 | 20 |
| FRMD4A | 5.402081 | 0.270104 | 20 |
| MAD1L1 | 11.98565 | 0.630824 | 19 |
| ZNF423 | 8.825708 | 0.464511 | 19 |
| CASZ1 | 6.786586 | 0.357189 | 19 |
| SMG1P2 | 6.215715 | 0.327143 | 19 |
| BOLA2 | 6.215715 | 0.327143 | 19 |
| LOC613038 | 6.215715 | 0.327143 | 19 |
| KCNQ1 | 5.03099 | 0.264789 | 19 |
| SEPTIN9 | 7.707187 | 0.428177 | 18 |
| FOXK1 | 6.449852 | 0.358325 | 18 |
| TBC1D16 | 6.066392 | 0.337022 | 18 |
| MCF2L | 5.143681 | 0.28576 | 18 |
| ANKRD11 | 4.599412 | 0.255523 | 18 |
| OPCML | 7.137084 | 0.419828 | 17 |
| SIM1 | 4.796091 | 0.282123 | 17 |
| PAX6-AS1 | 4.465569 | 0.262681 | 17 |
| RCN1 | 4.465569 | 0.262681 | 17 |
| SORBS2 | 5.478021 | 0.342376 | 16 |
| NAV2 | 4.87996 | 0.304997 | 16 |
| FOXP1 | 4.849099 | 0.303069 | 16 |
| GLI2 | 9.889871 | 0.659325 | 15 |
| BAIAP2 | 5.307801 | 0.353853 | 15 |
| NFIX | 4.855866 | 0.323724 | 15 |
| KIRREL3 | 4.673915 | 0.311594 | 15 |
| ZBTB20 | 4.470387 | 0.298026 | 15 |
| RPS6KA2 | 7.145132 | 0.510367 | 14 |
| CUX1 | 6.958483 | 0.497035 | 14 |
| PRKAG2 | 6.515057 | 0.465361 | 14 |
| C7orf50 | 5.629425 | 0.402102 | 14 |
| IQSEC1 | 4.598494 | 0.328464 | 14 |
| MSI2 | 7.252988 | 0.557922 | 13 |
| CLYBL | 6.49018 | 0.499245 | 13 |
| GSE1 | 5.760461 | 0.443112 | 13 |
| KIF26B | 4.998393 | 0.384492 | 13 |
| RFX4 | 4.463465 | 0.343343 | 13 |
| MYT1L | 4.411582 | 0.339352 | 13 |
| ZC3H3 | 6.609641 | 0.550803 | 12 |
| MIRLET7BHG | 5.018458 | 0.418205 | 12 |
| CMIP | 4.987616 | 0.415635 | 12 |
| RASA3 | 4.825289 | 0.402107 | 12 |
| TNS3 | 4.58364 | 0.38197 | 12 |
| FBRSL1 | 4.523777 | 0.376981 | 12 |
| ZC3H12D | 7.527348 | 0.684304 | 11 |
| RAD51B | 4.527513 | 0.411592 | 11 |
| VGLL4 | 4.423538 | 0.40214 | 11 |
| ACOT7 | 5.239658 | 0.523966 | 10 |
| SND1 | 6.341657 | 0.704629 | 9 |
| RUNX1 | 5.143644 | 0.571516 | 9 |
| ATP11A | 4.991781 | 0.554642 | 9 |
| ADAMTS2 | 4.778374 | 0.53093 | 9 |
| SPECC1 | 4.748781 | 0.527642 | 9 |
| SLC22A18 | 4.568763 | 0.50764 | 9 |
| TSPAN9 | 4.535394 | 0.503933 | 9 |
| CACNA2D4 | 4.441201 | 0.493467 | 9 |
| GPC6 | 4.370579 | 0.48562 | 9 |
| MSRA | 5.033826 | 0.629228 | 8 |
| PRDM6 | 4.968878 | 0.62111 | 8 |
| LHX4 | 4.742436 | 0.592804 | 8 |
| DLEU1 | 4.542607 | 0.567826 | 8 |
| LINC00311 | 4.450046 | 0.556256 | 8 |
| RXRA | 4.631648 | 0.661664 | 7 |
| FBXL18 | 4.514288 | 0.752381 | 6 |
| PRR5L | 5.238089 | 1.047618 | 5 |
| TSNAX-DISC1 | 4.697662 | 0.939532 | 5 |
| ARHGEF7 | 4.366168 | 0.873234 | 5 |
| RBMS3 | 5.452308 | 1.363077 | 4 |
| VOPP1 | 4.361184 | 1.090296 | 4 |
| SLC25A10 | 4.633583 | 2.316791 | 2 |

TABLE 34
Cancer Type EPN_PFA_1a

| Gene site | imp_sum | imp_mean | n |
|---|---|---|---|
| PTPRN2 | 15.52606 | 0.189342 | 82 |
| PRDM16 | 23.29599 | 0.328113 | 71 |
| HDAC4 | 15.59615 | 0.421518 | 37 |
| PAX6 | 14.80671 | 0.423049 | 35 |
| RBFOX3 | 9.838801 | 0.281109 | 35 |
| DIP2C | 11.85036 | 0.370324 | 32 |
| SOX2-OT | 10.03478 | 0.346027 | 29 |
| GALNT9 | 9.558407 | 0.354015 | 27 |
| ADARB2 | 8.950612 | 0.344254 | 26 |
| SHANK2 | 8.436808 | 0.324493 | 26 |
| CAMTA1 | 8.475074 | 0.339003 | 25 |
| AGAP1 | 7.717198 | 0.308688 | 25 |
| SATB2 | 12.39102 | 0.516293 | 24 |
| MEIS1 | 4.193362 | 0.174723 | 24 |
| RPTOR | 11.60107 | 0.504395 | 23 |
| HOXB3 | 8.611445 | 0.374411 | 23 |
| INPP5A | 8.234079 | 0.358003 | 23 |
| NCOR2 | 6.356224 | 0.276358 | 23 |
| RIMBP2 | 6.032696 | 0.262291 | 23 |
| PRKCZ | 8.289756 | 0.376807 | 22 |
| SKI | 10.89492 | 0.518806 | 21 |
| ZIC4 | 5.134383 | 0.244494 | 21 |
| SIM2 | 4.512566 | 0.214884 | 21 |
| SDK1 | 9.202593 | 0.46013 | 20 |
| FRMD4A | 5.773121 | 0.288656 | 20 |
| ABR | 5.746127 | 0.287306 | 20 |
| MAD1L1 | 11.8922 | 0.625905 | 19 |
| ZNF423 | 7.763591 | 0.40861 | 19 |
| CASZ1 | 7.479987 | 0.393684 | 19 |
| SMG1P2 | 6.572637 | 0.345928 | 19 |
| BOLA2 | 6.572637 | 0.345928 | 19 |
| LOC613038 | 6.572637 | 0.345928 | 19 |
| CFAP46 | 5.974489 | 0.314447 | 19 |
| FOXK1 | 6.754044 | 0.375225 | 18 |
| SEPTIN9 | 6.590998 | 0.366167 | 18 |
| TBC1D16 | 4.678671 | 0.259926 | 18 |
| ANKRD11 | 4.397949 | 0.244331 | 18 |
| OPCML | 6.527074 | 0.383946 | 17 |
| PAX6-AS1 | 4.713084 | 0.27724 | 17 |
| RCN1 | 4.713084 | 0.27724 | 17 |
| TBX15 | 4.574999 | 0.269118 | 17 |
| SIM1 | 4.539674 | 0.26704 | 17 |
| FOXP1 | 6.034973 | 0.377186 | 16 |
| EBF3 | 5.740264 | 0.358766 | 16 |
| NAV2 | 5.648016 | 0.353001 | 16 |
| GLI2 | 8.575904 | 0.571727 | 15 |
| LRMDA | 5.238657 | 0.349244 | 15 |
| KIRREL3 | 5.157525 | 0.343835 | 15 |
| SLX1B- | 4.672051 | 0.31147 | 15 |
| SULT1A4 | | | |
| SLX1A | 4.672051 | 0.31147 | 15 |
| LOC606724 | 4.672051 | 0.31147 | 15 |
| KNDC1 | 4.538057 | 0.302537 | 15 |
| RPS6KA2 | 7.648904 | 0.54635 | 14 |
| CUX1 | 6.492923 | 0.46378 | 14 |
| PRKAG2 | 5.487928 | 0.391995 | 14 |
| IQSEC1 | 5.464688 | 0.390335 | 14 |
| MSI2 | 6.180107 | 0.475393 | 13 |
| MYT1L | 5.996413 | 0.461263 | 13 |
| KIF26B | 5.857538 | 0.45058 | 13 |
| GSE1 | 5.745502 | 0.441962 | 13 |
| CLYBL | 5.378406 | 0.413724 | 13 |
| ADGRD1 | 6.913338 | 0.576112 | 12 |
| ZC3H3 | 5.485077 | 0.45709 | 12 |
| TNS3 | 5.08837 | 0.424031 | 12 |
| MAML3 | 4.984269 | 0.415356 | 12 |
| FBRSL1 | 4.978429 | 0.414869 | 12 |
| CMIP | 4.842426 | 0.403536 | 12 |
| RASA3 | 4.540034 | 0.378336 | 12 |
| ZC3H12D | 7.228159 | 0.657105 | 11 |
| VGLL4 | 5.184496 | 0.471318 | 11 |
| FGFR2 | 4.752801 | 0.432073 | 11 |
| RAD51B | 4.447319 | 0.404302 | 11 |
| PITX2 | 4.928226 | 0.492823 | 10 |
| CBFA2T3 | 4.784692 | 0.478469 | 10 |
| ACOT7 | 4.758271 | 0.475827 | 10 |
| EBF1 | 4.337505 | 0.43375 | 10 |
| RUNX1 | 6.471203 | 0.719023 | 9 |
| ATP11A | 6.196063 | 0.688451 | 9 |
| TSPAN9 | 5.199594 | 0.577733 | 9 |
| SND1 | 4.946798 | 0.549644 | 9 |
| ADAMTS2 | 4.843958 | 0.538218 | 9 |
| ZNF833P | 4.638324 | 0.515369 | 9 |
| CACNA2D4 | 4.584298 | 0.509366 | 9 |
| GPC6 | 4.331115 | 0.481235 | 9 |
| PRDM6 | 6.419268 | 0.802409 | 8 |
| KIF26A | 4.365822 | 0.545728 | 8 |
| MSRA | 4.191841 | 0.52398 | 8 |
| NAV1 | 5.777994 | 0.825428 | 7 |
| LHX2 | 4.853107 | 0.693301 | 7 |
| TBR1 | 4.581182 | 0.654455 | 7 |
| SATB2-AS1 | 6.181148 | 1.030191 | 6 |
| FBXL18 | 4.744899 | 0.790816 | 6 |
| ROR1 | 4.257896 | 0.709649 | 6 |
| TSNAX-DISC1 | 5.005668 | 1.001134 | 5 |
| CNPY1 | 4.858208 | 0.971642 | 5 |
| LOC100132215 | 4.781487 | 0.956297 | 5 |
| PRR5L | 4.594552 | 0.91891 | 5 |
| RUNDC3A | 4.378322 | 0.875664 | 5 |
| RBMS3 | 5.481089 | 1.370272 | 4 |
| SLC25A10 | 4.564369 | 2.282184 | 2 |

TABLE 35
Cancer Type EPN_PFA_1b

| Gene site | imp_sum | imp_mean | n |
|---|---|---|---|
| PTPRN2 | 17.00674 | 0.207399 | 82 |
| PRDM16 | 21.39185 | 0.301294 | 71 |
| PCDHGA1 | 4.956857 | 0.084015 | 59 |
| PCDHGA2 | 4.956857 | 0.086962 | 57 |
| PCDHGA3 | 4.640471 | 0.085935 | 54 |
| PCDHGB1 | 4.640471 | 0.087556 | 53 |
| PCDHGA4 | 4.324085 | 0.084786 | 51 |
| HDAC4 | 14.23228 | 0.384656 | 37 |
| PAX6 | 13.98822 | 0.399663 | 35 |
| RBFOX3 | 10.43696 | 0.298199 | 35 |
| DIP2C | 11.68025 | 0.365008 | 32 |
| SOX2-OT | 7.988427 | 0.275463 | 29 |
| GALNT9 | 9.278607 | 0.343652 | 27 |
| ADARB2 | 9.419679 | 0.362295 | 26 |
| SHANK2 | 7.951411 | 0.305823 | 26 |
| AGAP1 | 11.28464 | 0.451385 | 25 |
| CAMTA1 | 8.537349 | 0.341494 | 25 |
| PDGFRA | 6.872677 | 0.274907 | 25 |
| SATB2 | 13.52923 | 0.563718 | 24 |
| HOXB3 | 11.84852 | 0.515153 | 23 |
| RPTOR | 8.046414 | 0.349844 | 23 |
| NCOR2 | 7.069104 | 0.307352 | 23 |
| INPP5A | 6.100277 | 0.265229 | 23 |
| PRKCZ | 8.355116 | 0.379778 | 22 |
| HOXA-AS3 | 10.37138 | 0.493875 | 21 |
| SKI | 9.906447 | 0.471736 | 21 |
| ZIC4 | 5.046113 | 0.240291 | 21 |
| SIM2 | 4.694236 | 0.223535 | 21 |
| SDK1 | 8.716676 | 0.435834 | 20 |
| ABR | 6.204368 | 0.310218 | 20 |
| MAD1L1 | 11.81708 | 0.621951 | 19 |
| ZNF423 | 8.031473 | 0.422709 | 19 |
| CASZ1 | 7.203368 | 0.379125 | 19 |
| CFAP46 | 6.658374 | 0.350441 | 19 |
| SMG1P2 | 5.094956 | 0.268156 | 19 |
| BOLA2 | 5.094956 | 0.268156 | 19 |
| LOC613038 | 5.094956 | 0.268156 | 19 |
| KCNQ1 | 4.523578 | 0.238083 | 19 |
| SEPTIN9 | 8.631588 | 0.479533 | 18 |
| FOXK1 | 7.603187 | 0.422399 | 18 |
| TBC1D16 | 5.568902 | 0.309383 | 18 |
| ANKRD11 | 4.94688 | 0.274827 | 18 |
| PAX6-AS1 | 9.044886 | 0.532052 | 17 |
| RCN1 | 9.044886 | 0.532052 | 17 |
| OPCML | 6.926837 | 0.407461 | 17 |
| SIM1 | 5.133736 | 0.301984 | 17 |
| EBF3 | 5.860246 | 0.366265 | 16 |
| NAV2 | 5.259041 | 0.32869 | 16 |
| FOXP1 | 4.87325 | 0.304578 | 16 |
| SORBS2 | 4.74376 | 0.296485 | 16 |
| GLI2 | 8.270372 | 0.551358 | 15 |
| SLX1B- | 4.890562 | 0.326037 | 15 |
| SULT1A4 | | | |
| SLX1A | 4.890562 | 0.326037 | 15 |
| LOC606724 | 4.890562 | 0.326037 | 15 |
| KNDC1 | 4.76532 | 0.317688 | 15 |
| LRMDA | 4.502978 | 0.300199 | 15 |
| KIRREL3 | 4.162307 | 0.277487 | 15 |
| RPS6KA2 | 7.531504 | 0.537965 | 14 |
| CUX1 | 7.522806 | 0.537343 | 14 |
| C7orf50 | 5.249022 | 0.37493 | 14 |
| IQSEC1 | 4.812408 | 0.343743 | 14 |
| SYCP2L | 4.425098 | 0.316078 | 14 |
| PRKAG2 | 4.204794 | 0.300342 | 14 |
| MSI2 | 6.955762 | 0.535059 | 13 |
| CLYBL | 5.60432 | 0.431102 | 13 |
| KIF26B | 5.154783 | 0.396522 | 13 |
| MYT1L | 4.795307 | 0.36887 | 13 |
| ADGRD1 | 5.906996 | 0.49225 | 12 |
| MAML3 | 5.269018 | 0.439085 | 12 |
| RASA3 | 5.263297 | 0.438608 | 12 |
| ZC3H12D | 7.595957 | 0.690542 | 11 |
| FGFR2 | 6.744716 | 0.613156 | 11 |
| VGLL4 | 4.938567 | 0.448961 | 11 |
| SKOR1 | 4.541739 | 0.454174 | 10 |
| ACOT7 | 4.528174 | 0.452817 | 10 |
| EBF1 | 4.477643 | 0.447764 | 10 |
| SND1 | 6.236707 | 0.692967 | 9 |
| ATP11A | 6.137343 | 0.681927 | 9 |
| RUNX1 | 5.965829 | 0.66287 | 9 |
| AXIN2 | 4.774154 | 0.530462 | 9 |
| CACNA2D4 | 4.638878 | 0.515431 | 9 |
| ADAMTS2 | 4.438726 | 0.493192 | 9 |
| TSPAN9 | 4.426164 | 0.491796 | 9 |
| PRDM6 | 6.398119 | 0.799765 | 8 |
| MSRA | 5.256958 | 0.65712 | 8 |
| DLEU1 | 5.203452 | 0.650431 | 8 |
| LINC00311 | 4.698301 | 0.587288 | 8 |
| AFF3 | 4.215017 | 0.526877 | 8 |
| BAHCC1 | 4.160761 | 0.520095 | 8 |
| RORA | 4.078508 | 0.509814 | 8 |
| NAV1 | 6.307546 | 0.901078 | 7 |
| HOXB-AS1 | 5.440172 | 0.777167 | 7 |
| SATB2-AS1 | 5.309555 | 0.884926 | 6 |
| ROR1 | 4.858985 | 0.809831 | 6 |
| FBXL18 | 4.25365 | 0.708942 | 6 |
| CNPY1 | 5.842525 | 1.168505 | 5 |
| LOC100132215 | 4.750425 | 0.950085 | 5 |
| TSNAX-DISC1 | 4.549935 | 0.909987 | 5 |
| RBMS3 | 5.307114 | 1.326778 | 4 |
| SLC25A10 | 4.466961 | 2.233481 | 2 |

TABLE 36
Cancer Type EPN_PFA_1c

| Gene site | imp_sum | imp_mean | n |
|---|---|---|---|
| PTPRN2 | 11.73423 | 0.1431 | 82 |
| PRDM16 | 21.7832 | 0.306806 | 71 |
| HDAC4 | 11.65731 | 0.315062 | 37 |
| PAX6 | 11.46737 | 0.327639 | 35 |
| RBFOX3 | 8.085018 | 0.231001 | 35 |
| DIP2C | 10.63225 | 0.332258 | 32 |
| SOX2-OT | 9.704987 | 0.334655 | 29 |
| GALNT9 | 7.860133 | 0.291116 | 27 |
| ADARB2 | 8.467804 | 0.325685 | 26 |
| SHANK2 | 8.274469 | 0.318249 | 26 |
| AGAP1 | 8.253203 | 0.330128 | 25 |
| CAMTA1 | 6.683582 | 0.267343 | 25 |
| PDGFRA | 6.467133 | 0.258685 | 25 |
| SATB2 | 13.66347 | 0.569311 | 24 |
| MEIS1 | 4.600093 | 0.191671 | 24 |
| HOXB3 | 13.57523 | 0.590227 | 23 |
| RPTOR | 10.26378 | 0.446251 | 23 |
| NXN | 6.038699 | 0.262552 | 23 |
| NCOR2 | 5.781112 | 0.251353 | 23 |
| RIMBP2 | 5.121475 | 0.222673 | 23 |
| INPP5A | 4.056281 | 0.17636 | 23 |
| PRKCZ | 6.347057 | 0.288503 | 22 |
| SKI | 10.71367 | 0.510175 | 21 |
| ZIC4 | 6.534315 | 0.311158 | 21 |
| HOXA-AS3 | 6.528584 | 0.310885 | 21 |
| SIM2 | 4.095009 | 0.195 | 21 |
| SDK1 | 8.876261 | 0.443813 | 20 |
| ABR | 5.934879 | 0.296744 | 20 |
| FRMD4A | 5.02878 | 0.251439 | 20 |
| MAD1L1 | 11.62792 | 0.611996 | 19 |
| ZNF423 | 8.003832 | 0.421254 | 19 |
| CASZ1 | 7.87127 | 0.414277 | 19 |
| SMG1P2 | 6.37962 | 0.335769 | 19 |
| BOLA2 | 6.37962 | 0.335769 | 19 |
| LOC613038 | 6.37962 | 0.335769 | 19 |
| CFAP46 | 6.180987 | 0.325315 | 19 |
| KCNQ1 | 4.248304 | 0.223595 | 19 |
| FOXK1 | 7.751933 | 0.430663 | 18 |
| SEPTIN9 | 7.626152 | 0.423675 | 18 |
| TBC1D16 | 4.759312 | 0.264406 | 18 |
| PAX6-AS1 | 7.680562 | 0.451798 | 17 |
| RCN1 | 7.680562 | 0.451798 | 17 |
| OPCML | 6.246465 | 0.367439 | 17 |
| SIM1 | 5.766294 | 0.339194 | 17 |
| EBF3 | 5.762216 | 0.360138 | 16 |
| NAV2 | 5.017001 | 0.313563 | 16 |
| FOXP1 | 4.656013 | 0.291001 | 16 |
| GLI2 | 7.572671 | 0.504845 | 15 |
| LRMDA | 5.232108 | 0.348807 | 15 |
| KNDC1 | 4.497326 | 0.299822 | 15 |
| BAIAP2 | 4.222307 | 0.281487 | 15 |
| SLX1B- | 4.148554 | 0.27657 | 15 |
| SULT1A4 | | | |
| SLX1A | 4.148554 | 0.27657 | 15 |
| LOC606724 | 4.148554 | 0.27657 | 15 |
| RPS6KA2 | 7.479873 | 0.534277 | 14 |
| CUX1 | 6.16701 | 0.440501 | 14 |
| IQSEC1 | 4.72887 | 0.337776 | 14 |
| SYCP2L | 4.00661 | 0.286186 | 14 |
| MSI2 | 6.405085 | 0.492699 | 13 |
| KIF26B | 5.629066 | 0.433005 | 13 |
| MYT1L | 4.50348 | 0.346422 | 13 |
| GSE1 | 4.000032 | 0.307695 | 13 |
| ADGRD1 | 6.29846 | 0.524872 | 12 |
| RASA3 | 4.932304 | 0.411025 | 12 |
| CMIP | 4.764815 | 0.397068 | 12 |
| ZC3H3 | 4.64397 | 0.386997 | 12 |
| MAML3 | 4.500624 | 0.375052 | 12 |
| TNS3 | 4.451974 | 0.370998 | 12 |
| FBRSL1 | 3.987885 | 0.332324 | 12 |
| ZC3H12D | 7.076528 | 0.643321 | 11 |
| CCDC140 | 5.695759 | 0.517796 | 11 |
| TBCD | 4.563491 | 0.414863 | 11 |
| ACOT7 | 4.484055 | 0.448406 | 10 |
| TFAP2B | 4.443817 | 0.444382 | 10 |
| AKAP13 | 4.031576 | 0.403158 | 10 |
| ATP11A | 5.629712 | 0.625524 | 9 |
| RUNX1 | 4.768155 | 0.529795 | 9 |
| ADAMTS2 | 4.381118 | 0.486791 | 9 |
| TSPAN9 | 4.358179 | 0.484242 | 9 |
| AXIN2 | 4.28654 | 0.476282 | 9 |
| IGF2BP1 | 3.951526 | 0.439058 | 9 |
| MSRA | 5.028607 | 0.628576 | 8 |
| DLEU1 | 4.521561 | 0.565195 | 8 |
| PRDM6 | 4.441132 | 0.555142 | 8 |
| AFF3 | 4.261966 | 0.532746 | 8 |
| HOXB-AS3 | 5.999753 | 0.857108 | 7 |
| NAV1 | 5.943536 | 0.849077 | 7 |
| HOXD3 | 5.14118 | 0.734454 | 7 |
| HOXB-AS1 | 4.638274 | 0.662611 | 7 |
| LHX2 | 4.013036 | 0.573291 | 7 |
| SATB2-AS1 | 5.34783 | 0.891305 | 6 |
| ROR1 | 4.741215 | 0.790203 | 6 |
| FBXL18 | 3.922361 | 0.653727 | 6 |
| TSNAX-DISC1 | 4.656461 | 0.931292 | 5 |
| CNPY1 | 4.581687 | 0.916337 | 5 |
| PRR5L | 4.463218 | 0.892644 | 5 |
| ARHGEF7 | 4.278868 | 0.855774 | 5 |
| RUNDC3A | 4.013063 | 0.802613 | 5 |
| RBMS3 | 5.434225 | 1.358556 | 4 |
| SLC25A10 | 4.49209 | 2.246045 | 2 |

TABLE 37
Cancer Type EPN_PFA_1d

| Gene site | imp_sum | imp_mean | n |
|---|---|---|---|
| PTPRN2 | 14.16403 | 0.172732 | 82 |
| PRDM16 | 20.32788 | 0.286308 | 71 |
| PCDHGA1 | 4.457227 | 0.075546 | 59 |
| PCDHGA2 | 4.773613 | 0.083748 | 57 |
| PCDHGA3 | 4.773613 | 0.0884 | 54 |
| PCDHGB1 | 4.773613 | 0.090068 | 53 |
| PCDHGA4 | 4.773613 | 0.0936 | 51 |
| PCDHGB2 | 4.773613 | 0.097421 | 49 |
| PCDHGA5 | 4.773613 | 0.101566 | 47 |
| PCDHGB3 | 4.773613 | 0.111014 | 43 |
| PCDHGA6 | 4.140841 | 0.103521 | 40 |
| HDAC4 | 15.46144 | 0.417877 | 37 |
| PCDHGA7 | 4.140841 | 0.111915 | 37 |
| PAX6 | 12.5182 | 0.357663 | 35 |
| RBFOX3 | 7.481977 | 0.213771 | 35 |
| DIP2C | 10.57351 | 0.330422 | 32 |
| SOX2-OT | 8.581972 | 0.29593 | 29 |
| GALNT9 | 7.811737 | 0.289324 | 27 |
| SHANK2 | 9.067266 | 0.348741 | 26 |
| ADARB2 | 7.012347 | 0.269706 | 26 |
| AGAP1 | 9.67105 | 0.386842 | 25 |
| PDGFRA | 7.736738 | 0.30947 | 25 |
| CAMTA1 | 6.544932 | 0.261797 | 25 |
| SATB2 | 8.389307 | 0.349554 | 24 |
| HOXB3 | 10.88869 | 0.473421 | 23 |
| RPTOR | 10.71092 | 0.465692 | 23 |
| NCOR2 | 6.734153 | 0.292789 | 23 |
| RIMBP2 | 4.764066 | 0.207133 | 23 |
| INPP5A | 4.069466 | 0.176933 | 23 |
| PRKCZ | 4.627069 | 0.210321 | 22 |
| SKI | 9.279129 | 0.441863 | 21 |
| ZIC4 | 5.871497 | 0.279595 | 21 |
| SDK1 | 9.318171 | 0.465909 | 20 |
| ABR | 5.91374 | 0.295687 | 20 |
| FRMD4A | 5.159279 | 0.257964 | 20 |
| MAD1L1 | 11.62279 | 0.611726 | 19 |
| ZNF423 | 7.81374 | 0.411249 | 19 |
| SMG1P2 | 6.691693 | 0.352194 | 19 |
| BOLA2 | 6.691693 | 0.352194 | 19 |
| LOC613038 | 6.691693 | 0.352194 | 19 |
| CASZ1 | 5.736559 | 0.301924 | 19 |
| CFAP46 | 5.597067 | 0.294582 | 19 |
| SEPTIN9 | 8.140972 | 0.452276 | 18 |
| FOXK1 | 6.739737 | 0.37443 | 18 |
| TBC1D16 | 5.201468 | 0.28897 | 18 |
| MCF2L | 4.169744 | 0.231652 | 18 |
| PAX6-AS1 | 7.221093 | 0.42477 | 17 |
| RCN1 | 7.221093 | 0.42477 | 17 |
| OPCML | 5.635106 | 0.331477 | 17 |
| SIM1 | 4.81768 | 0.283393 | 17 |
| EBF3 | 4.791317 | 0.299457 | 16 |
| NAV2 | 4.475462 | 0.279716 | 16 |
| FOXP1 | 4.401058 | 0.275066 | 16 |
| SORBS2 | 4.070503 | 0.254406 | 16 |
| GLI2 | 8.844511 | 0.589634 | 15 |
| LRMDA | 5.609227 | 0.373948 | 15 |
| KNDC1 | 5.573397 | 0.37156 | 15 |
| SLX1B- | 5.061652 | 0.337443 | 15 |
| SULT1A4 | | | |
| SLX1A | 5.061652 | 0.337443 | 15 |
| LOC606724 | 5.061652 | 0.337443 | 15 |
| BAIAP2 | 4.715108 | 0.314341 | 15 |
| CUX1 | 7.899281 | 0.564234 | 14 |
| RPS6KA2 | 5.501559 | 0.392969 | 14 |
| PRKAG2 | 5.237114 | 0.37408 | 14 |
| C7orf50 | 4.527671 | 0.323405 | 14 |
| MSI2 | 5.354662 | 0.411897 | 13 |
| MIR9-3HG | 4.517006 | 0.347462 | 13 |
| MYT1L | 4.500654 | 0.346204 | 13 |
| CLYBL | 4.143654 | 0.318743 | 13 |
| ADGRD1 | 5.40329 | 0.450274 | 12 |
| CMIP | 4.791817 | 0.399318 | 12 |
| FBRSL1 | 4.247617 | 0.353968 | 12 |
| FGFR2 | 7.174125 | 0.652193 | 11 |
| ZC3H12D | 6.5122 | 0.592018 | 11 |
| VGLLA | 4.940937 | 0.449176 | 11 |
| PITX2 | 4.521435 | 0.452143 | 10 |
| SKOR1 | 4.258637 | 0.425864 | 10 |
| RUNX1 | 6.700412 | 0.74449 | 9 |
| ATP11A | 5.674704 | 0.630523 | 9 |
| SND1 | 5.065513 | 0.562835 | 9 |
| IGF2BP1 | 4.389758 | 0.487751 | 9 |
| AXIN2 | 4.329011 | 0.481001 | 9 |
| DLEU1 | 5.261077 | 0.657635 | 8 |
| PRDM6 | 4.880923 | 0.610115 | 8 |
| LINC00311 | 4.240971 | 0.530121 | 8 |
| AFF3 | 4.069896 | 0.508737 | 8 |
| NAV1 | 5.018063 | 0.716866 | 7 |
| HOXB-AS1 | 4.986665 | 0.712381 | 7 |
| HOXB-AS3 | 4.934192 | 0.704885 | 7 |
| HOXD3 | 4.268153 | 0.609736 | 7 |
| SATB2-AS1 | 4.635977 | 0.772663 | 6 |
| ROR1 | 4.372884 | 0.728814 | 6 |
| CNPY1 | 5.582239 | 1.116448 | 5 |
| TSNAX-DISC1 | 4.78141 | 0.956282 | 5 |
| LOC100132215 | 4.543738 | 0.908748 | 5 |
| PRR5L | 4.167306 | 0.833461 | 5 |
| YJEFN3 | 4.125815 | 0.825163 | 5 |
| NDUFA13 | 4.125815 | 0.825163 | 5 |
| RBMS3 | 5.532971 | 1.383243 | 4 |
| SLC25A10 | 4.494503 | 2.247252 | 2 |

TABLE 38
Cancer Type EPN_PFA_1e

| Gene site | imp_sum | imp_mean | n |
|---|---|---|---|
| PTPRN2 | 18.00181 | 0.219534 | 82 |
| PRDM16 | 21.74627 | 0.306286 | 71 |
| PCDHGA1 | 6.881921 | 0.116643 | 59 |
| PCDHGA2 | 6.565535 | 0.115185 | 57 |
| PCDHGA3 | 6.565535 | 0.121584 | 54 |
| PCDHGB1 | 6.249149 | 0.117908 | 53 |
| PCDHGA4 | 6.249149 | 0.122532 | 51 |
| PCDHGB2 | 6.249149 | 0.127534 | 49 |
| PCDHGA5 | 6.249149 | 0.132961 | 47 |
| PCDHGB3 | 6.249149 | 0.145329 | 43 |
| PCDHGA6 | 5.616377 | 0.140409 | 40 |
| HDAC4 | 13.72711 | 0.371003 | 37 |
| PCDHGA7 | 5.616377 | 0.151794 | 37 |
| PAX6 | 11.95651 | 0.341615 | 35 |
| RBFOX3 | 6.248808 | 0.178537 | 35 |
| PCDHGB4 | 4.983605 | 0.142389 | 35 |
| PCDHGA8 | 4.983605 | 0.142389 | 35 |
| DIP2C | 12.07684 | 0.377401 | 32 |
| PCDHGB5 | 4.983605 | 0.155738 | 32 |
| PCDHGA9 | 4.983605 | 0.160761 | 31 |
| SOX2-OT | 8.488804 | 0.292717 | 29 |
| PCDHGB6 | 4.462174 | 0.153868 | 29 |
| PCDHGA10 | 4.462174 | 0.159363 | 28 |
| GALNT9 | 7.836874 | 0.290255 | 27 |
| ADARB2 | 9.084362 | 0.349399 | 26 |
| SHANK2 | 7.663285 | 0.294742 | 26 |
| AGAP1 | 10.63693 | 0.425477 | 25 |
| PDGFRA | 7.632836 | 0.305313 | 25 |
| CAMTA1 | 7.157302 | 0.286292 | 25 |
| SATB2 | 12.85457 | 0.535607 | 24 |
| MEIS1 | 6.554545 | 0.273106 | 24 |
| PCDHGB7 | 4.437355 | 0.18489 | 24 |
| RPTOR | 10.07816 | 0.438181 | 23 |
| HOXB3 | 8.867335 | 0.385536 | 23 |
| RIMBP2 | 6.878422 | 0.299062 | 23 |
| NCOR2 | 6.285882 | 0.273299 | 23 |
| INPP5A | 5.269959 | 0.229129 | 23 |
| PRKCZ | 8.630716 | 0.392305 | 22 |
| SKI | 9.400294 | 0.447633 | 21 |
| ZIC4 | 5.787979 | 0.275618 | 21 |
| HOXA-AS3 | 5.32864 | 0.253745 | 21 |
| SDK1 | 8.473301 | 0.423665 | 20 |
| ABR | 5.397539 | 0.269877 | 20 |
| MAD1L1 | 12.29839 | 0.647284 | 19 |
| ZNF423 | 7.872681 | 0.414352 | 19 |
| SMG1P2 | 6.494341 | 0.341807 | 19 |
| BOLA2 | 6.494341 | 0.341807 | 19 |
| LOC613038 | 6.494341 | 0.341807 | 19 |
| CFAP46 | 5.689287 | 0.299436 | 19 |
| CASZ1 | 4.609441 | 0.242602 | 19 |
| SEPTIN9 | 8.178796 | 0.454378 | 18 |
| FOXK1 | 7.898339 | 0.438797 | 18 |
| TBC1D16 | 5.470113 | 0.303895 | 18 |
| OPCML | 6.190017 | 0.364119 | 17 |
| TBX15 | 5.706091 | 0.335652 | 17 |
| SIM1 | 5.192404 | 0.305436 | 17 |
| EBF3 | 5.90028 | 0.368768 | 16 |
| NAV2 | 5.221878 | 0.326367 | 16 |
| FOXP1 | 5.181933 | 0.323871 | 16 |
| GLI2 | 9.065835 | 0.604389 | 15 |
| SLX1B- | 5.499113 | 0.366608 | 15 |
| SULT1A4 | | | |
| SLX1A | 5.499113 | 0.366608 | 15 |
| LOC606724 | 5.499113 | 0.366608 | 15 |
| ZBTB20 | 5.387733 | 0.359182 | 15 |
| KIRREL3 | 4.942907 | 0.329527 | 15 |
| LRMDA | 4.930817 | 0.328721 | 15 |
| BAIAP2 | 4.662475 | 0.310832 | 15 |
| EMX2OS | 4.429826 | 0.295322 | 15 |
| RPS6KA2 | 6.445326 | 0.46038 | 14 |
| CUX1 | 6.293085 | 0.449506 | 14 |
| PRKAG2 | 5.440297 | 0.388593 | 14 |
| MSI2 | 7.114332 | 0.547256 | 13 |
| KIF26B | 5.683044 | 0.437157 | 13 |
| CLYBL | 5.449649 | 0.419204 | 13 |
| MYT1L | 4.83363 | 0.371818 | 13 |
| ADGRD1 | 5.371757 | 0.447646 | 12 |
| ZC3H3 | 4.983983 | 0.415332 | 12 |
| RASA3 | 4.983927 | 0.415327 | 12 |
| FBRSL1 | 4.769712 | 0.397476 | 12 |
| CMIP | 4.637998 | 0.3865 | 12 |
| ZC3H12D | 6.775582 | 0.615962 | 11 |
| FGFR2 | 6.004602 | 0.545873 | 11 |
| VGLLA | 5.254372 | 0.47767 | 11 |
| RUNX1 | 6.920844 | 0.768983 | 9 |
| SND1 | 6.114865 | 0.679429 | 9 |
| ATP11A | 5.509849 | 0.612205 | 9 |
| AXIN2 | 4.969639 | 0.552182 | 9 |
| ZNF833P | 4.887175 | 0.543019 | 9 |
| ADAMTS2 | 4.738917 | 0.526546 | 9 |
| TSPAN9 | 4.542104 | 0.504678 | 9 |
| PRDM6 | 6.947315 | 0.868414 | 8 |
| AFF3 | 4.755751 | 0.594469 | 8 |
| LHX4 | 4.538205 | 0.567276 | 8 |
| NAV1 | 5.378917 | 0.768417 | 7 |
| HOXB-AS1 | 5.110234 | 0.730033 | 7 |
| SATB2-AS1 | 6.250726 | 1.041788 | 6 |
| TSNAX-DISC1 | 5.009414 | 1.001883 | 5 |
| CNPY1 | 4.547343 | 0.909469 | 5 |
| RBMS3 | 5.281652 | 1.320413 | 4 |
| SLC25A10 | 4.677629 | 2.338814 | 2 |

TABLE 39
Cancer Type EPN_PFA_1f

| Gene site | imp_sum | imp_mean | n |
|---|---|---|---|
| PTPRN2 | 13.09278 | 0.159668 | 82 |
| PRDM16 | 20.14761 | 0.283769 | 71 |
| PCDHGA1 | 4.014954 | 0.06805 | 59 |
| HDAC4 | 15.21987 | 0.411348 | 37 |
| PAX6 | 12.20129 | 0.348608 | 35 |
| RBFOX3 | 9.580381 | 0.273725 | 35 |
| DIP2C | 10.53293 | 0.329154 | 32 |
| SOX2-OT | 6.568508 | 0.2265 | 29 |
| GALNT9 | 8.901503 | 0.329685 | 27 |
| ADARB2 | 8.342014 | 0.320847 | 26 |
| SHANK2 | 5.925792 | 0.227915 | 26 |
| AGAP1 | 8.423821 | 0.336953 | 25 |
| CAMTA1 | 6.335015 | 0.253401 | 25 |
| SATB2 | 7.790586 | 0.324608 | 24 |
| MEIS1 | 4.099364 | 0.170807 | 24 |
| RPTOR | 10.86983 | 0.472601 | 23 |
| NCOR2 | 7.09586 | 0.308516 | 23 |
| HOXB3 | 5.862146 | 0.254876 | 23 |
| RIMBP2 | 5.378929 | 0.233866 | 23 |
| INPP5A | 4.380518 | 0.190457 | 23 |
| NXN | 4.04771 | 0.175987 | 23 |
| PRKCZ | 6.916562 | 0.314389 | 22 |
| SKI | 9.348199 | 0.445152 | 21 |
| ZIC4 | 6.393505 | 0.304453 | 21 |
| SIM2 | 5.109225 | 0.243296 | 21 |
| SDK1 | 5.862156 | 0.293108 | 20 |
| FRMD4A | 5.766686 | 0.288334 | 20 |
| ABR | 4.713662 | 0.235683 | 20 |
| MAD1L1 | 11.80233 | 0.621175 | 19 |
| ZNF423 | 8.685542 | 0.457134 | 19 |
| SMG1P2 | 6.149274 | 0.323646 | 19 |
| BOLA2 | 6.149274 | 0.323646 | 19 |
| LOC613038 | 6.149274 | 0.323646 | 19 |
| CFAP46 | 5.760275 | 0.303172 | 19 |
| CASZ1 | 4.40723 | 0.231959 | 19 |
| SEPTIN9 | 6.327048 | 0.351503 | 18 |
| FOXK1 | 6.211907 | 0.345106 | 18 |
| ANKRD11 | 4.557418 | 0.25319 | 18 |
| RBFOX1 | 4.215856 | 0.234214 | 18 |
| TBC1D16 | 4.160834 | 0.231157 | 18 |
| OPCML | 5.509342 | 0.324079 | 17 |
| SIM1 | 5.074315 | 0.298489 | 17 |
| PAX6-AS1 | 4.557005 | 0.268059 | 17 |
| RCN1 | 4.557005 | 0.268059 | 17 |
| TBX15 | 4.011994 | 0.236 | 17 |
| FOXP1 | 5.473053 | 0.342066 | 16 |
| EBF3 | 5.279453 | 0.329966 | 16 |
| NAV2 | 5.163328 | 0.322708 | 16 |
| GLI2 | 8.377429 | 0.558495 | 15 |
| KIRREL3 | 5.753279 | 0.383552 | 15 |
| KNDC1 | 5.392565 | 0.359504 | 15 |
| BAIAP2 | 4.27612 | 0.285075 | 15 |
| SLX1B- | 4.264888 | 0.284326 | 15 |
| SULT1A4 | | | |
| SLX1A | 4.264888 | 0.284326 | 15 |
| LOC606724 | 4.264888 | 0.284326 | 15 |
| RPS6KA2 | 5.911852 | 0.422275 | 14 |
| CUX1 | 5.504203 | 0.393157 | 14 |
| MSI2 | 7.326236 | 0.563557 | 13 |
| MYT1L | 5.63385 | 0.433373 | 13 |
| KIF26B | 5.058706 | 0.389131 | 13 |
| GSE1 | 4.889862 | 0.376143 | 13 |
| CLYBL | 4.867994 | 0.374461 | 13 |
| ZC3H3 | 5.537883 | 0.46149 | 12 |
| ADGRD1 | 5.301199 | 0.441767 | 12 |
| TNS3 | 5.192588 | 0.432716 | 12 |
| CMIP | 4.83491 | 0.402909 | 12 |
| MIRLET7BHG | 4.293505 | 0.357792 | 12 |
| MAML3 | 4.005847 | 0.333821 | 12 |
| ZC3H12D | 7.258058 | 0.659823 | 11 |
| TBCD | 4.863163 | 0.442106 | 11 |
| GLUD1P2 | 4.329645 | 0.393604 | 11 |
| ACOT7 | 4.973412 | 0.497341 | 10 |
| PITX2 | 4.414111 | 0.441411 | 10 |
| ADGRA1 | 4.322472 | 0.432247 | 10 |
| SND1 | 5.8504 | 0.650044 | 9 |
| ATP11A | 5.752276 | 0.639142 | 9 |
| ADAMTS2 | 4.993887 | 0.554876 | 9 |
| CACNA2D4 | 4.607028 | 0.511892 | 9 |
| ZNF833P | 4.412196 | 0.490244 | 9 |
| AXIN2 | 4.31999 | 0.479999 | 9 |
| RUNX1 | 4.309572 | 0.478841 | 9 |
| SLC22A18 | 4.285245 | 0.476138 | 9 |
| MSRA | 4.847284 | 0.60591 | 8 |
| PRDM6 | 4.456104 | 0.557013 | 8 |
| LINC00311 | 4.311468 | 0.538934 | 8 |
| DLEU1 | 4.263023 | 0.532878 | 8 |
| AFF3 | 4.025175 | 0.503147 | 8 |
| NAV1 | 5.601169 | 0.800167 | 7 |
| DUSP6 | 4.205483 | 0.600783 | 7 |
| TBR1 | 4.175176 | 0.596454 | 7 |
| LHX2 | 4.10337 | 0.586196 | 7 |
| SATB2-AS1 | 4.803834 | 0.800639 | 6 |
| FBXL18 | 4.26291 | 0.710485 | 6 |
| TSNAX-DISC1 | 5.572732 | 1.114546 | 5 |
| ARHGEF7 | 4.651486 | 0.930297 | 5 |
| PRR5L | 4.485171 | 0.897034 | 5 |
| RBMS3 | 5.367267 | 1.341817 | 4 |
| VOPP1 | 4.143062 | 1.035765 | 4 |
| SLC25A10 | 4.685335 | 2.342668 | 2 |
| ANKLE2 | 4.116607 | 2.058304 | 2 |

TABLE 40
Cancer Type EPN_PFA_2a

| Gene site | imp_sum | imp_mean | n |
|---|---|---|---|
| PTPRN2 | 15.91598 | 0.194097 | 82 |
| PRDM16 | 23.91302 | 0.336803 | 71 |
| PCDHGA3 | 4.395619 | 0.0814 | 54 |
| PCDHGB1 | 4.395619 | 0.082936 | 53 |
| PCDHGA4 | 4.395619 | 0.086189 | 51 |
| PCDHGB2 | 4.395619 | 0.089707 | 49 |
| PCDHGA5 | 4.395619 | 0.093524 | 47 |
| HDAC4 | 14.58312 | 0.394138 | 37 |
| PAX6 | 12.40615 | 0.354462 | 35 |
| RBFOX3 | 9.246467 | 0.264185 | 35 |
| DIP2C | 11.2906 | 0.352831 | 32 |
| SOX2-OT | 8.738627 | 0.301332 | 29 |
| GALNT9 | 6.750716 | 0.250027 | 27 |
| ADARB2 | 8.387141 | 0.322582 | 26 |
| SHANK2 | 7.117336 | 0.273744 | 26 |
| AGAP1 | 9.061107 | 0.362444 | 25 |
| PDGFRA | 6.28606 | 0.251442 | 25 |
| CAMTA1 | 6.048119 | 0.241925 | 25 |
| SATB2 | 11.72 | 0.488333 | 24 |
| MEIS1 | 5.705858 | 0.237744 | 24 |
| RPTOR | 10.21814 | 0.444267 | 23 |
| NCOR2 | 7.929984 | 0.344782 | 23 |
| HOXB3 | 6.116576 | 0.265938 | 23 |
| RIMBP2 | 5.100058 | 0.221742 | 23 |
| INPP5A | 4.733123 | 0.205788 | 23 |
| PRKCZ | 8.624156 | 0.392007 | 22 |
| SKI | 9.70777 | 0.462275 | 21 |
| ZIC4 | 6.670683 | 0.317652 | 21 |
| HOXA-AS3 | 6.511321 | 0.310063 | 21 |
| ABR | 7.33488 | 0.366744 | 20 |
| SDK1 | 6.881182 | 0.344059 | 20 |
| FRMD4A | 5.001019 | 0.250051 | 20 |
| MAD1L1 | 10.76549 | 0.566605 | 19 |
| ZNF423 | 8.242158 | 0.433798 | 19 |
| CASZ1 | 6.766843 | 0.35615 | 19 |
| CFAP46 | 5.636312 | 0.296648 | 19 |
| SMG1P2 | 5.570027 | 0.293159 | 19 |
| BOLA2 | 5.570027 | 0.293159 | 19 |
| LOC613038 | 5.570027 | 0.293159 | 19 |
| SEPTIN9 | 8.545258 | 0.474737 | 18 |
| FOXK1 | 7.476101 | 0.415339 | 18 |
| TBC1D16 | 5.022636 | 0.279035 | 18 |
| PAX6-AS1 | 7.162201 | 0.421306 | 17 |
| RCN1 | 7.162201 | 0.421306 | 17 |
| OPCML | 7.013243 | 0.412544 | 17 |
| SIM1 | 5.849929 | 0.344113 | 17 |
| TBX15 | 5.613326 | 0.330196 | 17 |
| EBF3 | 6.450012 | 0.403126 | 16 |
| NAV2 | 5.462722 | 0.34142 | 16 |
| FOXP1 | 4.794453 | 0.299653 | 16 |
| GLI2 | 8.084175 | 0.538945 | 15 |
| EMX2OS | 5.703506 | 0.380234 | 15 |
| KNDC1 | 5.68967 | 0.379311 | 15 |
| KIRREL3 | 5.202305 | 0.34682 | 15 |
| DLX6-AS1 | 5.125709 | 0.341714 | 15 |
| SLX1B- | 5.009364 | 0.333958 | 15 |
| SULT1A4 | | | |
| SLX1A | 5.009364 | 0.333958 | 15 |
| LOC606724 | 5.009364 | 0.333958 | 15 |
| LRMDA | 4.712534 | 0.314169 | 15 |
| NFATC1 | 4.691042 | 0.312736 | 15 |
| NFIX | 4.567902 | 0.304527 | 15 |
| COL23A1 | 4.555395 | 0.303693 | 15 |
| BAIAP2 | 4.490191 | 0.299346 | 15 |
| RPS6KA2 | 7.827096 | 0.559078 | 14 |
| C7orf50 | 5.63246 | 0.402319 | 14 |
| PRKAG2 | 5.5359 | 0.395421 | 14 |
| CUX1 | 4.998438 | 0.357031 | 14 |
| MSI2 | 6.849053 | 0.52685 | 13 |
| CLYBL | 6.024401 | 0.463415 | 13 |
| KIF26B | 4.922835 | 0.37868 | 13 |
| MYT1L | 4.757005 | 0.365923 | 13 |
| MIR9-3HG | 4.576315 | 0.352024 | 13 |
| TBX4 | 5.54634 | 0.462195 | 12 |
| ZC3H3 | 5.30363 | 0.441969 | 12 |
| MIRLET7BHG | 4.931953 | 0.410996 | 12 |
| FBRSL1 | 4.927912 | 0.410659 | 12 |
| CMIP | 4.902181 | 0.408515 | 12 |
| TNS3 | 4.855115 | 0.404593 | 12 |
| RASA3 | 4.712357 | 0.392696 | 12 |
| ADGRD1 | 4.583055 | 0.381921 | 12 |
| ZC3H12D | 7.345878 | 0.667807 | 11 |
| CCDC140 | 4.570185 | 0.415471 | 11 |
| PITX2 | 5.128856 | 0.512886 | 10 |
| ACOT7 | 4.918146 | 0.491815 | 10 |
| SPPL2B | 4.624696 | 0.46247 | 10 |
| SND1 | 6.477967 | 0.719774 | 9 |
| ATP11A | 6.136883 | 0.681876 | 9 |
| ADAMTS2 | 4.85214 | 0.539127 | 9 |
| AXIN2 | 4.512541 | 0.501393 | 9 |
| MSRA | 5.754357 | 0.719295 | 8 |
| LINC00311 | 4.716263 | 0.589533 | 8 |
| SOX6 | 5.215185 | 0.745026 | 7 |
| ROR1 | 4.798833 | 0.799805 | 6 |
| SATB2-AS1 | 4.516259 | 0.75271 | 6 |
| CNPY1 | 5.6611 | 1.13222 | 5 |
| YJEFN3 | 5.459693 | 1.091939 | 5 |
| NDUFA13 | 5.459693 | 1.091939 | 5 |
| TSNAX-DISC1 | 5.227233 | 1.045447 | 5 |
| RBMS3 | 4.524161 | 1.13104 | 4 |
| SLC25A10 | 4.544005 | 2.272002 | 2 |

TABLE 41
Cancer Type EPN_PFA_2b

| Gene site | imp_sum | imp_mean | n |
|---|---|---|---|
| PTPRN2 | 16.4127 | 0.200155 | 82 |
| PRDM16 | 22.36941 | 0.315062 | 71 |
| PCDHGA1 | 6.212905 | 0.105303 | 59 |
| PCDHGA2 | 6.212905 | 0.108998 | 57 |
| PCDHGA3 | 6.212905 | 0.115054 | 54 |
| PCDHGB1 | 5.896519 | 0.111255 | 53 |
| PCDHGA4 | 5.896519 | 0.115618 | 51 |
| PCDHGB2 | 5.472043 | 0.111674 | 49 |
| PCDHGA5 | 5.155657 | 0.109695 | 47 |
| PCDHGB3 | 4.839271 | 0.112541 | 43 |
| HDAC4 | 14.80896 | 0.400242 | 37 |
| PAX6 | 13.46938 | 0.384839 | 35 |
| RBFOX3 | 9.79059 | 0.279731 | 35 |
| DIP2C | 10.95171 | 0.342241 | 32 |
| SOX2-OT | 6.22414 | 0.214626 | 29 |
| GALNT9 | 6.534668 | 0.242025 | 27 |
| ADARB2 | 9.127855 | 0.351071 | 26 |
| SHANK2 | 7.648487 | 0.294173 | 26 |
| AGAP1 | 10.27307 | 0.410923 | 25 |
| CAMTA1 | 5.472853 | 0.218914 | 25 |
| PDGFRA | 5.468118 | 0.218725 | 25 |
| SATB2 | 11.96168 | 0.498403 | 24 |
| RPTOR | 10.96186 | 0.476603 | 23 |
| NCOR2 | 7.371677 | 0.320508 | 23 |
| NXN | 5.650817 | 0.245688 | 23 |
| RIMBP2 | 5.223607 | 0.227113 | 23 |
| INPP5A | 5.095016 | 0.221522 | 23 |
| PRKCZ | 7.415118 | 0.337051 | 22 |
| SKI | 9.66072 | 0.460034 | 21 |
| HOXA-AS3 | 5.713977 | 0.272094 | 21 |
| ZIC4 | 5.294912 | 0.252139 | 21 |
| SDK1 | 7.395307 | 0.369765 | 20 |
| ABR | 6.916678 | 0.345834 | 20 |
| FRMD4A | 5.148597 | 0.25743 | 20 |
| MAD1L1 | 11.11146 | 0.584814 | 19 |
| ZNF423 | 8.81835 | 0.464124 | 19 |
| CFAP46 | 6.346435 | 0.334023 | 19 |
| SMG1P2 | 6.214699 | 0.327089 | 19 |
| BOLA2 | 6.214699 | 0.327089 | 19 |
| LOC613038 | 6.214699 | 0.327089 | 19 |
| CASZ1 | 5.447154 | 0.286692 | 19 |
| KCNQ1 | 5.41355 | 0.284924 | 19 |
| SEPTIN9 | 7.560517 | 0.420029 | 18 |
| FOXK1 | 7.422858 | 0.412381 | 18 |
| TBC1D16 | 5.337114 | 0.296506 | 18 |
| PAX6-AS1 | 7.879274 | 0.463487 | 17 |
| RCN1 | 7.879274 | 0.463487 | 17 |
| SIM1 | 6.533671 | 0.384334 | 17 |
| OPCML | 6.023777 | 0.35434 | 17 |
| FOXP1 | 4.801912 | 0.300119 | 16 |
| NAV2 | 4.439677 | 0.27748 | 16 |
| GLI2 | 8.675359 | 0.578357 | 15 |
| KIRREL3 | 5.848906 | 0.389927 | 15 |
| KNDC1 | 5.36737 | 0.357825 | 15 |
| BAIAP2 | 4.920026 | 0.328002 | 15 |
| SLX1B- | 4.849583 | 0.323306 | 15 |
| SULT1A4 | | | |
| SLX1A | 4.849583 | 0.323306 | 15 |
| LOC606724 | 4.849583 | 0.323306 | 15 |
| LRMDA | 4.515397 | 0.301026 | 15 |
| RPS6KA2 | 7.297086 | 0.52122 | 14 |
| PRKAG2 | 5.45784 | 0.389846 | 14 |
| CUX1 | 5.375193 | 0.383942 | 14 |
| MSI2 | 7.013927 | 0.539533 | 13 |
| GSE1 | 4.576023 | 0.352002 | 13 |
| ADGRD1 | 5.774253 | 0.481188 | 12 |
| ZC3H3 | 5.25217 | 0.437681 | 12 |
| TBX4 | 5.04624 | 0.42052 | 12 |
| FBRSL1 | 4.714604 | 0.392884 | 12 |
| RASA3 | 4.589192 | 0.382433 | 12 |
| CMIP | 4.508705 | 0.375725 | 12 |
| ZC3H12D | 8.257341 | 0.750667 | 11 |
| FGFR2 | 7.598239 | 0.690749 | 11 |
| OTX1 | 5.952922 | 0.595292 | 10 |
| SPPL2B | 5.368011 | 0.536801 | 10 |
| IGF1R | 4.426751 | 0.442675 | 10 |
| SND1 | 5.88217 | 0.653574 | 9 |
| ATP11A | 5.318731 | 0.59097 | 9 |
| ADAMTS2 | 4.829158 | 0.536573 | 9 |
| RUNX1 | 4.626345 | 0.514038 | 9 |
| IGF2BP1 | 4.45 | 0.494444 | 9 |
| PRDM6 | 5.608682 | 0.701085 | 8 |
| DLEU1 | 5.328889 | 0.666111 | 8 |
| KIF26A | 4.561173 | 0.570147 | 8 |
| LHX4 | 4.421062 | 0.552633 | 8 |
| LINC00311 | 4.418239 | 0.55228 | 8 |
| MSRA | 4.328181 | 0.541023 | 8 |
| DUSP6 | 5.270804 | 0.752972 | 7 |
| NAV1 | 4.987175 | 0.712454 | 7 |
| SOX6 | 4.593669 | 0.656238 | 7 |
| SATB2-AS1 | 5.56202 | 0.927003 | 6 |
| ROR1 | 4.56876 | 0.76146 | 6 |
| YJEFN3 | 6.354918 | 1.270984 | 5 |
| NDUFA13 | 6.354918 | 1.270984 | 5 |
| CNPY1 | 4.812447 | 0.962489 | 5 |
| LOC100132215 | 4.778136 | 0.955627 | 5 |
| TSNAX-DISC1 | 4.722043 | 0.944409 | 5 |
| ARHGEF7 | 4.42906 | 0.885812 | 5 |
| PRR5L | 4.349745 | 0.869949 | 5 |
| RBMS3 | 5.220141 | 1.305035 | 4 |
| SLC25A10 | 4.703802 | 2.351901 | 2 |

TABLE 42
Cancer Type EPN_PFA_2c

| Gene site | imp_sum | imp_mean | n |
|---|---|---|---|
| PTPRN2 | 11.6565 | 0.142152 | 82 |
| PRDM16 | 23.70492 | 0.333872 | 71 |
| PCDHGA1 | 4.37733 | 0.074192 | 59 |
| PCDHGA2 | 4.37733 | 0.076795 | 57 |
| PCDHGA3 | 4.37733 | 0.081062 | 54 |
| PCDHGB1 | 4.37733 | 0.082591 | 53 |
| PCDHGA4 | 4.37733 | 0.08583 | 51 |
| PCDHGB2 | 4.060944 | 0.082876 | 49 |
| PCDHGA5 | 4.060944 | 0.086403 | 47 |
| HDAC4 | 13.29829 | 0.359413 | 37 |
| PAX6 | 14.48402 | 0.413829 | 35 |
| RBFOX3 | 6.241908 | 0.17834 | 35 |
| DIP2C | 8.787136 | 0.274598 | 32 |
| SOX2-OT | 7.319255 | 0.252388 | 29 |
| GALNT9 | 6.266872 | 0.232106 | 27 |
| ADARB2 | 8.089442 | 0.311132 | 26 |
| SHANK2 | 6.05991 | 0.233073 | 26 |
| AGAP1 | 8.374534 | 0.334981 | 25 |
| PDGFRA | 5.01173 | 0.200469 | 25 |
| CAMTA1 | 4.487403 | 0.179496 | 25 |
| SATB2 | 8.753201 | 0.364717 | 24 |
| MEIS1 | 4.083446 | 0.170144 | 24 |
| RPTOR | 9.988587 | 0.434286 | 23 |
| NCOR2 | 6.55577 | 0.285033 | 23 |
| HOXB3 | 5.776906 | 0.25117 | 23 |
| RIMBP2 | 5.376796 | 0.233774 | 23 |
| NXN | 4.613719 | 0.200596 | 23 |
| PRKCZ | 7.616692 | 0.346213 | 22 |
| SKI | 9.345082 | 0.445004 | 21 |
| ZIC4 | 5.183042 | 0.246812 | 21 |
| SDK1 | 7.884654 | 0.394233 | 20 |
| FRMD4A | 6.143578 | 0.307179 | 20 |
| ABR | 5.536943 | 0.276847 | 20 |
| MAD1L1 | 11.41524 | 0.600802 | 19 |
| ZNF423 | 8.664317 | 0.456017 | 19 |
| CFAP46 | 5.304846 | 0.279202 | 19 |
| SMG1P2 | 4.825948 | 0.253997 | 19 |
| BOLA2 | 4.825948 | 0.253997 | 19 |
| LOC613038 | 4.825948 | 0.253997 | 19 |
| CASZ1 | 4.66076 | 0.245303 | 19 |
| KCNQ1 | 4.603715 | 0.242301 | 19 |
| SEPTIN9 | 8.788187 | 0.488233 | 18 |
| FOXK1 | 6.147356 | 0.34152 | 18 |
| TBC1D16 | 5.28406 | 0.293559 | 18 |
| PAX6-AS1 | 5.994998 | 0.352647 | 17 |
| RCN1 | 5.994998 | 0.352647 | 17 |
| OPCML | 5.742541 | 0.337797 | 17 |
| NAV2 | 5.608379 | 0.350524 | 16 |
| EBF3 | 5.075295 | 0.317206 | 16 |
| FOXP1 | 4.729745 | 0.295609 | 16 |
| GLI2 | 7.42542 | 0.495028 | 15 |
| BAIAP2 | 4.950271 | 0.330018 | 15 |
| LRMDA | 4.691617 | 0.312774 | 15 |
| NFATC1 | 4.682222 | 0.312148 | 15 |
| KNDC1 | 4.580988 | 0.305399 | 15 |
| NFIX | 4.565442 | 0.304363 | 15 |
| EMX2OS | 4.433473 | 0.295565 | 15 |
| RPS6KA2 | 8.526582 | 0.609042 | 14 |
| CUX1 | 6.091662 | 0.435119 | 14 |
| PRKAG2 | 5.14939 | 0.367814 | 14 |
| C7orf50 | 5.013166 | 0.358083 | 14 |
| ARHGEF10 | 4.177837 | 0.298417 | 14 |
| MSI2 | 6.653697 | 0.511823 | 13 |
| KIF26B | 5.568032 | 0.42831 | 13 |
| CLYBL | 5.510349 | 0.423873 | 13 |
| MYT1L | 5.126763 | 0.394366 | 13 |
| ZC3H3 | 4.978083 | 0.41484 | 12 |
| ADGRD1 | 4.926207 | 0.410517 | 12 |
| CMIP | 4.886292 | 0.407191 | 12 |
| TNS3 | 4.622121 | 0.385177 | 12 |
| FBRSL1 | 4.094101 | 0.341175 | 12 |
| ZC3H12D | 7.253406 | 0.659401 | 11 |
| CCDC140 | 5.226762 | 0.47516 | 11 |
| VGLL4 | 4.634901 | 0.421355 | 11 |
| ACOT7 | 5.075241 | 0.507524 | 10 |
| ATP11A | 6.340161 | 0.704462 | 9 |
| SND1 | 6.218579 | 0.690953 | 9 |
| RUNX1 | 4.884786 | 0.542754 | 9 |
| SLC22A18 | 4.190517 | 0.465613 | 9 |
| ADAMTS2 | 4.018914 | 0.446546 | 9 |
| CACNA2D4 | 3.999655 | 0.444406 | 9 |
| MSRA | 4.921088 | 0.615136 | 8 |
| LMX1B | 4.536467 | 0.567058 | 8 |
| PRDM6 | 4.518116 | 0.564764 | 8 |
| DLEU1 | 4.483962 | 0.560495 | 8 |
| LINC00311 | 4.213928 | 0.526741 | 8 |
| KIF26A | 4.10704 | 0.51338 | 8 |
| TENM3-AS1 | 4.767356 | 0.681051 | 7 |
| C1orf94 | 4.572866 | 0.653267 | 7 |
| HOXB-AS3 | 4.288964 | 0.612709 | 7 |
| NAV1 | 4.213013 | 0.601859 | 7 |
| DUSP6 | 4.100914 | 0.585845 | 7 |
| SATB2-AS1 | 4.979445 | 0.829907 | 6 |
| CNPY1 | 5.302207 | 1.060441 | 5 |
| TSNAX-DISC1 | 4.636077 | 0.927215 | 5 |
| PRR5L | 4.341445 | 0.868289 | 5 |
| RUNDC3A | 4.159525 | 0.831905 | 5 |
| RBMS3 | 4.617734 | 1.154433 | 4 |
| SLC25A10 | 4.631508 | 2.315754 | 2 |
| ANKLE2 | 4.023139 | 2.01157 | 2 |

TABLE 43
Cancer Type EPN_PFB_1

| Gene site | imp_sum | imp_mean | n |
|---|---|---|---|
| PTPRN2 | 14.34232 | 0.174906 | 82 |
| PRDM16 | 19.15675 | 0.269813 | 71 |
| PCDHGB1 | 3.436915 | 0.064847 | 53 |
| PCDHGB2 | 3.436915 | 0.070141 | 49 |
| PCDHGA5 | 3.436915 | 0.073126 | 47 |
| PCDHGB3 | 3.436915 | 0.079928 | 43 |
| PCDHGA6 | 3.553808 | 0.088845 | 40 |
| HDAC4 | 9.949331 | 0.268901 | 37 |
| PCDHGA7 | 3.870194 | 0.1046 | 37 |
| PAX6 | 14.36937 | 0.410553 | 35 |
| RBFOX3 | 7.486781 | 0.213908 | 35 |
| PCDHGB4 | 3.870194 | 0.110577 | 35 |
| PCDHGA8 | 3.870194 | 0.110577 | 35 |
| DIP2C | 10.83914 | 0.338723 | 32 |
| SOX2-OT | 8.596926 | 0.296446 | 29 |
| GALNT9 | 6.171874 | 0.228588 | 27 |
| SHANK2 | 7.985448 | 0.307133 | 26 |
| ADARB2 | 4.97106 | 0.191195 | 26 |
| AGAP1 | 7.294908 | 0.291796 | 25 |
| CAMTA1 | 5.086112 | 0.203444 | 25 |
| SATB2 | 6.296275 | 0.262345 | 24 |
| RPTOR | 8.152366 | 0.354451 | 23 |
| HOXB3 | 5.319994 | 0.231304 | 23 |
| RIMBP2 | 4.533346 | 0.197102 | 23 |
| INPP5A | 4.21213 | 0.183136 | 23 |
| NCOR2 | 3.666971 | 0.159434 | 23 |
| PRKCZ | 4.701794 | 0.213718 | 22 |
| SKI | 7.691187 | 0.366247 | 21 |
| ZIC4 | 6.763892 | 0.32209 | 21 |
| SDK1 | 5.929341 | 0.296467 | 20 |
| FRMD4A | 5.310431 | 0.265522 | 20 |
| MAD1L1 | 9.899326 | 0.521017 | 19 |
| ZNF423 | 8.938096 | 0.470426 | 19 |
| CASZ1 | 5.802896 | 0.305416 | 19 |
| SMG1P2 | 4.4044 | 0.231811 | 19 |
| BOLA2 | 4.4044 | 0.231811 | 19 |
| LOC613038 | 4.4044 | 0.231811 | 19 |
| FOXK1 | 7.895185 | 0.438621 | 18 |
| SEPTIN9 | 6.791985 | 0.377333 | 18 |
| ANKRD11 | 5.579274 | 0.30996 | 18 |
| TBC1D16 | 5.542428 | 0.307913 | 18 |
| OPCML | 5.939946 | 0.349409 | 17 |
| PAX6-AS1 | 5.00947 | 0.294675 | 17 |
| RCN1 | 5.00947 | 0.294675 | 17 |
| SIM1 | 3.834599 | 0.225565 | 17 |
| FOXP1 | 5.652189 | 0.353262 | 16 |
| NAV2 | 4.151343 | 0.259459 | 16 |
| GLI2 | 10.6818 | 0.71212 | 15 |
| BAIAP2 | 4.41495 | 0.29433 | 15 |
| KNDC1 | 4.348924 | 0.289928 | 15 |
| ZBTB20 | 3.707767 | 0.247184 | 15 |
| RPS6KA2 | 6.415394 | 0.458242 | 14 |
| PRKAG2 | 5.699687 | 0.40712 | 14 |
| CUX1 | 5.448411 | 0.389172 | 14 |
| IQSEC1 | 4.576315 | 0.32688 | 14 |
| C7orf50 | 4.191569 | 0.299398 | 14 |
| TBX5 | 3.814253 | 0.272447 | 14 |
| MIR548F5 | 3.520189 | 0.251442 | 14 |
| GSE1 | 5.18713 | 0.39901 | 13 |
| MYT1L | 4.935413 | 0.379647 | 13 |
| MSI2 | 4.665388 | 0.358876 | 13 |
| RFX4 | 4.204038 | 0.323388 | 13 |
| KIF26B | 4.056407 | 0.312031 | 13 |
| CLYBL | 3.462787 | 0.266368 | 13 |
| ZC3H3 | 5.412723 | 0.45106 | 12 |
| MIRLET7BHG | 4.697784 | 0.391482 | 12 |
| TNS3 | 4.627592 | 0.385633 | 12 |
| CMIP | 4.384051 | 0.365338 | 12 |
| MAML3 | 3.565524 | 0.297127 | 12 |
| RASA3 | 3.47917 | 0.289931 | 12 |
| VGLL4 | 3.684002 | 0.334909 | 11 |
| ZC3H12D | 3.516208 | 0.319655 | 11 |
| ACOT7 | 4.804751 | 0.480475 | 10 |
| SH3RF3 | 3.992997 | 0.3993 | 10 |
| NR2F1-AS1 | 3.661456 | 0.366146 | 10 |
| AKAP13 | 3.469122 | 0.346912 | 10 |
| SND1 | 6.320565 | 0.702285 | 9 |
| ATP11A | 5.097164 | 0.566352 | 9 |
| ADAMTS2 | 4.443487 | 0.493721 | 9 |
| KAZN | 3.745411 | 0.416157 | 9 |
| IGF2BP1 | 3.449928 | 0.383325 | 9 |
| RORA | 5.794622 | 0.724328 | 8 |
| AFF3 | 4.712983 | 0.589123 | 8 |
| LHX4 | 4.609795 | 0.576224 | 8 |
| DLEU1 | 4.327767 | 0.540971 | 8 |
| LINC00311 | 4.047595 | 0.505949 | 8 |
| MSRA | 4.01467 | 0.501834 | 8 |
| DUSP6 | 4.033287 | 0.576184 | 7 |
| RXRA | 3.800895 | 0.542985 | 7 |
| SLC22A18AS | 3.913593 | 0.652265 | 6 |
| MIR100HG | 3.468902 | 0.57815 | 6 |
| TSNAX-DISC1 | 4.330247 | 0.866049 | 5 |
| RUNDC3A | 4.179604 | 0.835921 | 5 |
| PRR5L | 3.888385 | 0.777677 | 5 |
| HOXB6 | 3.711412 | 0.742282 | 5 |
| BCAR1 | 3.496141 | 0.699228 | 5 |
| VOPP1 | 3.945338 | 0.986334 | 4 |
| DTNA | 3.457698 | 0.864424 | 4 |
| SLC25A10 | 4.417827 | 2.208914 | 2 |
| ANKLE2 | 3.597331 | 1.798665 | 2 |

TABLE 44
Cancer Type EPN_PFB_2

| Gene site | imp_sum | imp_mean | n |
|---|---|---|---|
| PTPRN2 | 10.64422 | 0.129808 | 82 |
| PRDM16 | 20.94126 | 0.294947 | 71 |
| PCDHGA1 | 4.625461 | 0.078398 | 59 |
| PCDHGA2 | 4.309075 | 0.075598 | 57 |
| PCDHGA3 | 4.309075 | 0.079798 | 54 |
| PCDHGB1 | 4.309075 | 0.081303 | 53 |
| PCDHGA4 | 4.309075 | 0.084492 | 51 |
| PCDHGB2 | 4.309075 | 0.08794 | 49 |
| PCDHGA5 | 4.309075 | 0.091682 | 47 |
| PCDHGB3 | 4.309075 | 0.100211 | 43 |
| HDAC4 | 9.160366 | 0.247577 | 37 |
| PAX6 | 12.17926 | 0.347979 | 35 |
| RBFOX3 | 8.260381 | 0.236011 | 35 |
| DIP2C | 9.945545 | 0.310798 | 32 |
| SOX2-OT | 7.444734 | 0.256715 | 29 |
| GALNT9 | 3.714889 | 0.137588 | 27 |
| ADARB2 | 7.560911 | 0.290804 | 26 |
| SHANK2 | 7.534784 | 0.289799 | 26 |
| AGAP1 | 6.452711 | 0.258108 | 25 |
| CAMTA1 | 6.356277 | 0.254251 | 25 |
| SATB2 | 5.476687 | 0.228195 | 24 |
| MEIS1 | 3.786328 | 0.157764 | 24 |
| RPTOR | 10.50927 | 0.456925 | 23 |
| NCOR2 | 5.665408 | 0.246322 | 23 |
| HOXB3 | 5.333976 | 0.231912 | 23 |
| INPP5A | 4.486591 | 0.195069 | 23 |
| PRKCZ | 4.776667 | 0.217121 | 22 |
| SKI | 7.723905 | 0.367805 | 21 |
| ZIC4 | 5.592501 | 0.26631 | 21 |
| HOXA-AS3 | 3.813032 | 0.181573 | 21 |
| SIM2 | 3.689477 | 0.175689 | 21 |
| ABR | 5.02434 | 0.251217 | 20 |
| SDK1 | 4.985671 | 0.249284 | 20 |
| FRMD4A | 3.900745 | 0.195037 | 20 |
| MAD1L1 | 10.37438 | 0.54602 | 19 |
| ZNF423 | 7.72118 | 0.406378 | 19 |
| CASZ1 | 6.641635 | 0.34956 | 19 |
| SMG1P2 | 4.909237 | 0.258381 | 19 |
| BOLA2 | 4.909237 | 0.258381 | 19 |
| LOC613038 | 4.909237 | 0.258381 | 19 |
| CFAP46 | 3.84721 | 0.202485 | 19 |
| FOXK1 | 6.551795 | 0.363989 | 18 |
| TBC1D16 | 5.057483 | 0.280971 | 18 |
| SEPTIN9 | 4.458712 | 0.247706 | 18 |
| HOXA3 | 4.091188 | 0.227288 | 18 |
| OPCML | 6.375074 | 0.375004 | 17 |
| PAX6-AS1 | 4.454477 | 0.262028 | 17 |
| RCN1 | 4.454477 | 0.262028 | 17 |
| EBF3 | 4.717717 | 0.294857 | 16 |
| NAV2 | 4.486574 | 0.280411 | 16 |
| FOXP1 | 4.178346 | 0.261147 | 16 |
| GLI2 | 9.179313 | 0.611954 | 15 |
| BAIAP2 | 4.301727 | 0.286782 | 15 |
| KIRREL3 | 3.88947 | 0.259298 | 15 |
| KNDC1 | 3.806155 | 0.253744 | 15 |
| CUX1 | 5.473789 | 0.390985 | 14 |
| RPS6KA2 | 4.773826 | 0.340988 | 14 |
| IQSEC1 | 4.576661 | 0.326904 | 14 |
| PRKAG2 | 4.566589 | 0.326185 | 14 |
| MSI2 | 6.194145 | 0.476473 | 13 |
| HOXC4 | 5.120243 | 0.393865 | 13 |
| GSE1 | 4.956749 | 0.381288 | 13 |
| CLYBL | 4.880451 | 0.375419 | 13 |
| RFX4 | 4.176726 | 0.321287 | 13 |
| KIF26B | 3.550082 | 0.273083 | 13 |
| TNS3 | 4.732704 | 0.394392 | 12 |
| ZC3H3 | 4.458258 | 0.371522 | 12 |
| MIRLET7BHG | 3.820327 | 0.318361 | 12 |
| ADGRD1 | 3.795001 | 0.31625 | 12 |
| MEIS2 | 3.703953 | 0.308663 | 12 |
| CMIP | 3.662126 | 0.305177 | 12 |
| ZC3H12D | 6.308579 | 0.573507 | 11 |
| VGLL4 | 4.51024 | 0.410022 | 11 |
| FGFR2 | 4.33965 | 0.394514 | 11 |
| ACOT7 | 5.294485 | 0.529449 | 10 |
| SH3RF3 | 3.765773 | 0.376577 | 10 |
| SND1 | 6.409491 | 0.712166 | 9 |
| ATP11A | 5.546325 | 0.616258 | 9 |
| ADAMTS2 | 5.51799 | 0.61311 | 9 |
| RUNX1 | 4.372101 | 0.485789 | 9 |
| GPC6 | 4.279437 | 0.475493 | 9 |
| SLC22A18 | 4.057507 | 0.450834 | 9 |
| TSPAN9 | 3.972817 | 0.441424 | 9 |
| DLEU1 | 5.051633 | 0.631454 | 8 |
| LINC00311 | 3.977828 | 0.497228 | 8 |
| TRAPPC9 | 3.716779 | 0.464597 | 8 |
| LHX4 | 3.668568 | 0.458571 | 8 |
| NAV1 | 5.538133 | 0.791162 | 7 |
| RXRA | 4.146925 | 0.592418 | 7 |
| CXXC5 | 3.870947 | 0.552992 | 7 |
| HOXB-AS3 | 3.664901 | 0.523557 | 7 |
| PRR5L | 4.522524 | 0.904505 | 5 |
| RUNDC3A | 4.510368 | 0.902074 | 5 |
| HOXB6 | 3.934206 | 0.786841 | 5 |
| BCAR1 | 3.763479 | 0.752696 | 5 |
| RBMS3 | 5.001333 | 1.250333 | 4 |
| VOPP1 | 3.885374 | 0.971344 | 4 |
| DTNA | 3.583953 | 0.895988 | 4 |
| SLC25A10 | 4.433538 | 2.216769 | 2 |
| ANKLE2 | 3.768291 | 1.884146 | 2 |

TABLE 45
Cancer Type EPN_PFB_3

| Gene site | imp_sum | imp_mean | n |
|---|---|---|---|
| PTPRN2 | 11.25944 | 0.13731 | 82 |
| PRDM16 | 10.83668 | 0.152629 | 71 |
| PCDHGA1 | 4.725174 | 0.080088 | 59 |
| PCDHGA2 | 4.725174 | 0.082898 | 57 |
| PCDHGA3 | 4.725174 | 0.087503 | 54 |
| PCDHGB1 | 4.725174 | 0.089154 | 53 |
| PCDHGA4 | 4.725174 | 0.09265 | 51 |
| PCDHGB2 | 4.725174 | 0.096432 | 49 |
| PCDHGA5 | 4.725174 | 0.100536 | 47 |
| PCDHGB3 | 4.420877 | 0.102811 | 43 |
| HDAC4 | 10.7486 | 0.290503 | 37 |
| RBFOX3 | 7.590022 | 0.216858 | 35 |
| PAX6 | 3.458426 | 0.098812 | 35 |
| DIP2C | 10.01905 | 0.313095 | 32 |
| SOX2-OT | 3.796971 | 0.13093 | 29 |
| GALNT9 | 5.113729 | 0.189397 | 27 |
| SHANK2 | 7.883804 | 0.303223 | 26 |
| ADARB2 | 3.627241 | 0.139509 | 26 |
| AGAP1 | 7.079758 | 0.28319 | 25 |
| CAMTA1 | 6.428511 | 0.25714 | 25 |
| PDGFRA | 4.221835 | 0.168873 | 25 |
| RPTOR | 9.645559 | 0.419372 | 23 |
| NCOR2 | 6.617263 | 0.287707 | 23 |
| HOXB3 | 3.617653 | 0.157289 | 23 |
| PRKCZ | 3.516451 | 0.159839 | 22 |
| SKI | 8.472504 | 0.403453 | 21 |
| ZIC4 | 4.417608 | 0.210362 | 21 |
| ABR | 6.032617 | 0.301631 | 20 |
| FRMD4A | 5.405346 | 0.270267 | 20 |
| SDK1 | 4.210196 | 0.21051 | 20 |
| MAD1L1 | 9.027777 | 0.475146 | 19 |
| ZNF423 | 8.819575 | 0.464188 | 19 |
| CASZ1 | 7.223512 | 0.380185 | 19 |
| SMG1P2 | 4.699263 | 0.24733 | 19 |
| BOLA2 | 4.699263 | 0.24733 | 19 |
| LOC613038 | 4.699263 | 0.24733 | 19 |
| KCNQ1 | 3.721046 | 0.195845 | 19 |
| FOXK1 | 6.592575 | 0.366254 | 18 |
| TBC1D16 | 5.752235 | 0.319569 | 18 |
| SEPTIN9 | 5.262248 | 0.292347 | 18 |
| MCF2L | 3.453333 | 0.191852 | 18 |
| PAX6-AS1 | 4.768791 | 0.280517 | 17 |
| RCN1 | 4.768791 | 0.280517 | 17 |
| OPCML | 4.277913 | 0.251642 | 17 |
| NAV2 | 3.630784 | 0.226924 | 16 |
| FOXP1 | 3.541174 | 0.221323 | 16 |
| GLI2 | 8.564224 | 0.570948 | 15 |
| BAIAP2 | 6.205878 | 0.413725 | 15 |
| NFIX | 4.487322 | 0.299155 | 15 |
| SLX1B- | 3.45221 | 0.230147 | 15 |
| SULT1A4 | | | |
| SLX1A | 3.45221 | 0.230147 | 15 |
| LOC606724 | 3.45221 | 0.230147 | 15 |
| COL23A1 | 3.392095 | 0.22614 | 15 |
| RPS6KA2 | 5.650107 | 0.403579 | 14 |
| CUX1 | 4.699737 | 0.335695 | 14 |
| PRKAG2 | 4.307095 | 0.30765 | 14 |
| IQSEC1 | 3.413923 | 0.243852 | 14 |
| CACNA1H | 3.359408 | 0.239958 | 14 |
| MSI2 | 4.910911 | 0.377762 | 13 |
| GSE1 | 4.885898 | 0.375838 | 13 |
| MYT1L | 4.069793 | 0.313061 | 13 |
| KIF26B | 3.833933 | 0.294918 | 13 |
| MIRLET7BHG | 4.778635 | 0.39822 | 12 |
| ZC3H3 | 4.647555 | 0.387296 | 12 |
| CMIP | 4.240018 | 0.353335 | 12 |
| ADGRD1 | 3.971306 | 0.330942 | 12 |
| MAML3 | 3.603578 | 0.300298 | 12 |
| RASA3 | 3.385833 | 0.282153 | 12 |
| CTNNA2 | 3.281086 | 0.273424 | 12 |
| VGLL4 | 4.388228 | 0.39893 | 11 |
| TBCD | 3.611524 | 0.32832 | 11 |
| SPON2 | 3.420958 | 0.310996 | 11 |
| CTBP2 | 3.387802 | 0.307982 | 11 |
| RAD51B | 3.273957 | 0.297632 | 11 |
| AUTS2 | 4.1794 | 0.41794 | 10 |
| ACOT7 | 3.657825 | 0.365783 | 10 |
| ATP11A | 5.797338 | 0.644149 | 9 |
| SND1 | 5.407752 | 0.600861 | 9 |
| RUNX1 | 4.813294 | 0.53481 | 9 |
| TSPAN9 | 3.624113 | 0.402679 | 9 |
| CACNA2D4 | 3.508756 | 0.389862 | 9 |
| KAZN | 3.459391 | 0.384377 | 9 |
| ADAMTS2 | 3.387526 | 0.376392 | 9 |
| DLEU1 | 5.128955 | 0.641119 | 8 |
| RORA | 4.728827 | 0.591103 | 8 |
| LHX4 | 4.710325 | 0.588791 | 8 |
| AFF3 | 4.070909 | 0.508864 | 8 |
| MSRA | 3.470129 | 0.433766 | 8 |
| RXRA | 4.622069 | 0.660296 | 7 |
| NAV1 | 3.295544 | 0.470792 | 7 |
| LHX2 | 3.277039 | 0.468148 | 7 |
| RUNDC3A | 4.323891 | 0.864778 | 5 |
| TSNAX-DISC1 | 3.718752 | 0.74375 | 5 |
| IFT80 | 3.555972 | 0.711194 | 5 |
| BCAR1 | 3.455726 | 0.691145 | 5 |
| PRR5L | 3.445009 | 0.689002 | 5 |
| VOPP1 | 3.63351 | 0.908377 | 4 |
| RBMS3 | 3.507961 | 0.87699 | 4 |
| SLC25A10 | 4.224294 | 2.112147 | 2 |
| ANKLE2 | 3.376797 | 1.688399 | 2 |

TABLE 46
Cancer Type EPN_PFB_4

| Gene site | imp_sum | imp_mean | n |
|---|---|---|---|
| PTPRN2 | 9.754981 | 0.118963 | 82 |
| PRDM16 | 13.42466 | 0.18908 | 71 |
| HDAC4 | 9.67948 | 0.261608 | 37 |
| RBFOX3 | 5.7616 | 0.164617 | 35 |
| PAX6 | 4.761217 | 0.136035 | 35 |
| DIP2C | 8.308398 | 0.259637 | 32 |
| SOX2-OT | 3.781182 | 0.130386 | 29 |
| GALNT9 | 3.659274 | 0.135529 | 27 |
| SHANK2 | 4.397145 | 0.169121 | 26 |
| AGAP1 | 7.614459 | 0.304578 | 25 |
| CAMTA1 | 4.517669 | 0.180707 | 25 |
| PDGFRA | 3.958665 | 0.158347 | 25 |
| RPTOR | 9.507141 | 0.413354 | 23 |
| NCOR2 | 7.694682 | 0.334551 | 23 |
| HOXB3 | 4.353924 | 0.189301 | 23 |
| NXN | 3.725682 | 0.161986 | 23 |
| RIMBP2 | 2.932044 | 0.12748 | 23 |
| PRKCZ | 4.460639 | 0.202756 | 22 |
| SKI | 7.174851 | 0.34166 | 21 |
| ABR | 3.173557 | 0.158678 | 20 |
| MAD1L1 | 8.136349 | 0.428229 | 19 |
| ZNF423 | 7.654871 | 0.402888 | 19 |
| CASZ1 | 5.117286 | 0.269331 | 19 |
| SMG1P2 | 3.870562 | 0.203714 | 19 |
| BOLA2 | 3.870562 | 0.203714 | 19 |
| LOC613038 | 3.870562 | 0.203714 | 19 |
| KCNQ1 | 2.770132 | 0.145796 | 19 |
| SEPTIN9 | 5.085943 | 0.282552 | 18 |
| FOXK1 | 3.982923 | 0.221274 | 18 |
| ANKRD11 | 3.179216 | 0.176623 | 18 |
| RBFOX1 | 2.833921 | 0.15744 | 18 |
| PAX6-AS1 | 6.991442 | 0.411261 | 17 |
| RCN1 | 6.991442 | 0.411261 | 17 |
| OPCML | 5.525355 | 0.325021 | 17 |
| SIM1 | 3.239462 | 0.190557 | 17 |
| TBX15 | 2.864971 | 0.168528 | 17 |
| HBG2 | 2.761104 | 0.162418 | 17 |
| FOXP1 | 4.56657 | 0.285411 | 16 |
| EBF3 | 3.552658 | 0.222041 | 16 |
| NAV2 | 3.185503 | 0.199094 | 16 |
| SORBS2 | 3.165694 | 0.197856 | 16 |
| GLI2 | 7.900942 | 0.526729 | 15 |
| BAIAP2 | 4.598937 | 0.306596 | 15 |
| NFIX | 4.032807 | 0.268854 | 15 |
| SLX1B- | 3.487957 | 0.23253 | 15 |
| SULT1A4 | | | |
| SLX1A | 3.487957 | 0.23253 | 15 |
| LOC606724 | 3.487957 | 0.23253 | 15 |
| KIRREL3 | 3.232994 | 0.215533 | 15 |
| LRMDA | 3.152952 | 0.210197 | 15 |
| RPS6KA2 | 5.767982 | 0.411999 | 14 |
| CUX1 | 4.361508 | 0.311536 | 14 |
| C7orf50 | 3.691524 | 0.26368 | 14 |
| ARHGEF10 | 3.185612 | 0.227544 | 14 |
| PRKAG2 | 3.118083 | 0.22272 | 14 |
| MSI2 | 5.350692 | 0.411592 | 13 |
| GSE1 | 4.20783 | 0.323679 | 13 |
| HOXC4 | 4.020625 | 0.309279 | 13 |
| RFX4 | 3.932162 | 0.302474 | 13 |
| KIF26B | 3.425524 | 0.263502 | 13 |
| CLYBL | 3.13253 | 0.240964 | 13 |
| ADGRD1 | 3.799622 | 0.316635 | 12 |
| ZC3H3 | 3.778042 | 0.314837 | 12 |
| TNS3 | 3.47612 | 0.289677 | 12 |
| RASA3 | 3.461626 | 0.288469 | 12 |
| MIRLET7BHG | 3.280793 | 0.273399 | 12 |
| CMIP | 3.237477 | 0.26979 | 12 |
| MEGF6 | 3.108194 | 0.259016 | 12 |
| LRBA | 2.98263 | 0.248553 | 12 |
| RAD51B | 4.407876 | 0.400716 | 11 |
| VGLL4 | 3.312149 | 0.301104 | 11 |
| SPON2 | 3.021012 | 0.274637 | 11 |
| ACOT7 | 4.363092 | 0.436309 | 10 |
| ADGRA1 | 3.005443 | 0.300544 | 10 |
| ANKS1B | 2.745824 | 0.274582 | 10 |
| SND1 | 6.445786 | 0.716198 | 9 |
| ATP11A | 3.993485 | 0.443721 | 9 |
| RUNX1 | 3.668851 | 0.40765 | 9 |
| ADAMTS2 | 3.344618 | 0.371624 | 9 |
| TSPAN9 | 3.203848 | 0.355983 | 9 |
| DLEU1 | 4.281097 | 0.535137 | 8 |
| MSRA | 4.095142 | 0.511893 | 8 |
| LHX4 | 3.732792 | 0.466599 | 8 |
| LINC00311 | 3.48934 | 0.436167 | 8 |
| AFF3 | 3.192509 | 0.399064 | 8 |
| MACROD1 | 3.049246 | 0.381156 | 8 |
| ESRRG | 2.782387 | 0.347798 | 8 |
| RXRA | 3.991019 | 0.570146 | 7 |
| PRKCA | 2.732046 | 0.390292 | 7 |
| SLC22A18AS | 3.21655 | 0.536092 | 6 |
| FAM181A | 3.132089 | 0.522015 | 6 |
| CRADD | 2.986429 | 0.497738 | 6 |
| PRR5L | 4.220856 | 0.844171 | 5 |
| RUNDC3A | 3.896503 | 0.779301 | 5 |
| TSNAX-DISC1 | 3.804691 | 0.760938 | 5 |
| IFT80 | 2.761688 | 0.552338 | 5 |
| CRB2 | 3.298683 | 0.824671 | 4 |
| VOPP1 | 2.967116 | 0.741779 | 4 |
| GRIN2B | 2.872451 | 0.957484 | 3 |
| DAGLB | 2.752212 | 0.917404 | 3 |
| SLC25A10 | 4.463499 | 2.23175 | 2 |

TABLE 47
Cancer Type EPN_PFB_5

| Gene site | imp_sum | imp_mean | n |
|---|---|---|---|
| PTPRN2 | 4.46851 | 0.054494 | 82 |
| PRDM16 | 6.483381 | 0.091315 | 71 |
| HDAC4 | 9.176118 | 0.248003 | 37 |
| PAX6 | 4.84465 | 0.138419 | 35 |
| RBFOX3 | 3.097536 | 0.088501 | 35 |
| DIP2C | 2.944686 | 0.092021 | 32 |
| SOX2-OT | 2.029367 | 0.069978 | 29 |
| ADARB2 | 3.327972 | 0.127999 | 26 |
| AGAP1 | 3.839349 | 0.153574 | 25 |
| CAMTA1 | 2.746112 | 0.109844 | 25 |
| PDGFRA | 2.255211 | 0.090208 | 25 |
| MEIS1 | 1.598138 | 0.066589 | 24 |
| INPP5A | 2.40014 | 0.104354 | 23 |
| RPTOR | 2.183762 | 0.094946 | 23 |
| RIMBP2 | 1.61115 | 0.07005 | 23 |
| PRKCZ | 2.212583 | 0.100572 | 22 |
| SKI | 5.060951 | 0.240998 | 21 |
| ZIC4 | 1.665744 | 0.079321 | 21 |
| SDK1 | 4.455208 | 0.22276 | 20 |
| FRMD4A | 2.685163 | 0.134258 | 20 |
| MAD1L1 | 5.054423 | 0.266022 | 19 |
| ZNF423 | 3.168039 | 0.166739 | 19 |
| FOXK1 | 3.297041 | 0.183169 | 18 |
| RBFOX1 | 2.862815 | 0.159045 | 18 |
| SEPTIN9 | 2.798426 | 0.155468 | 18 |
| OPCML | 2.522854 | 0.148403 | 17 |
| NAV2 | 3.636725 | 0.227295 | 16 |
| GLI2 | 3.249755 | 0.21665 | 15 |
| BAIAP2 | 2.020019 | 0.134668 | 15 |
| CUX1 | 2.880317 | 0.205737 | 14 |
| RPS6KA2 | 2.432854 | 0.173775 | 14 |
| MIR548F5 | 1.87059 | 0.133614 | 14 |
| KIF26B | 2.463411 | 0.189493 | 13 |
| RFX4 | 2.459586 | 0.189199 | 13 |
| MSI2 | 1.943557 | 0.149504 | 13 |
| MYT1L | 1.687426 | 0.129802 | 13 |
| ADGRD1 | 2.522095 | 0.210175 | 12 |
| FBRSL1 | 2.208379 | 0.184032 | 12 |
| ZC3H3 | 2.008673 | 0.167389 | 12 |
| MIRLET7BHG | 1.691575 | 0.140965 | 12 |
| MAML3 | 1.58193 | 0.131827 | 12 |
| ZC3H12D | 2.923161 | 0.265742 | 11 |
| CTBP2 | 2.005876 | 0.182352 | 11 |
| SH3RF3 | 2.498859 | 0.249886 | 10 |
| ACOT7 | 2.319072 | 0.231907 | 10 |
| WT1 | 2.219465 | 0.221947 | 10 |
| BCL11B | 2.138854 | 0.213885 | 10 |
| AKAP13 | 1.704292 | 0.170429 | 10 |
| SLC22A18 | 3.499743 | 0.38886 | 9 |
| SND1 | 3.135897 | 0.348433 | 9 |
| ATP11A | 3.070559 | 0.341173 | 9 |
| TSPAN9 | 2.635775 | 0.292864 | 9 |
| ADAMTS2 | 1.980199 | 0.220022 | 9 |
| AXIN2 | 1.953341 | 0.217038 | 9 |
| CACNA2D4 | 1.774977 | 0.19722 | 9 |
| RORA | 2.616519 | 0.327065 | 8 |
| MECOM | 2.340984 | 0.292623 | 8 |
| DLEU1 | 1.911684 | 0.23896 | 8 |
| NAV1 | 3.138964 | 0.448423 | 7 |
| ITPK1 | 1.998211 | 0.285459 | 7 |
| PITPNC1 | 1.855749 | 0.265107 | 7 |
| TACC2 | 1.700116 | 0.242874 | 7 |
| LHX2 | 1.65945 | 0.237064 | 7 |
| TAFA2 | 1.624949 | 0.232136 | 7 |
| C1orf94 | 1.615256 | 0.230751 | 7 |
| FBXL18 | 2.981045 | 0.496841 | 6 |
| LRRFIP1 | 2.215662 | 0.369277 | 6 |
| SLC22A18AS | 1.734773 | 0.289129 | 6 |
| DENND3 | 1.704292 | 0.284049 | 6 |
| FAM181A | 1.650962 | 0.27516 | 6 |
| PTPRG | 1.649666 | 0.274944 | 6 |
| PRR5L | 2.98927 | 0.597854 | 5 |
| RUNDC3A | 2.945389 | 0.589078 | 5 |
| AP2A2 | 2.327598 | 0.46552 | 5 |
| TSNAX-DISC1 | 2.19047 | 0.438094 | 5 |
| NRCAM | 1.974293 | 0.394859 | 5 |
| VAV2 | 1.700459 | 0.340092 | 5 |
| TENM4 | 3.56457 | 0.891143 | 4 |
| CRB2 | 2.560978 | 0.640245 | 4 |
| VOPP1 | 2.342273 | 0.585568 | 4 |
| HK1 | 1.730885 | 0.432721 | 4 |
| GCK | 3.08857 | 1.029523 | 3 |
| PLXNC1 | 2.249994 | 0.749998 | 3 |
| LRP2 | 2.090608 | 0.696869 | 3 |
| SLC6A9 | 1.844057 | 0.614686 | 3 |
| ZNF536 | 1.688754 | 0.562918 | 3 |
| GRIN2B | 1.622195 | 0.540732 | 3 |
| DAGLB | 1.612261 | 0.53742 | 3 |
| SLC25A10 | 3.804738 | 1.902369 | 2 |
| CHTF18 | 1.796626 | 0.898313 | 2 |
| ANKLE2 | 1.796345 | 0.898173 | 2 |
| PDE4D | 1.670607 | 0.835304 | 2 |
| MLLT1 | 1.607184 | 0.803592 | 2 |
| ZIC5 | 1.603097 | 0.801548 | 2 |
| RABGAP1L | 2.233425 | 2.233425 | 1 |
| RNF4 | 2.181539 | 2.181539 | 1 |
| ACAD10 | 2.071929 | 2.071929 | 1 |
| C10orf105 | 1.897344 | 1.897344 | 1 |
| GRTP1 | 1.739101 | 1.739101 | 1 |
| DPY19L1P1 | 1.654306 | 1.654306 | 1 |

TABLE 48
Cancer Type EPN_RELA_Like_A

| Gene site | imp_sum | imp_mean | n |
|---|---|---|---|
| PTPRN2 | 18.96264 | 0.231252 | 82 |
| PRDM16 | 17.17107 | 0.241846 | 71 |
| PCDHGA1 | 5.310824 | 0.090014 | 59 |
| PCDHGA2 | 5.310824 | 0.093172 | 57 |
| PCDHGA3 | 5.310824 | 0.098349 | 54 |
| PCDHGB1 | 5.310824 | 0.100204 | 53 |
| PCDHGA4 | 5.310824 | 0.104134 | 51 |
| PCDHGB2 | 5.30142 | 0.108192 | 49 |
| PCDHGA5 | 4.567029 | 0.097171 | 47 |
| PCDHGB3 | 4.250643 | 0.098852 | 43 |
| HDAC4 | 10.24476 | 0.276885 | 37 |
| PAX6 | 11.80595 | 0.337313 | 35 |
| RBFOX3 | 6.523044 | 0.186373 | 35 |
| DIP2C | 8.912799 | 0.278525 | 32 |
| PCDHGA9 | 4.120281 | 0.132912 | 31 |
| SOX2-OT | 6.262955 | 0.215964 | 29 |
| GALNT9 | 4.782744 | 0.177139 | 27 |
| ADARB2 | 6.83138 | 0.262745 | 26 |
| SHANK2 | 5.402521 | 0.207789 | 26 |
| AGAP1 | 9.977599 | 0.399104 | 25 |
| CAMTA1 | 7.307139 | 0.292286 | 25 |
| PDGFRA | 5.039539 | 0.201582 | 25 |
| SATB2 | 6.869827 | 0.286243 | 24 |
| MEIS1 | 4.057547 | 0.169064 | 24 |
| RPTOR | 10.63516 | 0.462398 | 23 |
| NCOR2 | 8.031995 | 0.349217 | 23 |
| RIMBP2 | 6.227338 | 0.270754 | 23 |
| INPP5A | 4.07289 | 0.177082 | 23 |
| PRKCZ | 6.578606 | 0.299028 | 22 |
| SKI | 12.54878 | 0.597561 | 21 |
| FRMD4A | 6.162069 | 0.308103 | 20 |
| ABR | 5.331761 | 0.266588 | 20 |
| CASZ1 | 12.44942 | 0.655233 | 19 |
| ZNF423 | 10.80291 | 0.568574 | 19 |
| MAD1L1 | 10.12687 | 0.532993 | 19 |
| SMG1P2 | 5.095489 | 0.268184 | 19 |
| BOLA2 | 5.095489 | 0.268184 | 19 |
| LOC613038 | 5.095489 | 0.268184 | 19 |
| FOXK1 | 5.739273 | 0.318849 | 18 |
| SEPTIN9 | 5.347458 | 0.297081 | 18 |
| ANKRD11 | 4.533038 | 0.251835 | 18 |
| TBC1D16 | 4.319345 | 0.239964 | 18 |
| OPCML | 7.479851 | 0.439991 | 17 |
| PAX6-AS1 | 4.50606 | 0.265062 | 17 |
| RCN1 | 4.50606 | 0.265062 | 17 |
| FOXP1 | 5.290618 | 0.330664 | 16 |
| EBF3 | 4.42745 | 0.276716 | 16 |
| GLI2 | 8.995217 | 0.599681 | 15 |
| BAIAP2 | 5.866399 | 0.391093 | 15 |
| KIRREL3 | 5.358859 | 0.357257 | 15 |
| NFIX | 5.357149 | 0.357143 | 15 |
| ZBTB20 | 4.91273 | 0.327515 | 15 |
| CUX1 | 5.73646 | 0.409747 | 14 |
| RPS6KA2 | 5.57806 | 0.398433 | 14 |
| C7orf50 | 4.361648 | 0.311546 | 14 |
| MSI2 | 6.655446 | 0.511957 | 13 |
| MYT1L | 4.804576 | 0.369583 | 13 |
| KIF26B | 4.424066 | 0.340313 | 13 |
| CLYBL | 4.212438 | 0.324034 | 13 |
| GSE1 | 3.963453 | 0.304881 | 13 |
| ZC3H3 | 6.297857 | 0.524821 | 12 |
| CMIP | 5.610394 | 0.467533 | 12 |
| TNS3 | 5.516677 | 0.459723 | 12 |
| MIRLET7BHG | 5.302931 | 0.441911 | 12 |
| MAML3 | 4.779313 | 0.398276 | 12 |
| ZC3H12D | 5.434465 | 0.494042 | 11 |
| SPON2 | 4.314227 | 0.392202 | 11 |
| CTBP2 | 4.268214 | 0.388019 | 11 |
| ACOT7 | 5.073081 | 0.507308 | 10 |
| AKAP13 | 4.530778 | 0.453078 | 10 |
| IGF1R | 3.911352 | 0.391135 | 10 |
| SND1 | 5.767781 | 0.640865 | 9 |
| ATP11A | 5.572346 | 0.61915 | 9 |
| ASAP1 | 5.194917 | 0.577213 | 9 |
| KCNH2 | 5.12592 | 0.569547 | 9 |
| ADAMTS2 | 4.690699 | 0.521189 | 9 |
| KAZN | 4.625799 | 0.513978 | 9 |
| GPC6 | 4.588583 | 0.509843 | 9 |
| SLC22A18 | 4.576435 | 0.508493 | 9 |
| TSPAN9 | 4.438942 | 0.493216 | 9 |
| NOTCH1 | 4.239227 | 0.471025 | 9 |
| PACS2 | 4.130017 | 0.458891 | 9 |
| TRAPPC12 | 4.122235 | 0.458026 | 9 |
| LHX4 | 5.440953 | 0.680119 | 8 |
| DLEU1 | 5.334289 | 0.666786 | 8 |
| MSRA | 4.729411 | 0.591176 | 8 |
| LINC00311 | 4.337721 | 0.542215 | 8 |
| NRXN1 | 3.917334 | 0.489667 | 8 |
| PPP2R2B | 3.884981 | 0.485623 | 8 |
| KDM4B | 4.077813 | 0.679636 | 6 |
| SLC22A18AS | 3.993219 | 0.665537 | 6 |
| RUNDC3A | 4.824861 | 0.964972 | 5 |
| KLHL25 | 4.759709 | 0.951942 | 5 |
| ARHGEF7 | 4.23351 | 0.846702 | 5 |
| TSNAX-DISC1 | 4.134782 | 0.826956 | 5 |
| CACNA1I | 4.067336 | 0.813467 | 5 |
| RAPGEF4 | 3.934423 | 0.786885 | 5 |
| NDST1 | 4.171788 | 1.042947 | 4 |
| RBMS3 | 4.018327 | 1.004582 | 4 |
| ANKLE2 | 3.901795 | 1.950898 | 2 |

TABLE 49
Cancer Type EPN_RELA_Like_B

| Gene site | imp_sum | imp_mean | n |
|---|---|---|---|
| PTPRN2 | 8.75796 | 0.106804 | 82 |
| PRDM16 | 7.915152 | 0.111481 | 71 |
| PCDHGA1 | 3.231128 | 0.054765 | 59 |
| PCDHGA2 | 2.914742 | 0.051136 | 57 |
| PCDHGA3 | 2.598356 | 0.048118 | 54 |
| PCDHGB1 | 2.598356 | 0.049026 | 53 |
| PCDHGB2 | 2.598356 | 0.053028 | 49 |
| PCDHGA5 | 2.598356 | 0.055284 | 47 |
| HDAC4 | 7.807278 | 0.211008 | 37 |
| PAX6 | 4.474432 | 0.127841 | 35 |
| RBFOX3 | 3.785148 | 0.108147 | 35 |
| DIP2C | 8.212701 | 0.256647 | 32 |
| SHANK2 | 3.83591 | 0.147535 | 26 |
| AGAP1 | 5.482431 | 0.219297 | 25 |
| PDGFRA | 3.144052 | 0.125762 | 25 |
| CAMTA1 | 2.660756 | 0.10643 | 25 |
| RPTOR | 7.607041 | 0.330741 | 23 |
| NXN | 4.617392 | 0.200756 | 23 |
| NCOR2 | 4.450173 | 0.193486 | 23 |
| RIMBP2 | 3.898763 | 0.169511 | 23 |
| INPP5A | 2.501373 | 0.108755 | 23 |
| SKI | 6.831676 | 0.325318 | 21 |
| FRMD4A | 4.473011 | 0.223651 | 20 |
| MAD1L1 | 7.081564 | 0.372714 | 19 |
| ZNF423 | 3.653806 | 0.192306 | 19 |
| SMG1P2 | 3.167207 | 0.166695 | 19 |
| BOLA2 | 3.167207 | 0.166695 | 19 |
| LOC613038 | 3.167207 | 0.166695 | 19 |
| CASZ1 | 2.518759 | 0.132566 | 19 |
| ANKRD11 | 3.711528 | 0.206196 | 18 |
| FOXK1 | 3.303989 | 0.183555 | 18 |
| SEPTIN9 | 2.365648 | 0.131425 | 18 |
| TBX15 | 3.629988 | 0.213529 | 17 |
| OPCML | 2.793909 | 0.164348 | 17 |
| FOXP1 | 3.316318 | 0.20727 | 16 |
| SORBS2 | 3.060689 | 0.191293 | 16 |
| NAV2 | 2.448398 | 0.153025 | 16 |
| BAIAP2 | 6.727984 | 0.448532 | 15 |
| GLI2 | 5.852392 | 0.390159 | 15 |
| LRMDA | 4.396956 | 0.29313 | 15 |
| SLX1B- | 2.601392 | 0.173426 | 15 |
| SULT1A4 | | | |
| SLX1A | 2.601392 | 0.173426 | 15 |
| LOC606724 | 2.601392 | 0.173426 | 15 |
| RPS6KA2 | 4.913033 | 0.350931 | 14 |
| C7orf50 | 3.631155 | 0.259368 | 14 |
| PRKAG2 | 3.252456 | 0.232318 | 14 |
| IQSEC1 | 3.004048 | 0.214575 | 14 |
| MOB2 | 2.55029 | 0.182164 | 14 |
| ARHGEF10 | 2.468803 | 0.176343 | 14 |
| MYT1L | 3.298473 | 0.253729 | 13 |
| MSI2 | 3.141991 | 0.241692 | 13 |
| MIR9-3HG | 2.575378 | 0.198106 | 13 |
| GSE1 | 2.523138 | 0.194088 | 13 |
| MIRLET7BHG | 4.024739 | 0.335395 | 12 |
| ZC3H3 | 3.214761 | 0.267897 | 12 |
| GNA12 | 3.054646 | 0.254554 | 12 |
| CTNNA2 | 2.852575 | 0.237715 | 12 |
| RAD51B | 3.708749 | 0.337159 | 11 |
| FGFR2 | 3.340094 | 0.303645 | 11 |
| COL4A1 | 2.802232 | 0.254748 | 11 |
| ZC3H12D | 2.63323 | 0.239385 | 11 |
| VGLL4 | 2.392066 | 0.217461 | 11 |
| TSPAN4 | 3.385127 | 0.338513 | 10 |
| NR2F1-AS1 | 3.342812 | 0.334281 | 10 |
| FMN1 | 2.947547 | 0.294755 | 10 |
| MAML2 | 2.479743 | 0.247974 | 10 |
| BCL11B | 2.467026 | 0.246703 | 10 |
| CHST11 | 2.421051 | 0.242105 | 10 |
| AXIN2 | 4.265368 | 0.47393 | 9 |
| SND1 | 3.882986 | 0.431443 | 9 |
| ADAMTS2 | 3.725764 | 0.413974 | 9 |
| TSPAN9 | 3.365121 | 0.373902 | 9 |
| CACNA2D4 | 2.791138 | 0.310126 | 9 |
| NOTCH1 | 2.699126 | 0.299903 | 9 |
| MGMT | 2.630872 | 0.292319 | 9 |
| APBA2 | 2.434052 | 0.27045 | 9 |
| ASPSCR1 | 4.941479 | 0.617685 | 8 |
| MSRA | 3.824307 | 0.478038 | 8 |
| LHX4 | 3.00188 | 0.375235 | 8 |
| LINC00311 | 2.710199 | 0.338775 | 8 |
| DLEU1 | 2.410444 | 0.301305 | 8 |
| LINC01140 | 3.236537 | 0.462362 | 7 |
| PCCA | 3.02946 | 0.43278 | 7 |
| GAK | 2.700565 | 0.385795 | 7 |
| C19orf25 | 2.678181 | 0.382597 | 7 |
| LTF | 2.474482 | 0.353497 | 7 |
| LHPP | 2.438772 | 0.348396 | 7 |
| NAV1 | 2.355967 | 0.336567 | 7 |
| FBXL18 | 3.275702 | 0.54595 | 6 |
| CCDC177 | 2.894281 | 0.48238 | 6 |
| COLEC11 | 2.46434 | 0.410723 | 6 |
| RUNDC3A | 3.816148 | 0.76323 | 5 |
| KLHL25 | 2.869872 | 0.573974 | 5 |
| TK1 | 2.503038 | 0.500608 | 5 |
| EXPH5 | 2.46519 | 0.493038 | 5 |
| DICER1 | 3.31541 | 1.105137 | 3 |
| SLC6A9 | 2.771843 | 0.923948 | 3 |
| SLC25A10 | 2.783936 | 1.391968 | 2 |
| CHTF18 | 2.668617 | 1.334309 | 2 |
| ANKLE2 | 2.628808 | 1.314404 | 2 |

TABLE 50
Cancer Type EPN_RELA_Like_C

| Gene site | imp_sum | imp_mean | n |
|---|---|---|---|
| PTPRN2 | 6.388245 | 0.077905 | 82 |
| PRDM16 | 10.31376 | 0.145264 | 71 |
| HDAC4 | 9.792911 | 0.264673 | 37 |
| RBFOX3 | 6.142056 | 0.175487 | 35 |
| PAX6 | 3.959655 | 0.113133 | 35 |
| DIP2C | 4.684374 | 0.146387 | 32 |
| ADARB2 | 4.939766 | 0.189991 | 26 |
| SHANK2 | 4.853133 | 0.186659 | 26 |
| AGAP1 | 6.329685 | 0.253187 | 25 |
| CAMTA1 | 4.983153 | 0.199326 | 25 |
| PDGFRA | 2.555145 | 0.102206 | 25 |
| SATB2 | 3.113167 | 0.129715 | 24 |
| MEIS1 | 3.111077 | 0.129628 | 24 |
| NXN | 5.39116 | 0.234398 | 23 |
| NCOR2 | 5.355784 | 0.23286 | 23 |
| RPTOR | 5.185304 | 0.225448 | 23 |
| HOXB3 | 3.364127 | 0.146266 | 23 |
| PRKCZ | 3.297049 | 0.149866 | 22 |
| SKI | 4.176808 | 0.198896 | 21 |
| FRMD4A | 5.580653 | 0.279033 | 20 |
| SDK1 | 3.758879 | 0.187944 | 20 |
| MAD1L1 | 7.932548 | 0.417503 | 19 |
| CASZ1 | 4.757279 | 0.250383 | 19 |
| SMG1P2 | 3.795435 | 0.19976 | 19 |
| BOLA2 | 3.795435 | 0.19976 | 19 |
| LOC613038 | 3.795435 | 0.19976 | 19 |
| KCNQ1 | 2.95117 | 0.155325 | 19 |
| CFAP46 | 2.64123 | 0.139012 | 19 |
| FOXK1 | 5.958762 | 0.331042 | 18 |
| TBC1D16 | 4.918471 | 0.273248 | 18 |
| RBFOX1 | 2.685368 | 0.149187 | 18 |
| OPCML | 3.268202 | 0.192247 | 17 |
| FOXP1 | 3.996994 | 0.249812 | 16 |
| SORBS2 | 2.610353 | 0.163147 | 16 |
| GLI2 | 5.057189 | 0.337146 | 15 |
| EMX2OS | 3.637625 | 0.242508 | 15 |
| BAIAP2 | 3.481082 | 0.232072 | 15 |
| NFIX | 2.913399 | 0.194227 | 15 |
| SLX1B- | 2.7081 | 0.18054 | 15 |
| SULT1A4 | | | |
| SLX1A | 2.7081 | 0.18054 | 15 |
| LOC606724 | 2.7081 | 0.18054 | 15 |
| IQSEC1 | 4.665443 | 0.333246 | 14 |
| RPS6KA2 | 2.90531 | 0.207522 | 14 |
| CUX1 | 2.806976 | 0.200498 | 14 |
| PRKAG2 | 2.420803 | 0.172914 | 14 |
| GSE1 | 3.850896 | 0.296223 | 13 |
| KIF26B | 2.904956 | 0.223458 | 13 |
| GNA12 | 4.711493 | 0.392624 | 12 |
| TNS3 | 3.09073 | 0.257561 | 12 |
| MAML3 | 3.052777 | 0.254398 | 12 |
| ZC3H3 | 2.892362 | 0.24103 | 12 |
| MEIS2 | 2.876291 | 0.239691 | 12 |
| CMIP | 2.785533 | 0.232128 | 12 |
| ADGRD1 | 2.366348 | 0.197196 | 12 |
| ZC3H12D | 3.563105 | 0.323919 | 11 |
| RAD51B | 3.110039 | 0.282731 | 11 |
| ANAPC16 | 2.658012 | 0.241637 | 11 |
| VGLL4 | 2.586591 | 0.235145 | 11 |
| GAS7 | 3.014548 | 0.301455 | 10 |
| NR2F1-AS1 | 3.000588 | 0.300059 | 10 |
| IGF1R | 2.660186 | 0.266019 | 10 |
| TSPAN4 | 2.382834 | 0.238283 | 10 |
| SND1 | 4.833414 | 0.537046 | 9 |
| AXIN2 | 3.035017 | 0.337224 | 9 |
| TRAPPC12 | 2.80405 | 0.311561 | 9 |
| KCNH2 | 2.51942 | 0.279936 | 9 |
| APBA2 | 2.505382 | 0.278376 | 9 |
| KAZN | 2.494474 | 0.277164 | 9 |
| KCNMA1 | 2.478381 | 0.275376 | 9 |
| ADAMTS2 | 2.473136 | 0.274793 | 9 |
| LHX4 | 3.455697 | 0.431962 | 8 |
| DNMT3A | 3.206566 | 0.400821 | 8 |
| VRK2 | 2.814389 | 0.351799 | 8 |
| TRAPPC9 | 2.399386 | 0.299923 | 8 |
| C19orf25 | 3.027249 | 0.432464 | 7 |
| NAV1 | 2.631295 | 0.375899 | 7 |
| WWOX | 2.430468 | 0.34721 | 7 |
| AGO2 | 2.369084 | 0.338441 | 7 |
| FBXL18 | 3.322959 | 0.553826 | 6 |
| SLC22A18AS | 3.084762 | 0.514127 | 6 |
| STRA6 | 2.641257 | 0.440209 | 6 |
| C10orf90 | 2.622107 | 0.437018 | 6 |
| COQ8A | 2.579869 | 0.429978 | 6 |
| CCDC177 | 2.55317 | 0.425528 | 6 |
| COLEC11 | 2.525162 | 0.42086 | 6 |
| STK10 | 2.519602 | 0.419934 | 6 |
| NUMA1 | 2.423579 | 0.40393 | 6 |
| ARHGEF7 | 3.999335 | 0.799867 | 5 |
| CACNA1I | 3.715944 | 0.743189 | 5 |
| TK1 | 2.677213 | 0.535443 | 5 |
| SDK2 | 2.515765 | 0.503153 | 5 |
| DTNA | 2.688749 | 0.672187 | 4 |
| DICER1 | 2.758525 | 0.919508 | 3 |
| SLC6A9 | 2.689165 | 0.896388 | 3 |
| DAGLB | 2.676754 | 0.892251 | 3 |
| SLC25A22 | 2.467789 | 0.822596 | 3 |
| SOX10 | 2.415804 | 1.207902 | 2 |
| EOGT | 2.409254 | 1.204627 | 2 |
| ANKLE2 | 2.372184 | 1.186092 | 2 |
| SLC25A10 | 2.366913 | 1.183456 | 2 |

TABLE 51
Cancer Type EPN_SPINE

| Gene site | imp_sum | imp_mean | n |
|---|---|---|---|
| PTPRN2 | 18.00703 | 0.219598 | 82 |
| PRDM16 | 21.20807 | 0.298705 | 71 |
| HDAC4 | 13.01415 | 0.351734 | 37 |
| PAX6 | 7.995691 | 0.228448 | 35 |
| RBFOX3 | 6.970477 | 0.199156 | 35 |
| DIP2C | 10.38479 | 0.324525 | 32 |
| SOX2-OT | 6.360972 | 0.219344 | 29 |
| GALNT9 | 5.328999 | 0.19737 | 27 |
| SHANK2 | 5.135682 | 0.197526 | 26 |
| AGAP1 | 8.123733 | 0.324949 | 25 |
| CAMTA1 | 6.624628 | 0.264985 | 25 |
| SATB2 | 4.364773 | 0.181866 | 24 |
| NCOR2 | 8.301598 | 0.360939 | 23 |
| RPTOR | 8.110635 | 0.352636 | 23 |
| RIMBP2 | 4.596968 | 0.199868 | 23 |
| PRKCZ | 4.078898 | 0.185404 | 22 |
| SKI | 10.08525 | 0.48025 | 21 |
| ZIC4 | 3.955615 | 0.188363 | 21 |
| SDK1 | 5.291577 | 0.264579 | 20 |
| ABR | 4.94313 | 0.247157 | 20 |
| FRMD4A | 4.534796 | 0.22674 | 20 |
| MAD1L1 | 10.78786 | 0.567782 | 19 |
| CASZ1 | 7.839378 | 0.412599 | 19 |
| ZNF423 | 7.19556 | 0.378714 | 19 |
| SMG1P2 | 5.068935 | 0.266786 | 19 |
| BOLA2 | 5.068935 | 0.266786 | 19 |
| LOC613038 | 5.068935 | 0.266786 | 19 |
| SEPTIN9 | 6.749913 | 0.374995 | 18 |
| TBC1D16 | 6.521948 | 0.36233 | 18 |
| RBFOX1 | 5.168689 | 0.287149 | 18 |
| FOXK1 | 3.802433 | 0.211246 | 18 |
| ANKRD11 | 3.67135 | 0.203964 | 18 |
| OPCML | 8.390771 | 0.493575 | 17 |
| NAV2 | 5.952011 | 0.372001 | 16 |
| FOXP1 | 5.76391 | 0.360244 | 16 |
| EBF3 | 4.427132 | 0.276696 | 16 |
| SORBS2 | 4.389494 | 0.274343 | 16 |
| BAIAP2 | 5.503545 | 0.366903 | 15 |
| GLI2 | 5.395369 | 0.359691 | 15 |
| LRMDA | 4.368683 | 0.291246 | 15 |
| NFIX | 4.022804 | 0.268187 | 15 |
| SLX1B- | 3.543156 | 0.23621 | 15 |
| SULT1A4 | | | |
| SLX1A | 3.543156 | 0.23621 | 15 |
| LOC606724 | 3.543156 | 0.23621 | 15 |
| RPS6KA2 | 7.164354 | 0.51174 | 14 |
| CUX1 | 6.139501 | 0.438536 | 14 |
| C7orf50 | 3.830526 | 0.273609 | 14 |
| MIR548F5 | 3.805653 | 0.271832 | 14 |
| IQSEC1 | 3.699906 | 0.264279 | 14 |
| MSI2 | 6.515431 | 0.501187 | 13 |
| GSE1 | 6.362104 | 0.489393 | 13 |
| RFX4 | 5.069011 | 0.389924 | 13 |
| KIF26B | 4.02975 | 0.309981 | 13 |
| CLYBL | 3.93966 | 0.303051 | 13 |
| ZC3H3 | 5.204388 | 0.433699 | 12 |
| MEIS2 | 4.613977 | 0.384498 | 12 |
| FBRSL1 | 4.582972 | 0.381914 | 12 |
| MEGF6 | 4.143271 | 0.345273 | 12 |
| TNS3 | 3.906942 | 0.325579 | 12 |
| MAML3 | 3.574924 | 0.29791 | 12 |
| TBX4 | 3.547774 | 0.295648 | 12 |
| ZC3H12D | 6.090734 | 0.553703 | 11 |
| VGLL4 | 4.273837 | 0.388531 | 11 |
| SPON2 | 3.617264 | 0.328842 | 11 |
| AKAP13 | 5.145785 | 0.514579 | 10 |
| TSPAN4 | 3.955269 | 0.395527 | 10 |
| NR2F1-AS1 | 3.943816 | 0.394382 | 10 |
| ADGRA1 | 3.563767 | 0.356377 | 10 |
| GAS7 | 3.524642 | 0.352464 | 10 |
| SH3RF3 | 3.482212 | 0.348221 | 10 |
| SND1 | 5.671606 | 0.630178 | 9 |
| TSPAN9 | 5.566682 | 0.61852 | 9 |
| ATP11A | 4.94636 | 0.549596 | 9 |
| CACNA2D4 | 4.67568 | 0.51952 | 9 |
| ADAMTS2 | 4.189157 | 0.465462 | 9 |
| KCNH2 | 3.889556 | 0.432173 | 9 |
| AXIN2 | 3.837607 | 0.426401 | 9 |
| NOTCH1 | 3.620084 | 0.402232 | 9 |
| MGMT | 3.598229 | 0.399803 | 9 |
| ASAP1 | 3.584188 | 0.398243 | 9 |
| MSRA | 5.061993 | 0.632749 | 8 |
| LHX4 | 4.717822 | 0.589728 | 8 |
| MCC | 4.073128 | 0.509141 | 8 |
| DLEU1 | 3.720543 | 0.465068 | 8 |
| NAV1 | 4.946607 | 0.706658 | 7 |
| CXXC5 | 3.859552 | 0.551365 | 7 |
| VPS13D | 3.741837 | 0.534548 | 7 |
| SLC22A18AS | 4.24026 | 0.70671 | 6 |
| LRRFIP1 | 3.599162 | 0.59986 | 6 |
| FAM181A | 3.597879 | 0.599647 | 6 |
| DENND3 | 3.442411 | 0.573735 | 6 |
| TSNAX-DISC1 | 4.470584 | 0.894117 | 5 |
| BCAR1 | 4.298052 | 0.85961 | 5 |
| RUNDC3A | 3.826841 | 0.765368 | 5 |
| PRR5L | 3.551702 | 0.71034 | 5 |
| VOPP1 | 3.871078 | 0.967769 | 4 |
| DTNA | 3.738399 | 0.9346 | 4 |
| CCDC167 | 3.465475 | 1.155158 | 3 |
| SLC25A10 | 4.701776 | 2.350888 | 2 |
| ANKLE2 | 3.649509 | 1.824755 | 2 |

TABLE 52
Cancer Type EPN_SPINE_MYCN

| Gene site | imp_sum | imp_mean | n |
|---|---|---|---|
| PTPRN2 | 6.492942 | 0.079182 | 82 |
| PRDM16 | 7.7856 | 0.109656 | 71 |
| PCDHGA1 | 3.162956 | 0.053609 | 59 |
| PCDHGA2 | 3.162956 | 0.05549 | 57 |
| PCDHGA3 | 3.162956 | 0.058573 | 54 |
| PCDHGB1 | 3.162956 | 0.059678 | 53 |
| PCDHGA4 | 3.162956 | 0.062019 | 51 |
| PCDHGB2 | 2.84657 | 0.058093 | 49 |
| PCDHGA5 | 2.530184 | 0.053834 | 47 |
| PCDHGB3 | 2.530184 | 0.058841 | 43 |
| PCDHGA6 | 2.530184 | 0.063255 | 40 |
| HDAC4 | 5.62407 | 0.152002 | 37 |
| PCDHGA7 | 2.530184 | 0.068383 | 37 |
| PAX6 | 3.986653 | 0.113904 | 35 |
| PCDHGB4 | 2.530184 | 0.072291 | 35 |
| PCDHGA8 | 2.530184 | 0.072291 | 35 |
| DIP2C | 4.775328 | 0.149229 | 32 |
| PCDHGB5 | 2.213798 | 0.069181 | 32 |
| PCDHGA9 | 2.213798 | 0.071413 | 31 |
| GALNT9 | 3.892155 | 0.144154 | 27 |
| AGAP1 | 3.423555 | 0.136942 | 25 |
| CAMTA1 | 3.338662 | 0.133546 | 25 |
| SATB2 | 4.430963 | 0.184623 | 24 |
| RPTOR | 3.916326 | 0.170275 | 23 |
| SKI | 5.889311 | 0.280443 | 21 |
| HOXA-AS3 | 3.973196 | 0.1892 | 21 |
| ZIC4 | 3.270454 | 0.155736 | 21 |
| SIM2 | 2.463619 | 0.117315 | 21 |
| ABR | 2.43546 | 0.121773 | 20 |
| FRMD4A | 2.285651 | 0.114283 | 20 |
| MAD1L1 | 4.81219 | 0.253273 | 19 |
| SMG1P2 | 4.027895 | 0.211994 | 19 |
| BOLA2 | 4.027895 | 0.211994 | 19 |
| LOC613038 | 4.027895 | 0.211994 | 19 |
| ZNF423 | 3.885737 | 0.204512 | 19 |
| FOXK1 | 2.547433 | 0.141524 | 18 |
| SIM1 | 5.801214 | 0.341248 | 17 |
| OPCML | 3.150464 | 0.185321 | 17 |
| TBX15 | 2.737097 | 0.161006 | 17 |
| FOXP1 | 2.73496 | 0.170935 | 16 |
| NAV2 | 2.531088 | 0.158193 | 16 |
| GLI2 | 4.935341 | 0.329023 | 15 |
| EMX2OS | 2.453844 | 0.16359 | 15 |
| SLX1B- | 2.134165 | 0.142278 | 15 |
| SULT1A4 | | | |
| SLX1A | 2.134165 | 0.142278 | 15 |
| LOC606724 | 2.134165 | 0.142278 | 15 |
| BAIAP2 | 2.043891 | 0.136259 | 15 |
| GNG7 | 2.455568 | 0.175398 | 14 |
| RPS6KA2 | 2.230171 | 0.159298 | 14 |
| MSI2 | 2.807782 | 0.215983 | 13 |
| CLYBL | 2.577345 | 0.198257 | 13 |
| MYT1L | 2.571778 | 0.197829 | 13 |
| FBRSL1 | 3.083854 | 0.256988 | 12 |
| ZC3H3 | 2.408241 | 0.200687 | 12 |
| MAML3 | 2.168862 | 0.180739 | 12 |
| ADGRD1 | 2.073695 | 0.172808 | 12 |
| ZC3H12D | 4.179757 | 0.379978 | 11 |
| RAD51B | 2.468987 | 0.224453 | 11 |
| PITX2 | 3.85557 | 0.385557 | 10 |
| ADGRA1 | 3.749056 | 0.374906 | 10 |
| TFAP2B | 3.226117 | 0.322612 | 10 |
| ACOT7 | 3.181729 | 0.318173 | 10 |
| NR2F1-AS1 | 2.785737 | 0.278574 | 10 |
| FMN1 | 2.142563 | 0.214256 | 10 |
| ATP11A | 3.665884 | 0.40732 | 9 |
| SND1 | 3.162725 | 0.351414 | 9 |
| SLC22A18 | 2.776862 | 0.30854 | 9 |
| IGF2BP1 | 2.408029 | 0.267559 | 9 |
| RUNX1 | 2.348507 | 0.260945 | 9 |
| AXIN2 | 2.162687 | 0.240299 | 9 |
| TSPAN9 | 2.115413 | 0.235046 | 9 |
| AFF3 | 2.968832 | 0.371104 | 8 |
| KIF26A | 2.695016 | 0.336877 | 8 |
| MSRA | 2.471942 | 0.308993 | 8 |
| DLEU1 | 2.059775 | 0.257472 | 8 |
| C1orf94 | 2.594722 | 0.370675 | 7 |
| DUSP6 | 2.369086 | 0.338441 | 7 |
| CLDN10 | 2.333333 | 0.333333 | 7 |
| TRIM2 | 2.136209 | 0.305173 | 7 |
| RXRA | 2.105226 | 0.300747 | 7 |
| ARHGAP45 | 3.123683 | 0.520614 | 6 |
| FBXL18 | 2.962263 | 0.49371 | 6 |
| SATB2-AS1 | 2.871803 | 0.478634 | 6 |
| LRRFIP1 | 2.353039 | 0.392173 | 6 |
| PRR5L | 3.2963 | 0.65926 | 5 |
| BCAR1 | 2.164598 | 0.43292 | 5 |
| RUNDC3A | 2.065769 | 0.413154 | 5 |
| VOPP1 | 2.76606 | 0.691515 | 4 |
| OLFM1 | 2.67317 | 0.668293 | 4 |
| CRB2 | 2.620027 | 0.655007 | 4 |
| GABRB3 | 2.614687 | 0.653672 | 4 |
| LAIR1 | 2.532069 | 0.633017 | 4 |
| DTNA | 2.209257 | 0.552314 | 4 |
| RBMS3 | 2.174902 | 0.543726 | 4 |
| NDST1 | 2.090472 | 0.522618 | 4 |
| BCAT1 | 2.182819 | 0.727606 | 3 |
| SLC25A10 | 3.725949 | 1.862975 | 2 |
| HNF1B | 2.452458 | 1.226229 | 2 |
| ACMSD | 2.983202 | 2.983202 | 1 |
| ACAD10 | 2.098791 | 2.098791 | 1 |

TABLE 53
Cancer Type EPN_SPINE_SE_A

| Gene site | imp_sum | imp_mean | n |
|---|---|---|---|
| PTPRN2 | 4.467313 | 0.054479 | 82 |
| PRDM16 | 5.538834 | 0.078012 | 71 |
| HDAC4 | 7.257234 | 0.196141 | 37 |
| RBFOX3 | 2.086675 | 0.059619 | 35 |
| DIP2C | 2.523885 | 0.078871 | 32 |
| GALNT9 | 1.812383 | 0.067125 | 27 |
| ADARB2 | 2.334298 | 0.089781 | 26 |
| AGAP1 | 3.980887 | 0.159235 | 25 |
| CAMTA1 | 3.968255 | 0.15873 | 25 |
| SATB2 | 4.287825 | 0.178659 | 24 |
| RPTOR | 3.996189 | 0.173747 | 23 |
| HOXB3 | 2.9538 | 0.128426 | 23 |
| RIMBP2 | 2.65345 | 0.115367 | 23 |
| NXN | 2.034489 | 0.088456 | 23 |
| SKI | 4.451828 | 0.211992 | 21 |
| HOXA-AS3 | 3.749579 | 0.178551 | 21 |
| ZIC4 | 3.199024 | 0.152334 | 21 |
| SIM2 | 2.58685 | 0.123183 | 21 |
| ZNF423 | 4.318873 | 0.227309 | 19 |
| MAD1L1 | 4.199438 | 0.221023 | 19 |
| SMG1P2 | 2.016115 | 0.106111 | 19 |
| BOLA2 | 2.016115 | 0.106111 | 19 |
| LOC613038 | 2.016115 | 0.106111 | 19 |
| CASZ1 | 1.898316 | 0.099911 | 19 |
| SEPTIN9 | 1.764349 | 0.098019 | 18 |
| TBX15 | 2.619569 | 0.154092 | 17 |
| OPCML | 2.460219 | 0.144719 | 17 |
| FOXP1 | 3.242841 | 0.202678 | 16 |
| EBF3 | 1.824205 | 0.114013 | 16 |
| GLI2 | 5.087536 | 0.339169 | 15 |
| DLX6-AS1 | 2.789193 | 0.185946 | 15 |
| EMX2OS | 2.767121 | 0.184475 | 15 |
| BAIAP2 | 2.224255 | 0.148284 | 15 |
| NFATC1 | 1.776564 | 0.118438 | 15 |
| CUX1 | 2.87708 | 0.205506 | 14 |
| RPS6KA2 | 2.122895 | 0.151635 | 14 |
| IQSEC1 | 1.951216 | 0.139373 | 14 |
| MSI2 | 2.877331 | 0.221333 | 13 |
| MYT1L | 2.671325 | 0.205487 | 13 |
| CLYBL | 2.480584 | 0.190814 | 13 |
| RFX4 | 2.104561 | 0.161889 | 13 |
| ZC3H3 | 2.345505 | 0.195459 | 12 |
| MIRLET7BHG | 2.116093 | 0.176341 | 12 |
| CMIP | 2.115268 | 0.176272 | 12 |
| FBRSL1 | 2.040479 | 0.17004 | 12 |
| MEGF6 | 1.757851 | 0.146488 | 12 |
| RAD51B | 1.854509 | 0.168592 | 11 |
| NR2F1-AS1 | 2.721518 | 0.272152 | 10 |
| ACOT7 | 2.542456 | 0.254246 | 10 |
| EBF1 | 2.314205 | 0.23142 | 10 |
| PITX2 | 2.081013 | 0.208101 | 10 |
| NR5A2 | 2.038764 | 0.203876 | 10 |
| BCL11B | 2.027634 | 0.202763 | 10 |
| TFAP2B | 1.983684 | 0.198368 | 10 |
| SPPL2B | 1.761071 | 0.176107 | 10 |
| ATP11A | 3.269095 | 0.363233 | 9 |
| RUNX1 | 2.889558 | 0.321062 | 9 |
| SLC22A18 | 2.832039 | 0.314671 | 9 |
| SND1 | 2.665522 | 0.296169 | 9 |
| KAZN | 2.529525 | 0.281058 | 9 |
| AXIN2 | 2.34763 | 0.260848 | 9 |
| TRAPPC12 | 2.32492 | 0.258324 | 9 |
| ADAMTS2 | 2.039645 | 0.226627 | 9 |
| NOTCH1 | 1.991879 | 0.22132 | 9 |
| TSPAN9 | 1.824324 | 0.202703 | 9 |
| GATA4 | 2.510676 | 0.313834 | 8 |
| AFF3 | 2.510149 | 0.313769 | 8 |
| MSRA | 2.302983 | 0.287873 | 8 |
| DLEU1 | 2.271895 | 0.283987 | 8 |
| RORA | 2.087459 | 0.260932 | 8 |
| PPP2R2B | 1.904162 | 0.23802 | 8 |
| LINC00311 | 1.875494 | 0.234437 | 8 |
| ESRRG | 1.771343 | 0.221418 | 8 |
| DUSP6 | 2.976121 | 0.42516 | 7 |
| LHX2 | 2.213486 | 0.316212 | 7 |
| NAV1 | 1.787504 | 0.255358 | 7 |
| FAM181A | 2.321552 | 0.386925 | 6 |
| SLC22A18AS | 1.888411 | 0.314735 | 6 |
| PRR5L | 2.943148 | 0.58863 | 5 |
| RUNDC3A | 2.868566 | 0.573713 | 5 |
| PDE4B | 2.389689 | 0.477938 | 5 |
| HOXB6 | 2.066272 | 0.413254 | 5 |
| GRIP1 | 1.946106 | 0.389221 | 5 |
| KLHL25 | 1.92724 | 0.385448 | 5 |
| ARHGEF7 | 1.839995 | 0.367999 | 5 |
| MCPH1 | 1.778196 | 0.355639 | 5 |
| CRB2 | 1.947448 | 0.486862 | 4 |
| DTNA | 1.876086 | 0.469022 | 4 |
| GATA6 | 1.875189 | 0.468797 | 4 |
| PPM1H | 1.766097 | 0.441524 | 4 |
| GRIN2B | 1.967055 | 0.655685 | 3 |
| DICER1 | 1.860287 | 0.620096 | 3 |
| SLC25A10 | 3.588723 | 1.794361 | 2 |
| ANKLE2 | 2.019678 | 1.009839 | 2 |
| SOX10 | 2.000114 | 1.000057 | 2 |
| ACMSD | 3.011469 | 3.011469 | 1 |
| GRTP1 | 2.569028 | 2.569028 | 1 |
| ACAD10 | 2.131225 | 2.131225 | 1 |
| C10orf105 | 1.947394 | 1.947394 | 1 |
| AK1 | 1.790931 | 1.790931 | 1 |

TABLE 54
Cancer Type EPN_SPINE_SE_B

| Gene site | imp_sum | imp_mean | n |
|---|---|---|---|
| PTPRN2 | 20.69829 | 0.252418 | 82 |
| PRDM16 | 22.9618 | 0.323406 | 71 |
| PCDHGA1 | 4.918729 | 0.083368 | 59 |
| PCDHGA2 | 4.918729 | 0.086293 | 57 |
| PCDHGA3 | 4.198881 | 0.077757 | 54 |
| PCDHGB1 | 4.198881 | 0.079224 | 53 |
| PCDHGA4 | 4.198881 | 0.082331 | 51 |
| PCDHGB2 | 4.198881 | 0.085691 | 49 |
| PCDHGA5 | 4.198881 | 0.089338 | 47 |
| HDAC4 | 14.31085 | 0.38678 | 37 |
| PAX6 | 13.13532 | 0.375295 | 35 |
| RBFOX3 | 9.970229 | 0.284864 | 35 |
| DIP2C | 11.0602 | 0.345631 | 32 |
| SOX2-OT | 11.19802 | 0.386139 | 29 |
| GALNT9 | 7.862966 | 0.291221 | 27 |
| ADARB2 | 6.067064 | 0.233349 | 26 |
| SHANK2 | 5.873276 | 0.225895 | 26 |
| AGAP1 | 10.57591 | 0.423036 | 25 |
| CAMTA1 | 6.217241 | 0.24869 | 25 |
| SATB2 | 7.490794 | 0.312116 | 24 |
| MEIS1 | 4.165291 | 0.173554 | 24 |
| RPTOR | 9.826889 | 0.427256 | 23 |
| NCOR2 | 9.548187 | 0.415139 | 23 |
| INPP5A | 5.536311 | 0.240709 | 23 |
| NXN | 5.318387 | 0.231234 | 23 |
| PRKCZ | 6.740115 | 0.306369 | 22 |
| SKI | 13.02695 | 0.620331 | 21 |
| ZIC4 | 4.943805 | 0.235419 | 21 |
| ABR | 7.6722 | 0.38361 | 20 |
| FRMD4A | 5.546184 | 0.277309 | 20 |
| SDK1 | 5.284686 | 0.264234 | 20 |
| MAD1L1 | 13.03724 | 0.686171 | 19 |
| ZNF423 | 10.79861 | 0.568348 | 19 |
| CASZ1 | 7.383993 | 0.388631 | 19 |
| SMG1P2 | 5.64007 | 0.296846 | 19 |
| BOLA2 | 5.64007 | 0.296846 | 19 |
| LOC613038 | 5.64007 | 0.296846 | 19 |
| FOXK1 | 9.325676 | 0.518093 | 18 |
| SEPTIN9 | 8.261632 | 0.45898 | 18 |
| ANKRD11 | 5.545247 | 0.308069 | 18 |
| OPCML | 7.962893 | 0.468405 | 17 |
| TBX15 | 6.519563 | 0.383504 | 17 |
| PAX6-AS1 | 5.623303 | 0.330783 | 17 |
| RCN1 | 5.623303 | 0.330783 | 17 |
| SIM1 | 5.056549 | 0.297444 | 17 |
| FOXP1 | 4.704797 | 0.29405 | 16 |
| NAV2 | 4.700894 | 0.293806 | 16 |
| EBF3 | 4.510004 | 0.281875 | 16 |
| GLI2 | 10.22611 | 0.68174 | 15 |
| BAIAP2 | 6.583023 | 0.438868 | 15 |
| KIRREL3 | 5.563956 | 0.37093 | 15 |
| ZBTB20 | 5.414394 | 0.36096 | 15 |
| NFIX | 4.357147 | 0.290476 | 15 |
| SLX1B- | 4.258454 | 0.283897 | 15 |
| SULT1A4 | | | |
| SLX1A | 4.258454 | 0.283897 | 15 |
| LOC606724 | 4.258454 | 0.283897 | 15 |
| RPS6KA2 | 7.391291 | 0.527949 | 14 |
| PRKAG2 | 5.627199 | 0.401943 | 14 |
| IQSEC1 | 4.523432 | 0.323102 | 14 |
| CUX1 | 4.38091 | 0.312922 | 14 |
| MSI2 | 7.917794 | 0.609061 | 13 |
| RFX4 | 4.921662 | 0.378589 | 13 |
| CLYBL | 4.856825 | 0.373602 | 13 |
| GSE1 | 4.684687 | 0.360361 | 13 |
| ZC3H3 | 6.255098 | 0.521258 | 12 |
| MIRLET7BHG | 5.826241 | 0.48552 | 12 |
| TNS3 | 5.309675 | 0.442473 | 12 |
| CMIP | 4.284207 | 0.357017 | 12 |
| RASA3 | 4.172052 | 0.347671 | 12 |
| ZC3H12D | 6.618574 | 0.601689 | 11 |
| SPON2 | 5.097684 | 0.463426 | 11 |
| RAD51B | 4.824109 | 0.438555 | 11 |
| GLUD1P2 | 4.273133 | 0.388467 | 11 |
| VGLL4 | 4.240334 | 0.385485 | 11 |
| ACOT7 | 4.858882 | 0.485888 | 10 |
| NR2F1-AS1 | 4.800457 | 0.480046 | 10 |
| SH3RF3 | 4.580332 | 0.458033 | 10 |
| ADGRA1 | 4.305105 | 0.43051 | 10 |
| ATP11A | 5.885514 | 0.653946 | 9 |
| SND1 | 5.659362 | 0.628818 | 9 |
| ADAMTS2 | 5.246017 | 0.582891 | 9 |
| CACNA2D4 | 4.926576 | 0.547397 | 9 |
| RUNX1 | 4.681661 | 0.520185 | 9 |
| TSPAN9 | 4.67902 | 0.519891 | 9 |
| GPC6 | 4.339458 | 0.482162 | 9 |
| LHX4 | 6.731641 | 0.841455 | 8 |
| MSRA | 5.131543 | 0.641443 | 8 |
| ESRRG | 4.630434 | 0.578804 | 8 |
| LINC00311 | 4.613139 | 0.576642 | 8 |
| DLEU1 | 4.323018 | 0.540377 | 8 |
| SHROOM3 | 4.278519 | 0.534815 | 8 |
| AFF3 | 4.217597 | 0.5272 | 8 |
| DUSP6 | 6.489698 | 0.9271 | 7 |
| FBXL18 | 4.174415 | 0.695736 | 6 |
| RUNDC3A | 4.871555 | 0.974311 | 5 |
| PRR5L | 4.840978 | 0.968196 | 5 |
| ARHGEF7 | 4.4663 | 0.89326 | 5 |
| TSNAX-DISC1 | 4.405841 | 0.881168 | 5 |
| GRIN2B | 4.152206 | 1.384069 | 3 |
| SLC25A10 | 4.592854 | 2.296427 | 2 |

TABLE 55
Cancer Type EPN_ST_ND_A

| Gene site | imp_sum | imp_mean | n |
|---|---|---|---|
| PTPRN2 | 12.57252 | 0.153323 | 82 |
| PRDM16 | 14.33 | 0.201831 | 71 |
| HDAC4 | 6.155105 | 0.166354 | 37 |
| PAX6 | 7.762951 | 0.221799 | 35 |
| RBFOX3 | 7.065691 | 0.201877 | 35 |
| DIP2C | 6.741237 | 0.210664 | 32 |
| SOX2-OT | 5.040501 | 0.17381 | 29 |
| GALNT9 | 4.874103 | 0.180522 | 27 |
| SHANK2 | 7.288743 | 0.280336 | 26 |
| ADARB2 | 3.906834 | 0.150263 | 26 |
| AGAP1 | 8.912881 | 0.356515 | 25 |
| CAMTA1 | 6.869073 | 0.274763 | 25 |
| SATB2 | 7.694246 | 0.320594 | 24 |
| RPTOR | 6.571293 | 0.285708 | 23 |
| INPP5A | 4.421946 | 0.192259 | 23 |
| HOXB3 | 4.358938 | 0.189519 | 23 |
| RIMBP2 | 4.322707 | 0.187944 | 23 |
| NCOR2 | 3.852216 | 0.167488 | 23 |
| PRKCZ | 3.722508 | 0.169205 | 22 |
| SKI | 10.07708 | 0.479861 | 21 |
| ZIC4 | 5.448838 | 0.259468 | 21 |
| SDK1 | 5.266742 | 0.263337 | 20 |
| FRMD4A | 4.473937 | 0.223697 | 20 |
| ZNF423 | 8.417935 | 0.443049 | 19 |
| MAD1L1 | 7.875587 | 0.414505 | 19 |
| CASZ1 | 5.26721 | 0.277222 | 19 |
| SMG1P2 | 3.458359 | 0.182019 | 19 |
| BOLA2 | 3.458359 | 0.182019 | 19 |
| LOC613038 | 3.458359 | 0.182019 | 19 |
| FOXK1 | 5.183399 | 0.287967 | 18 |
| SEPTIN9 | 3.899176 | 0.216621 | 18 |
| TBC1D16 | 3.342098 | 0.185672 | 18 |
| MCF2L | 3.157815 | 0.175434 | 18 |
| OPCML | 6.224343 | 0.366138 | 17 |
| TBX15 | 4.049813 | 0.238224 | 17 |
| PAX6-AS1 | 3.515691 | 0.206805 | 17 |
| RCN1 | 3.515691 | 0.206805 | 17 |
| FOXP1 | 5.086289 | 0.317893 | 16 |
| NAV2 | 3.823901 | 0.238994 | 16 |
| SORBS2 | 3.076293 | 0.192268 | 16 |
| GLI2 | 9.932155 | 0.662144 | 15 |
| EMX2OS | 5.669129 | 0.377942 | 15 |
| NFIX | 4.441511 | 0.296101 | 15 |
| KNDC1 | 4.432388 | 0.295493 | 15 |
| COL23A1 | 3.876927 | 0.258462 | 15 |
| ZBTB20 | 3.583497 | 0.2389 | 15 |
| NFATC1 | 3.473814 | 0.231588 | 15 |
| BAIAP2 | 3.181375 | 0.212092 | 15 |
| RPS6KA2 | 5.42418 | 0.387441 | 14 |
| CUX1 | 4.397781 | 0.314127 | 14 |
| PRKAG2 | 4.248722 | 0.30348 | 14 |
| IQSEC1 | 3.297421 | 0.23553 | 14 |
| ARHGEF10 | 3.263557 | 0.233111 | 14 |
| C7orf50 | 3.069573 | 0.219255 | 14 |
| MIR9-3HG | 8.809367 | 0.677644 | 13 |
| MSI2 | 5.605766 | 0.431213 | 13 |
| KIF26B | 4.176009 | 0.321231 | 13 |
| MYT1L | 3.563742 | 0.274134 | 13 |
| RFX4 | 3.506892 | 0.269761 | 13 |
| CLYBL | 3.150749 | 0.242365 | 13 |
| GSE1 | 2.986001 | 0.229692 | 13 |
| ZC3H3 | 5.844641 | 0.487053 | 12 |
| TBX4 | 4.403033 | 0.366919 | 12 |
| CMIP | 4.392077 | 0.366006 | 12 |
| MEIS2 | 4.044825 | 0.337069 | 12 |
| ADGRD1 | 4.029529 | 0.335794 | 12 |
| MIRLET7BHG | 3.374908 | 0.281242 | 12 |
| CTNNA2 | 3.246693 | 0.270558 | 12 |
| FBRSL1 | 3.180878 | 0.265073 | 12 |
| VGLL4 | 3.209122 | 0.291738 | 11 |
| CACNA1C | 3.104733 | 0.282248 | 11 |
| RAD51B | 2.936205 | 0.266928 | 11 |
| ACOT7 | 4.858651 | 0.485865 | 10 |
| TP73 | 4.164661 | 0.416466 | 10 |
| NR2F1-AS1 | 3.072003 | 0.3072 | 10 |
| AKAP13 | 2.999263 | 0.299926 | 10 |
| ATP11A | 5.059425 | 0.562158 | 9 |
| SLC22A18 | 3.856998 | 0.428555 | 9 |
| SND1 | 3.819203 | 0.424356 | 9 |
| ASAP1 | 3.802296 | 0.422477 | 9 |
| RUNX1 | 3.343484 | 0.371498 | 9 |
| KCNMA1 | 3.216977 | 0.357442 | 9 |
| GPC6 | 2.958499 | 0.328722 | 9 |
| NOTCH1 | 2.939813 | 0.326646 | 9 |
| LHX4 | 4.780661 | 0.597583 | 8 |
| DLEU1 | 3.942974 | 0.492872 | 8 |
| AFF3 | 3.384681 | 0.423085 | 8 |
| RGS20 | 3.296919 | 0.412115 | 8 |
| NAV1 | 5.090853 | 0.727265 | 7 |
| RXRA | 4.045082 | 0.577869 | 7 |
| TBR1 | 2.920705 | 0.417244 | 7 |
| FAM181A | 3.697698 | 0.616283 | 6 |
| SATB2-AS1 | 3.660097 | 0.610016 | 6 |
| FBXL18 | 3.282771 | 0.547129 | 6 |
| PRR5L | 3.713016 | 0.742603 | 5 |
| KLHL25 | 3.472346 | 0.694469 | 5 |
| TSNAX-DISC1 | 3.321393 | 0.664279 | 5 |
| RAPGEF4 | 3.220098 | 0.64402 | 5 |
| PPM1H | 3.137802 | 0.784451 | 4 |
| SLC25A10 | 3.874652 | 1.937326 | 2 |

TABLE 56
Cancer Type EPN_ST_SE

| Gene site | imp_sum | imp_mean | n |
|---|---|---|---|
| PTPRN2 | 14.78757 | 0.180336 | 82 |
| PRDM16 | 21.56532 | 0.303737 | 71 |
| HDAC4 | 14.04352 | 0.379555 | 37 |
| PAX6 | 11.96461 | 0.341846 | 35 |
| RBFOX3 | 8.961976 | 0.256056 | 35 |
| DIP2C | 9.608908 | 0.300278 | 32 |
| SOX2-OT | 8.497969 | 0.293033 | 29 |
| GALNT9 | 5.740494 | 0.212611 | 27 |
| SHANK2 | 7.465656 | 0.287141 | 26 |
| ADARB2 | 6.559737 | 0.252298 | 26 |
| AGAP1 | 10.25957 | 0.410383 | 25 |
| CAMTA1 | 6.874727 | 0.274989 | 25 |
| SATB2 | 5.351616 | 0.222984 | 24 |
| RPTOR | 9.819349 | 0.426928 | 23 |
| NCOR2 | 7.440985 | 0.323521 | 23 |
| RIMBP2 | 5.916542 | 0.257241 | 23 |
| INPP5A | 4.349603 | 0.189113 | 23 |
| NXN | 3.831029 | 0.166566 | 23 |
| PRKCZ | 7.157802 | 0.325355 | 22 |
| SKI | 11.11734 | 0.529397 | 21 |
| ZIC4 | 7.164295 | 0.341157 | 21 |
| FRMD4A | 6.790834 | 0.339542 | 20 |
| ABR | 6.306589 | 0.315329 | 20 |
| SDK1 | 4.903644 | 0.245182 | 20 |
| MAD1L1 | 10.49204 | 0.552212 | 19 |
| ZNF423 | 9.522139 | 0.501165 | 19 |
| CASZ1 | 7.009732 | 0.368933 | 19 |
| SMG1P2 | 5.475582 | 0.288189 | 19 |
| BOLA2 | 5.475582 | 0.288189 | 19 |
| LOC613038 | 5.475582 | 0.288189 | 19 |
| CFAP46 | 3.567633 | 0.18777 | 19 |
| TBC1D16 | 6.460163 | 0.358898 | 18 |
| SEPTIN9 | 5.192761 | 0.288487 | 18 |
| FOXK1 | 4.631213 | 0.25729 | 18 |
| ANKRD11 | 4.424428 | 0.245802 | 18 |
| MCF2L | 4.332015 | 0.240667 | 18 |
| OPCML | 6.841107 | 0.402418 | 17 |
| FOXP1 | 5.663108 | 0.353944 | 16 |
| GLI2 | 9.954524 | 0.663635 | 15 |
| BAIAP2 | 5.130543 | 0.342036 | 15 |
| KIRREL3 | 4.407345 | 0.293823 | 15 |
| ZBTB20 | 4.208394 | 0.28056 | 15 |
| NFIX | 4.099719 | 0.273315 | 15 |
| KNDC1 | 3.923233 | 0.261549 | 15 |
| RPS6KA2 | 7.055123 | 0.503937 | 14 |
| CUX1 | 6.973338 | 0.498096 | 14 |
| PRKAG2 | 4.477268 | 0.319805 | 14 |
| ARHGEF10 | 3.99234 | 0.285167 | 14 |
| MIR548F5 | 3.628218 | 0.259158 | 14 |
| MSI2 | 6.101907 | 0.469377 | 13 |
| GSE1 | 4.626839 | 0.355911 | 13 |
| CLYBL | 4.397876 | 0.338298 | 13 |
| MYT1L | 3.996951 | 0.307458 | 13 |
| ZC3H3 | 5.670165 | 0.472514 | 12 |
| MIRLET7BHG | 5.655803 | 0.471317 | 12 |
| ADGRD1 | 5.166093 | 0.430508 | 12 |
| TNS3 | 4.686673 | 0.390556 | 12 |
| CMIP | 4.095593 | 0.341299 | 12 |
| MEGF6 | 3.732575 | 0.311048 | 12 |
| MEIS2 | 3.623368 | 0.301947 | 12 |
| ZC3H12D | 6.265589 | 0.569599 | 11 |
| RAD51B | 4.404139 | 0.400376 | 11 |
| ACOT7 | 5.071909 | 0.507191 | 10 |
| NR2F1-AS1 | 4.302561 | 0.430256 | 10 |
| AKAP13 | 4.039456 | 0.403946 | 10 |
| KLHL29 | 3.846141 | 0.384614 | 10 |
| ATP11A | 6.082089 | 0.675788 | 9 |
| SND1 | 5.90144 | 0.655716 | 9 |
| ADAMTS2 | 4.881248 | 0.542361 | 9 |
| TRAPPC12 | 4.750428 | 0.527825 | 9 |
| KAZN | 4.663185 | 0.518132 | 9 |
| TSPAN9 | 4.24802 | 0.472002 | 9 |
| RUNX1 | 4.047814 | 0.449757 | 9 |
| KCNH2 | 3.967067 | 0.440785 | 9 |
| CACNA2D4 | 3.965026 | 0.440558 | 9 |
| AXIN2 | 3.583753 | 0.398195 | 9 |
| LHX4 | 5.144101 | 0.643013 | 8 |
| DLEU1 | 4.440199 | 0.555025 | 8 |
| PPP2R2B | 4.044065 | 0.505508 | 8 |
| AFF3 | 3.839932 | 0.479992 | 8 |
| MACROD1 | 3.809808 | 0.476226 | 8 |
| DNMT3A | 3.694474 | 0.461809 | 8 |
| NAV1 | 4.94547 | 0.706496 | 7 |
| LHX2 | 4.648095 | 0.664014 | 7 |
| RXRA | 4.29991 | 0.614273 | 7 |
| VPS13D | 3.874879 | 0.553554 | 7 |
| PRKCA | 3.697941 | 0.528277 | 7 |
| FBXL18 | 3.844834 | 0.640806 | 6 |
| FAM181A | 3.81628 | 0.636047 | 6 |
| TSNAX-DISC1 | 4.644692 | 0.928938 | 5 |
| BCAR1 | 4.280171 | 0.856034 | 5 |
| PRR5L | 4.19888 | 0.839776 | 5 |
| ARHGEF7 | 4.134932 | 0.826986 | 5 |
| RUNDC3A | 4.087877 | 0.817575 | 5 |
| RBMS3 | 3.986484 | 0.996621 | 4 |
| DTNA | 3.828958 | 0.957239 | 4 |
| PER2 | 3.731991 | 0.932998 | 4 |
| GRIN2B | 3.692311 | 1.23077 | 3 |
| SLC25A10 | 4.834545 | 2.417272 | 2 |
| ANKLE2 | 4.05317 | 2.026585 | 2 |

TABLE 57
Cancer Type EPN_YAP

| Gene site | imp_sum | imp_mean | n |
|---|---|---|---|
| PTPRN2 | 17.23822 | 0.210222 | 82 |
| PRDM16 | 23.42478 | 0.329926 | 71 |
| HDAC4 | 13.23857 | 0.357799 | 37 |
| PAX6 | 21.39254 | 0.611215 | 35 |
| RBFOX3 | 8.512954 | 0.243227 | 35 |
| DIP2C | 10.6073 | 0.331478 | 32 |
| SOX2-OT | 8.977742 | 0.309577 | 29 |
| GALNT9 | 4.167793 | 0.154363 | 27 |
| ADARB2 | 7.132454 | 0.274325 | 26 |
| SHANK2 | 5.964185 | 0.229392 | 26 |
| AGAP1 | 9.353925 | 0.374157 | 25 |
| CAMTA1 | 3.886305 | 0.155452 | 25 |
| SATB2 | 4.927197 | 0.2053 | 24 |
| RPTOR | 12.46487 | 0.541951 | 23 |
| NCOR2 | 6.643614 | 0.288853 | 23 |
| NXN | 6.426718 | 0.279423 | 23 |
| HOXB3 | 5.600506 | 0.2435 | 23 |
| INPP5A | 4.027074 | 0.17509 | 23 |
| PRKCZ | 6.461544 | 0.293707 | 22 |
| SKI | 11.13937 | 0.530446 | 21 |
| ZIC4 | 4.102191 | 0.195342 | 21 |
| ABR | 5.611227 | 0.280561 | 20 |
| FRMD4A | 5.558851 | 0.277943 | 20 |
| SDK1 | 5.420154 | 0.271008 | 20 |
| MAD1L1 | 12.4804 | 0.656863 | 19 |
| ZNF423 | 9.830616 | 0.517401 | 19 |
| CASZ1 | 6.916102 | 0.364005 | 19 |
| SMG1P2 | 6.485867 | 0.341361 | 19 |
| BOLA2 | 6.485867 | 0.341361 | 19 |
| LOC613038 | 6.485867 | 0.341361 | 19 |
| FOXK1 | 6.577737 | 0.36543 | 18 |
| TBC1D16 | 6.131496 | 0.340639 | 18 |
| SEPTIN9 | 5.646419 | 0.31369 | 18 |
| MCF2L | 5.28324 | 0.293513 | 18 |
| ANKRD11 | 4.767949 | 0.264886 | 18 |
| OPCML | 7.682188 | 0.451893 | 17 |
| SIM1 | 4.439576 | 0.261152 | 17 |
| SORBS2 | 5.097365 | 0.318585 | 16 |
| NAV2 | 4.854781 | 0.303424 | 16 |
| FOXP1 | 4.852911 | 0.303307 | 16 |
| GLI2 | 9.641517 | 0.642768 | 15 |
| NFIX | 7.684088 | 0.512273 | 15 |
| BAIAP2 | 5.11409 | 0.340939 | 15 |
| ZBTB20 | 4.871469 | 0.324765 | 15 |
| SLX1B- | 4.493723 | 0.299582 | 15 |
| SULT1A4 | | | |
| SLX1A | 4.493723 | 0.299582 | 15 |
| LOC606724 | 4.493723 | 0.299582 | 15 |
| NFATC1 | 4.395464 | 0.293031 | 15 |
| RPS6KA2 | 7.801359 | 0.55724 | 14 |
| CUX1 | 6.376211 | 0.455444 | 14 |
| PRKAG2 | 4.412961 | 0.315211 | 14 |
| C7orf50 | 3.980788 | 0.284342 | 14 |
| MSI2 | 6.990942 | 0.537765 | 13 |
| GSE1 | 5.00517 | 0.385013 | 13 |
| KIF26B | 4.903826 | 0.377217 | 13 |
| MIR9-3HG | 4.894567 | 0.376505 | 13 |
| CLYBL | 4.868188 | 0.374476 | 13 |
| RFX4 | 4.587237 | 0.352864 | 13 |
| HOXC4 | 4.101998 | 0.315538 | 13 |
| MYT1L | 3.95988 | 0.304606 | 13 |
| ZC3H3 | 6.30355 | 0.525296 | 12 |
| TNS3 | 6.209721 | 0.517477 | 12 |
| MIRLET7BHG | 5.903381 | 0.491948 | 12 |
| CMIP | 5.294991 | 0.441249 | 12 |
| MEGF6 | 4.612604 | 0.384384 | 12 |
| FBRSL1 | 4.480354 | 0.373363 | 12 |
| VGLL4 | 5.340595 | 0.485509 | 11 |
| ZC3H12D | 5.005365 | 0.455033 | 11 |
| RAD51B | 4.29177 | 0.390161 | 11 |
| OTX1 | 6.165507 | 0.616551 | 10 |
| AKAP13 | 4.68413 | 0.468413 | 10 |
| TFAP2B | 4.020065 | 0.402007 | 10 |
| SND1 | 7.518726 | 0.835414 | 9 |
| ATP11A | 6.410488 | 0.712276 | 9 |
| ADAMTS2 | 5.174234 | 0.574915 | 9 |
| TSPAN9 | 4.678385 | 0.519821 | 9 |
| AXIN2 | 4.671273 | 0.51903 | 9 |
| TRAPPC12 | 4.393501 | 0.488167 | 9 |
| KAZN | 4.306895 | 0.478544 | 9 |
| KCNMA1 | 4.166196 | 0.462911 | 9 |
| CACNA2D4 | 3.982821 | 0.442536 | 9 |
| LHX4 | 6.347496 | 0.793437 | 8 |
| DLEU1 | 5.400273 | 0.675034 | 8 |
| MSRA | 4.880909 | 0.610114 | 8 |
| SHROOM3 | 4.771151 | 0.596394 | 8 |
| LINC00311 | 4.53473 | 0.566841 | 8 |
| DNMT3A | 4.117827 | 0.514728 | 8 |
| RORA | 3.996121 | 0.499515 | 8 |
| AFF3 | 3.891856 | 0.486482 | 8 |
| RBM20 | 5.579537 | 0.797077 | 7 |
| RXRA | 4.454168 | 0.63631 | 7 |
| IQCE | 4.215459 | 0.602208 | 7 |
| VPS13D | 4.017275 | 0.573896 | 7 |
| TSNAX-DISC1 | 5.221409 | 1.044282 | 5 |
| RUNDC3A | 4.872651 | 0.97453 | 5 |
| ARHGEF7 | 4.514927 | 0.902985 | 5 |
| PRR5L | 4.43245 | 0.88649 | 5 |
| RBMS3 | 4.741908 | 1.185477 | 4 |
| SLC25A10 | 4.793721 | 2.39686 | 2 |
| ANKLE2 | 4.123466 | 2.061733 | 2 |

TABLE 58
Cancer Type ERMS

| Gene site | imp_sum | imp_mean | n |
|---|---|---|---|
| PTPRN2 | 8.157355 | 0.09948 | 82 |
| PRDM16 | 11.39271 | 0.160461 | 71 |
| PCDHGA1 | 8.984443 | 0.152279 | 59 |
| PCDHGA2 | 8.351671 | 0.146521 | 57 |
| PCDHGA3 | 7.402513 | 0.137084 | 54 |
| PCDHGB1 | 7.402513 | 0.13967 | 53 |
| PCDHGA4 | 7.253907 | 0.142233 | 51 |
| PCDHGB2 | 6.868 | 0.140163 | 49 |
| PCDHGA5 | 6.868 | 0.146128 | 47 |
| PCDHGB3 | 6.28895 | 0.146255 | 43 |
| PCDHGA6 | 5.517177 | 0.137929 | 40 |
| HDAC4 | 16.77947 | 0.453499 | 37 |
| PCDHGA7 | 5.200791 | 0.140562 | 37 |
| RBFOX3 | 9.22086 | 0.263453 | 35 |
| PCDHGB4 | 4.884405 | 0.139554 | 35 |
| PCDHGA8 | 4.884405 | 0.139554 | 35 |
| PAX6 | 4.584193 | 0.130977 | 35 |
| DIP2C | 9.570651 | 0.299083 | 32 |
| PCDHGB5 | 4.884405 | 0.152638 | 32 |
| PCDHGA9 | 4.884405 | 0.157561 | 31 |
| PCDHGB6 | 4.390992 | 0.151414 | 29 |
| SOX2-OT | 3.88906 | 0.134106 | 29 |
| PCDHGA10 | 4.074606 | 0.145522 | 28 |
| SHANK2 | 5.327244 | 0.204894 | 26 |
| ADARB2 | 3.73715 | 0.143737 | 26 |
| AGAP1 | 11.34168 | 0.453667 | 25 |
| CAMTA1 | 7.539154 | 0.301566 | 25 |
| PDGFRA | 4.315036 | 0.172601 | 25 |
| MEIS1 | 4.155988 | 0.173166 | 24 |
| RPTOR | 8.680668 | 0.37742 | 23 |
| NCOR2 | 8.138623 | 0.353853 | 23 |
| NXN | 5.422937 | 0.23578 | 23 |
| HOXB3 | 3.751074 | 0.16309 | 23 |
| SKI | 9.53873 | 0.454225 | 21 |
| HOXA-AS3 | 9.306106 | 0.443148 | 21 |
| ZIC4 | 5.248086 | 0.249909 | 21 |
| SIM2 | 3.686565 | 0.175551 | 21 |
| SDK1 | 8.255789 | 0.412789 | 20 |
| FRMD4A | 6.886077 | 0.344304 | 20 |
| MAD1L1 | 11.9611 | 0.629532 | 19 |
| ZNF423 | 6.307225 | 0.331959 | 19 |
| SMG1P2 | 5.356851 | 0.28194 | 19 |
| BOLA2 | 5.356851 | 0.28194 | 19 |
| LOC613038 | 5.356851 | 0.28194 | 19 |
| CASZ1 | 4.610425 | 0.242654 | 19 |
| KCNQ1 | 4.21475 | 0.221829 | 19 |
| FOXK1 | 8.336183 | 0.463121 | 18 |
| ANKRD11 | 6.822507 | 0.379028 | 18 |
| TBC1D16 | 5.973922 | 0.331885 | 18 |
| HOXA3 | 5.746921 | 0.319273 | 18 |
| NAV2 | 5.302418 | 0.331401 | 16 |
| FOXP1 | 5.185945 | 0.324122 | 16 |
| GLI2 | 8.091988 | 0.539466 | 15 |
| BAIAP2 | 5.722795 | 0.38152 | 15 |
| KIRREL3 | 5.255829 | 0.350389 | 15 |
| SLX1B- | 3.715797 | 0.24772 | 15 |
| SULT1A4 | | | |
| SLX1A | 3.715797 | 0.24772 | 15 |
| LOC606724 | 3.715797 | 0.24772 | 15 |
| IQSEC1 | 5.40076 | 0.385769 | 14 |
| PRKAG2 | 5.122928 | 0.365923 | 14 |
| CUX1 | 4.153132 | 0.296652 | 14 |
| C7orf50 | 3.849158 | 0.27494 | 14 |
| ARHGEF10 | 3.740174 | 0.267155 | 14 |
| GSE1 | 6.060605 | 0.4662 | 13 |
| MSI2 | 5.450645 | 0.41928 | 13 |
| SPTBN4 | 4.880376 | 0.375414 | 13 |
| MYT1L | 4.579967 | 0.352305 | 13 |
| CMIP | 6.003932 | 0.500328 | 12 |
| ZC3H3 | 5.82491 | 0.485409 | 12 |
| GNA12 | 4.70056 | 0.391713 | 12 |
| MEGF6 | 4.407827 | 0.367319 | 12 |
| ISLR2 | 4.095581 | 0.341298 | 12 |
| FBRSL1 | 3.994867 | 0.332906 | 12 |
| ADGRD1 | 3.92948 | 0.327457 | 12 |
| TBX4 | 3.823881 | 0.318657 | 12 |
| CCDC140 | 4.510849 | 0.410077 | 11 |
| CTBP2 | 4.27095 | 0.388268 | 11 |
| RAD51B | 3.718315 | 0.338029 | 11 |
| AKAP13 | 3.979031 | 0.397903 | 10 |
| CHST11 | 3.892027 | 0.389203 | 10 |
| SND1 | 7.687314 | 0.854146 | 9 |
| ATP11A | 6.268404 | 0.696489 | 9 |
| ADAMTS2 | 4.508347 | 0.500927 | 9 |
| ASAP1 | 4.452648 | 0.494739 | 9 |
| CACNA2D4 | 4.447124 | 0.494125 | 9 |
| MGMT | 4.085135 | 0.453904 | 9 |
| PACS2 | 3.727252 | 0.414139 | 9 |
| MSRA | 5.063556 | 0.632945 | 8 |
| LINC00311 | 4.6416 | 0.5802 | 8 |
| VRK2 | 4.482111 | 0.560264 | 8 |
| SYNJ2 | 4.400104 | 0.550013 | 8 |
| GAK | 5.050612 | 0.721516 | 7 |
| NAV1 | 4.685313 | 0.66933 | 7 |
| C19orf25 | 4.636755 | 0.662394 | 7 |
| VPS13D | 4.124844 | 0.589263 | 7 |
| LHPP | 3.768018 | 0.538288 | 7 |
| FBXL18 | 3.763178 | 0.627196 | 6 |
| RUNDC3A | 5.129459 | 1.025892 | 5 |
| ARHGEF7 | 3.999063 | 0.799813 | 5 |
| BACH2 | 3.821299 | 0.76426 | 5 |

TABLE 59
Cancer Type ETMR_Atyp

| Gene site | imp_sum | imp_mean | n |
|---|---|---|---|
| PTPRN2 | 12.61628 | 0.153857 | 82 |
| PRDM16 | 8.961167 | 0.126214 | 71 |
| HDAC4 | 11.88801 | 0.321298 | 37 |
| PAX6 | 6.177259 | 0.176493 | 35 |
| DIP2C | 6.424846 | 0.200776 | 32 |
| SOX2-OT | 7.087108 | 0.244383 | 29 |
| GALNT9 | 5.293596 | 0.196059 | 27 |
| SHANK2 | 6.11146 | 0.235056 | 26 |
| AGAP1 | 13.69025 | 0.54761 | 25 |
| CAMTA1 | 5.010274 | 0.200411 | 25 |
| PDGFRA | 2.953273 | 0.118131 | 25 |
| SATB2 | 2.649146 | 0.110381 | 24 |
| RPTOR | 7.439347 | 0.32345 | 23 |
| NCOR2 | 5.023833 | 0.218428 | 23 |
| NXN | 3.647387 | 0.158582 | 23 |
| HOXB3 | 3.556701 | 0.154639 | 23 |
| INPP5A | 3.314745 | 0.144119 | 23 |
| PRKCZ | 5.04235 | 0.229198 | 22 |
| SKI | 7.416808 | 0.353181 | 21 |
| HOXA-AS3 | 3.437471 | 0.163689 | 21 |
| ABR | 2.671086 | 0.133554 | 20 |
| MAD1L1 | 9.29656 | 0.489293 | 19 |
| KCNQ1 | 6.105397 | 0.321337 | 19 |
| SMG1P2 | 5.60813 | 0.295165 | 19 |
| BOLA2 | 5.60813 | 0.295165 | 19 |
| LOC613038 | 5.60813 | 0.295165 | 19 |
| ZNF423 | 5.361067 | 0.282161 | 19 |
| CASZ1 | 3.016508 | 0.158764 | 19 |
| FOXK1 | 5.642007 | 0.313445 | 18 |
| TBC1D16 | 4.117118 | 0.228729 | 18 |
| ANKRD11 | 3.034833 | 0.168602 | 18 |
| HOXA3 | 2.922267 | 0.162348 | 18 |
| SEPTIN9 | 2.731261 | 0.151737 | 18 |
| FOXP1 | 5.779804 | 0.361238 | 16 |
| SORBS2 | 2.893713 | 0.180857 | 16 |
| EBF3 | 2.811049 | 0.175691 | 16 |
| GLI2 | 6.58701 | 0.439134 | 15 |
| ZBTB20 | 3.025428 | 0.201695 | 15 |
| GNG7 | 4.644684 | 0.331763 | 14 |
| RPS6KA2 | 4.257981 | 0.304142 | 14 |
| CUX1 | 4.252716 | 0.303765 | 14 |
| C7orf50 | 3.545082 | 0.25322 | 14 |
| MIR548F5 | 3.302271 | 0.235876 | 14 |
| IQSEC1 | 3.015585 | 0.215399 | 14 |
| PRKAG2 | 2.958187 | 0.211299 | 14 |
| ARHGEF10 | 2.909369 | 0.207812 | 14 |
| MSI2 | 4.641112 | 0.357009 | 13 |
| GSE1 | 3.652304 | 0.280946 | 13 |
| CLYBL | 3.521073 | 0.270852 | 13 |
| MYT1L | 3.206279 | 0.246637 | 13 |
| RFX4 | 2.853878 | 0.219529 | 13 |
| ZC3H3 | 5.288032 | 0.440669 | 12 |
| ADGRD1 | 4.848656 | 0.404055 | 12 |
| CMIP | 4.797575 | 0.399798 | 12 |
| MAML3 | 3.145508 | 0.262126 | 12 |
| FBRSL1 | 2.955564 | 0.246297 | 12 |
| MIRLET7BHG | 2.830016 | 0.235835 | 12 |
| RASA3 | 2.783277 | 0.23194 | 12 |
| VGLL4 | 3.948416 | 0.358947 | 11 |
| ZC3H12D | 3.60369 | 0.327608 | 11 |
| RAD51B | 3.444522 | 0.313138 | 11 |
| ACOT7 | 4.094276 | 0.409428 | 10 |
| MAML2 | 3.252715 | 0.325271 | 10 |
| TFAP2B | 2.892127 | 0.289213 | 10 |
| SH3RF3 | 2.647604 | 0.26476 | 10 |
| NR5A2 | 2.620498 | 0.26205 | 10 |
| ATP11A | 4.89493 | 0.543881 | 9 |
| SND1 | 4.120306 | 0.457812 | 9 |
| KCNH2 | 3.600796 | 0.400088 | 9 |
| PACS2 | 3.458328 | 0.384259 | 9 |
| EGFR | 3.39395 | 0.377106 | 9 |
| ADAMTS2 | 3.248628 | 0.360959 | 9 |
| TSPAN9 | 3.036751 | 0.337417 | 9 |
| PAX3 | 2.942869 | 0.326985 | 9 |
| TRAPPC12 | 2.920628 | 0.324514 | 9 |
| ASAP1 | 2.714372 | 0.301597 | 9 |
| MGMT | 2.68465 | 0.298294 | 9 |
| APBA2 | 2.681638 | 0.29796 | 9 |
| MACROD1 | 4.228081 | 0.52851 | 8 |
| MSRA | 3.444056 | 0.430507 | 8 |
| LINC00311 | 2.834108 | 0.354264 | 8 |
| RXRA | 3.906314 | 0.558045 | 7 |
| NAV1 | 3.340597 | 0.477228 | 7 |
| VPS13D | 3.241423 | 0.46306 | 7 |
| LHPP | 2.635364 | 0.376481 | 7 |
| FBXL18 | 4.520193 | 0.753365 | 6 |
| COQ8A | 4.07088 | 0.67848 | 6 |
| SRGAP3 | 2.948205 | 0.491368 | 6 |
| TSNAX-DISC1 | 4.041131 | 0.808226 | 5 |
| RUNDC3A | 3.966069 | 0.793214 | 5 |
| PRR5L | 2.998843 | 0.599769 | 5 |
| TK1 | 2.828315 | 0.565663 | 5 |
| ARHGEF7 | 2.778802 | 0.55576 | 5 |
| RBMS3 | 4.005949 | 1.001487 | 4 |
| NDST1 | 2.748946 | 0.687236 | 4 |
| DTNA | 2.646445 | 0.661611 | 4 |
| FBXL17 | 2.852793 | 0.950931 | 3 |
| SLC12A9 | 2.814091 | 0.93803 | 3 |
| SOX10 | 2.739494 | 1.369747 | 2 |
| ANKLE2 | 2.707781 | 1.35389 | 2 |

TABLE 60
Cancer Type ETMR_C19MC

| Gene site | imp_sum | imp_mean | n |
|---|---|---|---|
| PTPRN2 | 14.69382 | 0.179193 | 82 |
| PRDM16 | 11.10744 | 0.156443 | 71 |
| PCDHGA1 | 6.356544 | 0.107738 | 59 |
| PCDHGA2 | 5.723772 | 0.100417 | 57 |
| PCDHGA3 | 5.342987 | 0.098944 | 54 |
| PCDHGB1 | 5.342987 | 0.100811 | 53 |
| PCDHGA4 | 5.342987 | 0.104764 | 51 |
| PCDHGB2 | 5.342987 | 0.109041 | 49 |
| PCDHGA5 | 5.342987 | 0.113681 | 47 |
| PCDHGB3 | 5.026601 | 0.116898 | 43 |
| PCDHGA6 | 4.710215 | 0.117755 | 40 |
| HDAC4 | 15.4495 | 0.417554 | 37 |
| PCDHGA7 | 4.710215 | 0.127303 | 37 |
| RBFOX3 | 9.566525 | 0.273329 | 35 |
| PAX6 | 4.715074 | 0.134716 | 35 |
| PCDHGB4 | 4.710215 | 0.134578 | 35 |
| PCDHGA8 | 4.710215 | 0.134578 | 35 |
| DIP2C | 9.206258 | 0.287696 | 32 |
| PCDHGB5 | 4.579852 | 0.14312 | 32 |
| PCDHGA9 | 4.579852 | 0.147737 | 31 |
| SOX2-OT | 6.083001 | 0.209759 | 29 |
| PCDHGB6 | 4.263466 | 0.147016 | 29 |
| PCDHGA10 | 4.263466 | 0.152267 | 28 |
| SHANK2 | 4.651371 | 0.178899 | 26 |
| AGAP1 | 11.70109 | 0.468043 | 25 |
| CAMTA1 | 4.196368 | 0.167855 | 25 |
| PCDHGB7 | 3.94708 | 0.164462 | 24 |
| MEIS1 | 3.693835 | 0.15391 | 24 |
| RPTOR | 10.80714 | 0.469876 | 23 |
| INPP5A | 6.427313 | 0.279448 | 23 |
| NCOR2 | 5.658868 | 0.246038 | 23 |
| NXN | 4.955936 | 0.215475 | 23 |
| PCDHGA11 | 3.94708 | 0.171612 | 23 |
| PRKCZ | 3.545285 | 0.161149 | 22 |
| SKI | 9.076939 | 0.432235 | 21 |
| ABR | 4.939217 | 0.246961 | 20 |
| FRMD4A | 4.369024 | 0.218451 | 20 |
| SDK1 | 4.277882 | 0.213894 | 20 |
| MAD1L1 | 11.05499 | 0.581842 | 19 |
| SMG1P2 | 6.12457 | 0.322346 | 19 |
| BOLA2 | 6.12457 | 0.322346 | 19 |
| LOC613038 | 6.12457 | 0.322346 | 19 |
| CASZ1 | 4.750979 | 0.250052 | 19 |
| ZNF423 | 4.569673 | 0.240509 | 19 |
| KCNQ1 | 3.698012 | 0.194632 | 19 |
| FOXK1 | 6.360468 | 0.353359 | 18 |
| TBC1D16 | 4.769727 | 0.264985 | 18 |
| ANKRD11 | 4.507033 | 0.250391 | 18 |
| HOXA3 | 3.678129 | 0.204341 | 18 |
| TBX15 | 4.506908 | 0.265112 | 17 |
| PAX6-AS1 | 4.470024 | 0.262943 | 17 |
| RCN1 | 4.470024 | 0.262943 | 17 |
| OPCML | 3.520633 | 0.207096 | 17 |
| FOXP1 | 6.167845 | 0.38549 | 16 |
| NAV2 | 3.968529 | 0.248033 | 16 |
| GLI2 | 4.877839 | 0.325189 | 15 |
| SLX1B- | 3.954447 | 0.26363 | 15 |
| SULT1A4 | | | |
| SLX1A | 3.954447 | 0.26363 | 15 |
| LOC606724 | 3.954447 | 0.26363 | 15 |
| BAIAP2 | 3.6137 | 0.240913 | 15 |
| RPS6KA2 | 5.856751 | 0.418339 | 14 |
| CUX1 | 5.813019 | 0.415216 | 14 |
| PRKAG2 | 4.374581 | 0.31247 | 14 |
| IQSEC1 | 4.288222 | 0.306302 | 14 |
| GNG7 | 4.028826 | 0.287773 | 14 |
| ARHGEF10 | 3.516089 | 0.251149 | 14 |
| MSI2 | 7.052339 | 0.542488 | 13 |
| GSE1 | 3.640543 | 0.280042 | 13 |
| CMIP | 5.66703 | 0.472252 | 12 |
| TNS3 | 4.297541 | 0.358128 | 12 |
| ZC3H3 | 4.223031 | 0.351919 | 12 |
| FBRSL1 | 3.979732 | 0.331644 | 12 |
| TBCD | 3.690381 | 0.335489 | 11 |
| RAD51B | 3.664451 | 0.333132 | 11 |
| ACOT7 | 3.998721 | 0.399872 | 10 |
| AKAP13 | 3.628019 | 0.362802 | 10 |
| CHST11 | 3.625287 | 0.362529 | 10 |
| SND1 | 5.409773 | 0.601086 | 9 |
| ADAMTS2 | 5.34484 | 0.593871 | 9 |
| ATP11A | 5.303516 | 0.58928 | 9 |
| TSPAN9 | 4.594095 | 0.510455 | 9 |
| KCNH2 | 4.047686 | 0.449743 | 9 |
| CACNA2D4 | 4 | 0.444444 | 9 |
| AXIN2 | 3.787404 | 0.420823 | 9 |
| TXNRD1 | 3.62526 | 0.402807 | 9 |
| VRK2 | 7.00172 | 0.875215 | 8 |
| MSRA | 4.521701 | 0.565213 | 8 |
| DNMT3A | 4.405394 | 0.550674 | 8 |
| PPP2R2B | 3.55962 | 0.444953 | 8 |
| VPS13D | 4.918324 | 0.702618 | 7 |
| C19orf25 | 4.004237 | 0.572034 | 7 |
| FBXL18 | 5.120557 | 0.853426 | 6 |
| COQ8A | 3.912035 | 0.652006 | 6 |
| TSNAX-DISC1 | 4.890718 | 0.978144 | 5 |
| BCAR1 | 3.714802 | 0.74296 | 5 |
| TUBA1C | 4.909867 | 1.227467 | 4 |
| RBMS3 | 4.340008 | 1.085002 | 4 |
| DAGLB | 3.488732 | 1.162911 | 3 |
| CHTF18 | 3.643517 | 1.821758 | 2 |
| ANKLE2 | 3.592778 | 1.796389 | 2 |

TABLE 61
Cancer Type EVNCYT

| Gene site | imp_sum | imp_mean | n |
|---|---|---|---|
| PTPRN2 | 14.8685 | 0.181323 | 82 |
| PRDM16 | 14.39248 | 0.202711 | 71 |
| PCDHGA1 | 4.472651 | 0.075808 | 59 |
| PCDHGA2 | 4.472651 | 0.078468 | 57 |
| PCDHGA3 | 3.839879 | 0.071109 | 54 |
| PCDHGB1 | 3.839879 | 0.072451 | 53 |
| PCDHGA4 | 3.523493 | 0.069088 | 51 |
| PCDHGB2 | 3.523493 | 0.071908 | 49 |
| HDAC4 | 11.31675 | 0.305858 | 37 |
| PAX6 | 7.318088 | 0.209088 | 35 |
| RBFOX3 | 6.25787 | 0.178796 | 35 |
| DIP2C | 7.6996 | 0.240613 | 32 |
| SOX2-OT | 5.155114 | 0.177763 | 29 |
| SHANK2 | 3.287713 | 0.12645 | 26 |
| AGAP1 | 8.012474 | 0.320499 | 25 |
| CAMTA1 | 6.573397 | 0.262936 | 25 |
| PDGFRA | 4.343741 | 0.17375 | 25 |
| MEIS1 | 4.274311 | 0.178096 | 24 |
| RPTOR | 9.309927 | 0.404779 | 23 |
| INPP5A | 4.019441 | 0.174758 | 23 |
| PRKCZ | 5.654279 | 0.257013 | 22 |
| SKI | 9.625199 | 0.458343 | 21 |
| ZIC4 | 3.365632 | 0.160268 | 21 |
| MAD1L1 | 8.895139 | 0.468165 | 19 |
| ZNF423 | 8.863756 | 0.466513 | 19 |
| SMG1P2 | 4.795953 | 0.252419 | 19 |
| BOLA2 | 4.795953 | 0.252419 | 19 |
| LOC613038 | 4.795953 | 0.252419 | 19 |
| CASZ1 | 3.443674 | 0.181246 | 19 |
| ANKRD11 | 4.230042 | 0.235002 | 18 |
| TBC1D16 | 4.141089 | 0.230061 | 18 |
| FOXK1 | 3.781959 | 0.210109 | 18 |
| MCF2L | 3.555992 | 0.197555 | 18 |
| RBFOX1 | 3.30935 | 0.183853 | 18 |
| OPCML | 6.346396 | 0.373317 | 17 |
| FOXP1 | 4.952197 | 0.309512 | 16 |
| SORBS2 | 3.853856 | 0.240866 | 16 |
| NAV2 | 3.128093 | 0.195506 | 16 |
| GLI2 | 10.08569 | 0.672379 | 15 |
| ZBTB20 | 3.560998 | 0.2374 | 15 |
| NFIX | 3.498528 | 0.233235 | 15 |
| RPS6KA2 | 4.441852 | 0.317275 | 14 |
| PRKAG2 | 4.119838 | 0.294274 | 14 |
| IQSEC1 | 3.75183 | 0.267988 | 14 |
| ARHGEF10 | 3.411972 | 0.243712 | 14 |
| MSI2 | 4.658842 | 0.358372 | 13 |
| RFX4 | 4.112173 | 0.316321 | 13 |
| MYT1L | 3.744602 | 0.288046 | 13 |
| GSE1 | 3.63194 | 0.27938 | 13 |
| MIRLET7BHG | 5.061852 | 0.421821 | 12 |
| ZC3H3 | 4.551285 | 0.379274 | 12 |
| CMIP | 4.522782 | 0.376899 | 12 |
| FBRSL1 | 3.102052 | 0.258504 | 12 |
| FGFR2 | 4.091655 | 0.371969 | 11 |
| VGLL4 | 3.826003 | 0.347818 | 11 |
| RAD51B | 3.599109 | 0.327192 | 11 |
| CCDC140 | 3.500543 | 0.318231 | 11 |
| LBX1-AS1 | 3.794145 | 0.379414 | 10 |
| ACOT7 | 3.731201 | 0.37312 | 10 |
| AKAP13 | 3.709336 | 0.370934 | 10 |
| GAS7 | 3.353155 | 0.335316 | 10 |
| GRID1 | 3.317649 | 0.331765 | 10 |
| SH3RF3 | 3.218749 | 0.321875 | 10 |
| ADGRB1 | 5.758616 | 0.639846 | 9 |
| SND1 | 5.419146 | 0.602127 | 9 |
| ATP11A | 4.765904 | 0.529545 | 9 |
| ADAMTS2 | 3.946421 | 0.438491 | 9 |
| KCNMA1 | 3.728571 | 0.414286 | 9 |
| TRAPPC12 | 3.586849 | 0.398539 | 9 |
| AXIN2 | 3.538599 | 0.393178 | 9 |
| CACNA2D4 | 3.203809 | 0.355979 | 9 |
| NOTCH1 | 3.186872 | 0.354097 | 9 |
| LINC00311 | 5.007689 | 0.625961 | 8 |
| MSRA | 4.707704 | 0.588463 | 8 |
| ESRRG | 3.942771 | 0.492846 | 8 |
| RORA | 3.815378 | 0.476922 | 8 |
| DPP6 | 3.11482 | 0.389352 | 8 |
| DUSP6 | 5.324422 | 0.760632 | 7 |
| LINC00461 | 4.77633 | 0.682333 | 7 |
| NAV1 | 4.164379 | 0.594911 | 7 |
| FHIT | 4.122583 | 0.58894 | 7 |
| ITPKB | 3.575263 | 0.510752 | 7 |
| FBXL18 | 4.33218 | 0.72203 | 6 |
| FAM181A | 3.378516 | 0.563086 | 6 |
| SLC22A18AS | 3.30902 | 0.551503 | 6 |
| RUNDC3A | 5.339258 | 1.067852 | 5 |
| ARHGEF7 | 3.476753 | 0.695351 | 5 |
| THRB | 3.433111 | 0.686622 | 5 |
| CACNA1I | 3.363004 | 0.672601 | 5 |
| TK1 | 3.296835 | 0.659367 | 5 |
| TSNAX-DISC1 | 3.226471 | 0.645294 | 5 |
| STAP2 | 3.52695 | 0.881738 | 4 |
| CORO2B | 3.398559 | 0.84964 | 4 |
| RBMS3 | 3.3878 | 0.84695 | 4 |
| DTNA | 3.265761 | 0.81644 | 4 |
| GRIN2B | 4.117413 | 1.372471 | 3 |
| DAGLB | 3.313942 | 1.104647 | 3 |
| DLL1 | 3.178605 | 1.059535 | 3 |
| SOX10 | 4.950309 | 2.475154 | 2 |
| SLC25A10 | 3.296161 | 1.64808 | 2 |

TABLE 62
Cancer Type EWS

| Gene site | imp_sum | imp_mean | n |
|---|---|---|---|
| PTPRN2 | 6.594466 | 0.08042 | 82 |
| PRDM16 | 8.444389 | 0.118935 | 71 |
| PCDHGA1 | 3.163841 | 0.053624 | 59 |
| PCDHGA2 | 3.163841 | 0.055506 | 57 |
| PCDHGA3 | 3.163841 | 0.05859 | 54 |
| PCDHGB1 | 3.163841 | 0.059695 | 53 |
| PCDHGA4 | 3.163841 | 0.062036 | 51 |
| PCDHGB2 | 3.163841 | 0.064568 | 49 |
| PCDHGA5 | 3.163841 | 0.067316 | 47 |
| PCDHGB3 | 3.480227 | 0.080936 | 43 |
| HDAC4 | 8.759235 | 0.236736 | 37 |
| RBFOX3 | 4.953792 | 0.141537 | 35 |
| PAX6 | 4.909085 | 0.14026 | 35 |
| DIP2C | 7.742061 | 0.241939 | 32 |
| GALNT9 | 3.783787 | 0.14014 | 27 |
| SHANK2 | 4.063047 | 0.156271 | 26 |
| AGAP1 | 10.22599 | 0.40904 | 25 |
| CAMTA1 | 5.832812 | 0.233312 | 25 |
| SATB2 | 3.268379 | 0.136182 | 24 |
| MEIS1 | 3.164186 | 0.131841 | 24 |
| RPTOR | 10.08952 | 0.438675 | 23 |
| INPP5A | 6.721586 | 0.292243 | 23 |
| NCOR2 | 5.642924 | 0.245345 | 23 |
| PRKCZ | 3.891859 | 0.176903 | 22 |
| SKI | 8.625603 | 0.410743 | 21 |
| FRMD4A | 3.761279 | 0.188064 | 20 |
| ABR | 3.155898 | 0.157795 | 20 |
| SMG1P2 | 5.64643 | 0.297181 | 19 |
| BOLA2 | 5.64643 | 0.297181 | 19 |
| LOC613038 | 5.64643 | 0.297181 | 19 |
| ZNF423 | 5.470921 | 0.287943 | 19 |
| CASZ1 | 4.319583 | 0.227346 | 19 |
| MAD1L1 | 3.31708 | 0.174583 | 19 |
| ANKRD11 | 4.595043 | 0.25528 | 18 |
| SEPTIN9 | 4.030671 | 0.223926 | 18 |
| TBC1D16 | 3.436328 | 0.190907 | 18 |
| OPCML | 3.748227 | 0.220484 | 17 |
| EBF3 | 3.578374 | 0.223648 | 16 |
| FOXP1 | 3.051477 | 0.190717 | 16 |
| GLI2 | 6.11288 | 0.407525 | 15 |
| ZBTB20 | 4.576408 | 0.305094 | 15 |
| BAIAP2 | 3.671115 | 0.244741 | 15 |
| RPS6KA2 | 7.520536 | 0.537181 | 14 |
| IQSEC1 | 5.627224 | 0.401945 | 14 |
| PRKAG2 | 4.309802 | 0.307843 | 14 |
| C7orf50 | 4.272252 | 0.305161 | 14 |
| PPP2R2A | 3.526415 | 0.251887 | 14 |
| MIR548F5 | 3.246979 | 0.231927 | 14 |
| CUX1 | 3.035699 | 0.216836 | 14 |
| MSI2 | 5.781775 | 0.444752 | 13 |
| GSE1 | 3.471098 | 0.267008 | 13 |
| MYT1L | 3.140211 | 0.241555 | 13 |
| HOXC4 | 3.032424 | 0.233263 | 13 |
| FBRSL1 | 5.401794 | 0.450149 | 12 |
| CMIP | 4.698304 | 0.391525 | 12 |
| ADGRD1 | 4.340891 | 0.361741 | 12 |
| GNA12 | 3.997858 | 0.333155 | 12 |
| MEGF6 | 3.603341 | 0.300278 | 12 |
| RAD51B | 3.352156 | 0.304741 | 11 |
| CTBP2 | 3.021814 | 0.27471 | 11 |
| BCL11B | 5.072798 | 0.50728 | 10 |
| AKAP13 | 4.448844 | 0.444884 | 10 |
| CHST11 | 3.972987 | 0.397299 | 10 |
| FMN1 | 3.795513 | 0.379551 | 10 |
| ACOT7 | 3.710255 | 0.371026 | 10 |
| KLHL29 | 3.646232 | 0.364623 | 10 |
| GAS7 | 2.932857 | 0.293286 | 10 |
| RGS12 | 2.919996 | 0.292 | 10 |
| IGF1R | 2.912019 | 0.291202 | 10 |
| ATP11A | 6.351578 | 0.705731 | 9 |
| SND1 | 4.100007 | 0.455556 | 9 |
| MGMT | 3.877867 | 0.430874 | 9 |
| TSPAN9 | 3.575338 | 0.39726 | 9 |
| TRAPPC12 | 3.24621 | 0.36069 | 9 |
| ADAMTS2 | 2.987984 | 0.331998 | 9 |
| PACS2 | 2.966455 | 0.329606 | 9 |
| DNMT3A | 4.267716 | 0.533464 | 8 |
| VRK2 | 3.403344 | 0.425418 | 8 |
| DLEU1 | 3.081545 | 0.385193 | 8 |
| SHROOM3 | 3.073762 | 0.38422 | 8 |
| GRIK2 | 3.050294 | 0.381287 | 8 |
| MSRA | 3.047019 | 0.380877 | 8 |
| C19orf25 | 5.392038 | 0.770291 | 7 |
| NAV1 | 4.318606 | 0.616944 | 7 |
| PTPN20 | 2.995701 | 0.427957 | 7 |
| KCNAB2 | 2.943331 | 0.420476 | 7 |
| FBXL18 | 3.959427 | 0.659904 | 6 |
| CRADD | 3.504241 | 0.58404 | 6 |
| CCDC177 | 3.049015 | 0.508169 | 6 |
| PAX1 | 3.010346 | 0.501724 | 6 |
| RUNDC3A | 4.677137 | 0.935427 | 5 |
| ARHGEF7 | 4.245753 | 0.849151 | 5 |
| TSNAX-DISC1 | 4.070083 | 0.814017 | 5 |
| IDI2 | 3.253075 | 0.650615 | 5 |
| KLHL25 | 3.148576 | 0.629715 | 5 |
| DONSON | 3.503814 | 1.167938 | 3 |
| DAGLB | 3.381121 | 1.12704 | 3 |
| DICER1 | 3.264558 | 1.088186 | 3 |
| CHTF18 | 3.388371 | 1.694186 | 2 |
| SLC25A10 | 3.07935 | 1.539675 | 2 |

TABLE 63
Cancer Type GBM_CBM

| Gene site | imp_sum | imp_mean | n |
|---|---|---|---|
| PTPRN2 | 4.219585 | 0.051458 | 82 |
| PRDM16 | 5.223884 | 0.073576 | 71 |
| HDAC4 | 4.968689 | 0.134289 | 37 |
| PAX6 | 3.924259 | 0.112122 | 35 |
| RBFOX3 | 2.757375 | 0.078782 | 35 |
| DIP2C | 2.740991 | 0.085656 | 32 |
| SOX2-OT | 3.59743 | 0.124049 | 29 |
| PDGFRA | 2.993496 | 0.11974 | 25 |
| AGAP1 | 2.315682 | 0.092627 | 25 |
| CAMTA1 | 1.729468 | 0.069179 | 25 |
| SATB2 | 4.371957 | 0.182165 | 24 |
| RPTOR | 4.110492 | 0.178717 | 23 |
| NCOR2 | 1.999787 | 0.086947 | 23 |
| INPP5A | 1.963659 | 0.085376 | 23 |
| PRKCZ | 2.262767 | 0.102853 | 22 |
| SIM2 | 2.459611 | 0.117124 | 21 |
| FRMD4A | 1.52728 | 0.076364 | 20 |
| MAD1L1 | 3.476252 | 0.182961 | 19 |
| ZNF423 | 1.960736 | 0.103197 | 19 |
| CASZ1 | 1.76757 | 0.09303 | 19 |
| FOXK1 | 4.095143 | 0.227508 | 18 |
| SEPTIN9 | 2.346494 | 0.130361 | 18 |
| ANKRD11 | 2.23996 | 0.124442 | 18 |
| TBX15 | 2.832461 | 0.166615 | 17 |
| OPCML | 2.132107 | 0.125418 | 17 |
| FOXP1 | 2.240363 | 0.140023 | 16 |
| NAV2 | 1.612654 | 0.100791 | 16 |
| BAIAP2 | 2.22624 | 0.148416 | 15 |
| GLI2 | 1.827958 | 0.121864 | 15 |
| PPP2R2A | 2.990556 | 0.213611 | 14 |
| CUX1 | 2.290274 | 0.163591 | 14 |
| IQSEC1 | 2.230874 | 0.159348 | 14 |
| TBX5 | 1.898316 | 0.135594 | 14 |
| PRKAG2 | 1.407036 | 0.100503 | 14 |
| MYT1L | 1.690763 | 0.130059 | 13 |
| MIR9-3HG | 1.58193 | 0.121687 | 13 |
| SPTBN4 | 1.521369 | 0.117028 | 13 |
| MIRLET7BHG | 3.578224 | 0.298185 | 12 |
| TBX4 | 2.297014 | 0.191418 | 12 |
| CMIP | 1.565499 | 0.130458 | 12 |
| MAML3 | 1.411568 | 0.117631 | 12 |
| ADGRD1 | 1.391228 | 0.115936 | 12 |
| CCDC140 | 2.278284 | 0.207117 | 11 |
| VGLL4 | 1.650163 | 0.150015 | 11 |
| GLUD1P2 | 1.584414 | 0.144038 | 11 |
| LBX1-AS1 | 3.359792 | 0.335979 | 10 |
| TSPAN4 | 2.514486 | 0.251449 | 10 |
| OTX1 | 2.43546 | 0.243546 | 10 |
| ACOT7 | 2.384765 | 0.238476 | 10 |
| NR2F1-AS1 | 1.584295 | 0.15843 | 10 |
| TFAP2A | 1.529399 | 0.15294 | 10 |
| ATP11A | 2.97819 | 0.33091 | 9 |
| RUNX1 | 1.959724 | 0.217747 | 9 |
| TSPAN9 | 1.787018 | 0.198558 | 9 |
| ZNF833P | 1.704292 | 0.189366 | 9 |
| ADGRB1 | 1.656848 | 0.184094 | 9 |
| NOTCH1 | 1.622247 | 0.18025 | 9 |
| GPC6 | 1.497155 | 0.166351 | 9 |
| APBA2 | 1.495026 | 0.166114 | 9 |
| SND1 | 1.401819 | 0.155758 | 9 |
| GRIK2 | 2.572652 | 0.321582 | 8 |
| MSRA | 2.151155 | 0.268894 | 8 |
| MACROD1 | 1.432446 | 0.179056 | 8 |
| RORA | 1.422077 | 0.17776 | 8 |
| NR2E1 | 1.392098 | 0.174012 | 8 |
| DLEU1 | 1.384263 | 0.173033 | 8 |
| TACC2 | 2.292627 | 0.327518 | 7 |
| NAV1 | 2.179499 | 0.311357 | 7 |
| LINC00461 | 2.036008 | 0.290858 | 7 |
| RBM20 | 1.829679 | 0.261383 | 7 |
| DUSP6 | 1.605871 | 0.22941 | 7 |
| FBXL18 | 2.118706 | 0.353118 | 6 |
| FAM181A | 2.084256 | 0.347376 | 6 |
| VAX2 | 1.780092 | 0.296682 | 6 |
| SATB2-AS1 | 1.739164 | 0.289861 | 6 |
| TRAK1 | 1.680758 | 0.280126 | 6 |
| FMNL2 | 1.58193 | 0.263655 | 6 |
| SLC22A18AS | 1.512488 | 0.252081 | 6 |
| MYO16 | 1.493941 | 0.24899 | 6 |
| LRRFIP1 | 1.420423 | 0.236737 | 6 |
| RUNDC3A | 2.517392 | 0.503478 | 5 |
| LOC100132215 | 2.087629 | 0.417526 | 5 |
| CACNA1I | 1.661515 | 0.332303 | 5 |
| KLHL25 | 1.518958 | 0.303792 | 5 |
| ARHGEF7 | 1.457993 | 0.291599 | 5 |
| RAPGEF4 | 1.396595 | 0.279319 | 5 |
| STAP2 | 2.002651 | 0.500663 | 4 |
| RBMS3 | 1.956574 | 0.489144 | 4 |
| DTNA | 1.634875 | 0.408719 | 4 |
| TUBA1C | 1.486045 | 0.371511 | 4 |
| FRMPD2 | 1.396595 | 0.349149 | 4 |
| TTC12 | 1.91512 | 0.638373 | 3 |
| LOXL3 | 1.633668 | 0.544556 | 3 |
| METAP1D | 1.453821 | 0.484607 | 3 |
| SLC25A22 | 1.429634 | 0.476545 | 3 |
| SLC4A8 | 1.389227 | 0.463076 | 3 |
| SOX10 | 2.79619 | 1.398095 | 2 |
| SLC25A10 | 1.591924 | 0.795962 | 2 |
| ANKLE2 | 1.498168 | 0.749084 | 2 |
| PHF19 | 1.38402 | 0.69201 | 2 |

TABLE 64
Cancer Type GBM_G34

| Gene site | imp_sum | imp_mean | n |
|---|---|---|---|
| PTPRN2 | 19.89897 | 0.24267 | 82 |
| PRDM16 | 14.43818 | 0.203355 | 71 |
| PCDHGA1 | 7.473345 | 0.126667 | 59 |
| PCDHGA2 | 7.473345 | 0.131111 | 57 |
| PCDHGA3 | 7.473345 | 0.138395 | 54 |
| PCDHGB1 | 7.473345 | 0.141007 | 53 |
| PCDHGA4 | 7.473345 | 0.146536 | 51 |
| PCDHGB2 | 7.460566 | 0.152256 | 49 |
| PCDHGA5 | 7.096471 | 0.150989 | 47 |
| PCDHGB3 | 6.379765 | 0.148367 | 43 |
| PCDHGA6 | 5.796002 | 0.1449 | 40 |
| HDAC4 | 11.11229 | 0.300332 | 37 |
| PCDHGA7 | 5.322527 | 0.143852 | 37 |
| RBFOX3 | 11.3611 | 0.324603 | 35 |
| PAX6 | 7.229973 | 0.206571 | 35 |
| PCDHGB4 | 5.322527 | 0.152072 | 35 |
| PCDHGA8 | 5.322527 | 0.152072 | 35 |
| DIP2C | 6.139385 | 0.191856 | 32 |
| PCDHGB5 | 5.006141 | 0.156442 | 32 |
| PCDHGA9 | 5.006141 | 0.161488 | 31 |
| SOX2-OT | 10.3488 | 0.356855 | 29 |
| PCDHGB6 | 4.443301 | 0.153217 | 29 |
| PCDHGA10 | 4.443301 | 0.158689 | 28 |
| SHANK2 | 5.9963 | 0.230627 | 26 |
| ADARB2 | 5.055486 | 0.194442 | 26 |
| AGAP1 | 8.358635 | 0.334345 | 25 |
| CAMTA1 | 8.271489 | 0.33086 | 25 |
| PDGFRA | 6.358749 | 0.25435 | 25 |
| SATB2 | 9.115991 | 0.379833 | 24 |
| MEIS1 | 6.622748 | 0.275948 | 24 |
| PCDHGB7 | 4.126915 | 0.171955 | 24 |
| RPTOR | 9.815838 | 0.426776 | 23 |
| INPP5A | 6.802927 | 0.295779 | 23 |
| NCOR2 | 5.704298 | 0.248013 | 23 |
| PRKCZ | 6.501686 | 0.295531 | 22 |
| SKI | 7.97741 | 0.379877 | 21 |
| FRMD4A | 4.932228 | 0.246611 | 20 |
| MAD1L1 | 11.39993 | 0.599996 | 19 |
| SMG1P2 | 8.181284 | 0.430594 | 19 |
| BOLA2 | 8.181284 | 0.430594 | 19 |
| LOC613038 | 8.181284 | 0.430594 | 19 |
| ZNF423 | 7.825319 | 0.411859 | 19 |
| CASZ1 | 4.801215 | 0.252696 | 19 |
| CFAP46 | 4.05837 | 0.213598 | 19 |
| KCNQ1 | 3.952958 | 0.20805 | 19 |
| FOXK1 | 6.041595 | 0.335644 | 18 |
| SEPTIN9 | 5.392621 | 0.29959 | 18 |
| MCF2L | 3.795464 | 0.210859 | 18 |
| OPCML | 6.854193 | 0.403188 | 17 |
| TBX15 | 4.596928 | 0.270408 | 17 |
| FOXP1 | 5.462874 | 0.34143 | 16 |
| EBF3 | 4.291585 | 0.268224 | 16 |
| GLI2 | 8.64613 | 0.576409 | 15 |
| EMX2OS | 4.110559 | 0.274037 | 15 |
| ZBTB20 | 3.936085 | 0.262406 | 15 |
| RPS6KA2 | 5.824749 | 0.416053 | 14 |
| CUX1 | 5.076042 | 0.362574 | 14 |
| IQSEC1 | 4.752308 | 0.339451 | 14 |
| MYT1L | 5.537306 | 0.425947 | 13 |
| MSI2 | 4.925849 | 0.378911 | 13 |
| KIF26B | 3.854842 | 0.296526 | 13 |
| MIRLET7BHG | 5.363207 | 0.446934 | 12 |
| TNS3 | 4.797854 | 0.399821 | 12 |
| CMIP | 4.72135 | 0.393446 | 12 |
| TBX4 | 4.663755 | 0.388646 | 12 |
| ZC3H12D | 5.092555 | 0.46296 | 11 |
| ANAPC16 | 4.847683 | 0.440698 | 11 |
| SORCS2 | 3.899277 | 0.35448 | 11 |
| SH3RF3 | 4.611812 | 0.461181 | 10 |
| ACOT7 | 4.229379 | 0.422938 | 10 |
| GRID1 | 4.011402 | 0.40114 | 10 |
| ATP11A | 7.379091 | 0.819899 | 9 |
| SND1 | 5.619648 | 0.624405 | 9 |
| AXIN2 | 4.860437 | 0.540049 | 9 |
| TSPAN9 | 4.587217 | 0.509691 | 9 |
| ADAMTS2 | 3.97508 | 0.441676 | 9 |
| TRAPPC12 | 3.971414 | 0.441268 | 9 |
| LINC00311 | 4.648027 | 0.581003 | 8 |
| DNMT3A | 4.303718 | 0.537965 | 8 |
| MSRA | 4.272627 | 0.534078 | 8 |
| LHX2 | 4.517777 | 0.645397 | 7 |
| GDNF | 4.454709 | 0.636387 | 7 |
| LINC00461 | 4.403363 | 0.629052 | 7 |
| CDYL | 4.356803 | 0.6224 | 7 |
| DUSP6 | 4.317444 | 0.616778 | 7 |
| GLI3 | 3.890153 | 0.555736 | 7 |
| LYPD1 | 5.224149 | 0.870691 | 6 |
| FBXL18 | 4.850918 | 0.808486 | 6 |
| SATB2-AS1 | 4.373285 | 0.728881 | 6 |
| FAM181A | 4.254141 | 0.709023 | 6 |
| ARHGEF7 | 4.251735 | 0.850347 | 5 |
| CASC15 | 4.150169 | 0.830034 | 5 |
| ATP2B4 | 3.866019 | 0.773204 | 5 |
| IGSF21 | 4.438775 | 1.109694 | 4 |
| STAP2 | 4.287031 | 1.071758 | 4 |
| DTNA | 3.80024 | 0.95006 | 4 |
| ARHGAP23 | 4.72853 | 1.576177 | 3 |
| SRRM3 | 3.870911 | 1.290304 | 3 |
| OLIG2 | 4.617618 | 2.308809 | 2 |
| SOX10 | 3.854589 | 1.927294 | 2 |

TABLE 65
Cancer Type GBM_MES_Atyp

| Gene site | imp_sum | imp_mean | n |
|---|---|---|---|
| PTPRN2 | 8.433087 | 0.102843 | 82 |
| PRDM16 | 6.780965 | 0.095507 | 71 |
| HDAC4 | 7.186587 | 0.194232 | 37 |
| PAX6 | 4.903338 | 0.140095 | 35 |
| RBFOX3 | 3.107038 | 0.088773 | 35 |
| DIP2C | 6.504262 | 0.203258 | 32 |
| SOX2-OT | 2.911348 | 0.100391 | 29 |
| SHANK2 | 3.576954 | 0.137575 | 26 |
| ADARB2 | 2.697827 | 0.103763 | 26 |
| CAMTA1 | 5.335488 | 0.21342 | 25 |
| PDGFRA | 4.368188 | 0.174728 | 25 |
| AGAP1 | 3.977791 | 0.159112 | 25 |
| SATB2 | 4.514819 | 0.188117 | 24 |
| MEIS1 | 3.689164 | 0.153715 | 24 |
| RPTOR | 7.619219 | 0.33127 | 23 |
| NCOR2 | 4.33597 | 0.18852 | 23 |
| RIMBP2 | 2.708516 | 0.117762 | 23 |
| INPP5A | 2.477152 | 0.107702 | 23 |
| PRKCZ | 2.809272 | 0.127694 | 22 |
| SKI | 4.27164 | 0.203411 | 21 |
| FRMD4A | 3.782863 | 0.189143 | 20 |
| SDK1 | 3.117634 | 0.155882 | 20 |
| ABR | 2.594189 | 0.129709 | 20 |
| MAD1L1 | 7.157094 | 0.376689 | 19 |
| ZNF423 | 3.094365 | 0.162861 | 19 |
| SMG1P2 | 2.938503 | 0.154658 | 19 |
| BOLA2 | 2.938503 | 0.154658 | 19 |
| LOC613038 | 2.938503 | 0.154658 | 19 |
| KCNQ1 | 2.773978 | 0.145999 | 19 |
| CASZ1 | 2.31299 | 0.121736 | 19 |
| ANKRD11 | 5.108699 | 0.283817 | 18 |
| FOXK1 | 4.541819 | 0.252323 | 18 |
| TBC1D16 | 3.514847 | 0.195269 | 18 |
| SEPTIN9 | 3.070805 | 0.1706 | 18 |
| PAX6-AS1 | 3.440958 | 0.202409 | 17 |
| RCN1 | 3.440958 | 0.202409 | 17 |
| TBX15 | 2.685264 | 0.157957 | 17 |
| FOXP1 | 3.750495 | 0.234406 | 16 |
| EBF3 | 3.173477 | 0.198342 | 16 |
| NAV2 | 3.098199 | 0.193637 | 16 |
| SORBS2 | 2.531166 | 0.158198 | 16 |
| GLI2 | 4.379243 | 0.29195 | 15 |
| BAIAP2 | 2.897856 | 0.19319 | 15 |
| NFIX | 2.366496 | 0.157766 | 15 |
| KNDC1 | 2.361173 | 0.157412 | 15 |
| PRKAG2 | 4.298671 | 0.307048 | 14 |
| RPS6KA2 | 4.264028 | 0.304573 | 14 |
| CUX1 | 3.672298 | 0.262307 | 14 |
| ARHGEF10 | 2.952753 | 0.210911 | 14 |
| IQSEC1 | 2.923624 | 0.20883 | 14 |
| MIR548F5 | 2.413638 | 0.172403 | 14 |
| TBX5 | 2.300758 | 0.16434 | 14 |
| MSI2 | 3.096241 | 0.238172 | 13 |
| CMIP | 4.54422 | 0.378685 | 12 |
| MAML3 | 3.456282 | 0.288023 | 12 |
| ADGRD1 | 3.143607 | 0.261967 | 12 |
| FBRSL1 | 2.786601 | 0.232217 | 12 |
| CTNNA2 | 2.585921 | 0.215493 | 12 |
| SORCS2 | 2.993974 | 0.272179 | 11 |
| ANAPC16 | 2.493181 | 0.226653 | 11 |
| SLC38A10 | 2.475242 | 0.225022 | 11 |
| VGLL4 | 2.324173 | 0.211288 | 11 |
| SH3RF3 | 3.976811 | 0.397681 | 10 |
| TSPAN4 | 3.618876 | 0.361888 | 10 |
| AKAP13 | 3.113099 | 0.31131 | 10 |
| BCL11B | 3.084883 | 0.308488 | 10 |
| GAS7 | 2.404786 | 0.240479 | 10 |
| FMN1 | 2.334601 | 0.23346 | 10 |
| SND1 | 3.742607 | 0.415845 | 9 |
| AXIN2 | 3.283112 | 0.36479 | 9 |
| RUNX1 | 3.232644 | 0.359183 | 9 |
| ADAMTS2 | 3.075889 | 0.341765 | 9 |
| TRAPPC12 | 2.869826 | 0.31887 | 9 |
| NOTCH1 | 2.600302 | 0.288922 | 9 |
| ASAP1 | 2.478045 | 0.275338 | 9 |
| ADGRB1 | 2.463991 | 0.273777 | 9 |
| MCC | 3.597978 | 0.449747 | 8 |
| LINC00311 | 2.817797 | 0.352225 | 8 |
| LHX4 | 2.589797 | 0.323725 | 8 |
| DNMT3A | 2.573273 | 0.321659 | 8 |
| MSRA | 2.46484 | 0.308105 | 8 |
| DLEU1 | 2.384677 | 0.298085 | 8 |
| AFF3 | 2.306736 | 0.288342 | 8 |
| MACROD1 | 2.300575 | 0.287572 | 8 |
| C19orf25 | 3.355938 | 0.47942 | 7 |
| ITPK1 | 3.117822 | 0.445403 | 7 |
| CDYL | 2.714648 | 0.387807 | 7 |
| NAV1 | 2.690872 | 0.38441 | 7 |
| SLC22A18AS | 3.300956 | 0.550159 | 6 |
| MIR100HG | 2.84836 | 0.474727 | 6 |
| LRRFIP1 | 2.530759 | 0.421793 | 6 |
| FMNL2 | 2.440385 | 0.406731 | 6 |
| MIR548G | 2.379921 | 0.396653 | 6 |
| KLHL25 | 3.043751 | 0.60875 | 5 |
| ARHGEF7 | 2.408625 | 0.481725 | 5 |
| TUBA1C | 2.46219 | 0.615547 | 4 |
| DAGLB | 2.838583 | 0.946194 | 3 |
| ACSL1 | 2.293654 | 0.764551 | 3 |
| SOX10 | 2.94264 | 1.47132 | 2 |
| SLC25A10 | 2.649164 | 1.324582 | 2 |

TABLE 66
Cancer Type GBM_MES_Typ

| Gene site | imp_sum | imp_mean | n |
|---|---|---|---|
| PTPRN2 | 23.49127 | 0.286479 | 82 |
| PRDM16 | 22.97156 | 0.323543 | 71 |
| PCDHGA1 | 10.84728 | 0.183852 | 59 |
| PCDHGA2 | 10.21451 | 0.179202 | 57 |
| PCDHGA3 | 9.06282 | 0.16783 | 54 |
| PCDHGB1 | 9.06282 | 0.170997 | 53 |
| PCDHGA4 | 9.06282 | 0.177702 | 51 |
| PCDHGB2 | 8.931951 | 0.182285 | 49 |
| PCDHGA5 | 8.422682 | 0.179206 | 47 |
| PCDHGB3 | 7.473524 | 0.173803 | 43 |
| PCDHGA6 | 6.709864 | 0.167747 | 40 |
| HDAC4 | 15.91135 | 0.430036 | 37 |
| PCDHGA7 | 6.393478 | 0.172797 | 37 |
| PAX6 | 11.66539 | 0.333297 | 35 |
| RBFOX3 | 7.368602 | 0.210531 | 35 |
| PCDHGB4 | 6.288867 | 0.179682 | 35 |
| PCDHGA8 | 6.288867 | 0.179682 | 35 |
| DIP2C | 10.53407 | 0.32919 | 32 |
| PCDHGB5 | 6.288867 | 0.196527 | 32 |
| PCDHGA9 | 6.288867 | 0.202867 | 31 |
| SOX2-OT | 7.7339 | 0.266686 | 29 |
| PCDHGB6 | 5.473696 | 0.188748 | 29 |
| PCDHGA10 | 5.473696 | 0.195489 | 28 |
| SHANK2 | 6.019655 | 0.231525 | 26 |
| ADARB2 | 5.68846 | 0.218787 | 26 |
| AGAP1 | 10.45411 | 0.418164 | 25 |
| CAMTA1 | 7.166051 | 0.286642 | 25 |
| PDGFRA | 6.769784 | 0.270791 | 25 |
| MEIS1 | 6.634768 | 0.276449 | 24 |
| SATB2 | 6.269327 | 0.261222 | 24 |
| PCDHGB7 | 5.802861 | 0.241786 | 24 |
| RPTOR | 12.93967 | 0.562595 | 23 |
| RIMBP2 | 6.255045 | 0.271958 | 23 |
| NCOR2 | 6.172236 | 0.268358 | 23 |
| NXN | 6.129696 | 0.266509 | 23 |
| PCDHGA11 | 5.561293 | 0.241795 | 23 |
| INPP5A | 4.458401 | 0.193844 | 23 |
| PRKCZ | 6.232476 | 0.283294 | 22 |
| SKI | 10.62373 | 0.505892 | 21 |
| HOXA-AS3 | 4.545824 | 0.216468 | 21 |
| ZIC4 | 4.536976 | 0.216046 | 21 |
| SIM2 | 4.451726 | 0.211987 | 21 |
| FRMD4A | 7.193395 | 0.35967 | 20 |
| ABR | 5.89055 | 0.294528 | 20 |
| SDK1 | 5.592627 | 0.279631 | 20 |
| MAD1L1 | 12.94929 | 0.681541 | 19 |
| ZNF423 | 7.647999 | 0.402526 | 19 |
| CASZ1 | 7.56223 | 0.398012 | 19 |
| SMG1P2 | 6.857681 | 0.360931 | 19 |
| BOLA2 | 6.857681 | 0.360931 | 19 |
| LOC613038 | 6.857681 | 0.360931 | 19 |
| KCNQ1 | 5.770086 | 0.303689 | 19 |
| ANKRD11 | 7.654705 | 0.425261 | 18 |
| FOXK1 | 7.432383 | 0.41291 | 18 |
| MCF2L | 6.444539 | 0.35803 | 18 |
| TBC1D16 | 5.943273 | 0.330182 | 18 |
| RBFOX1 | 4.392738 | 0.244041 | 18 |
| PAX6-AS1 | 6.660589 | 0.391799 | 17 |
| RCN1 | 6.660589 | 0.391799 | 17 |
| OPCML | 6.571515 | 0.38656 | 17 |
| FOXP1 | 7.921231 | 0.495077 | 16 |
| NAV2 | 6.202516 | 0.387657 | 16 |
| EBF3 | 4.524319 | 0.28277 | 16 |
| GLI2 | 9.308291 | 0.620553 | 15 |
| KIRREL3 | 6.247889 | 0.416526 | 15 |
| KNDC1 | 5.324119 | 0.354941 | 15 |
| NFIX | 5.277974 | 0.351865 | 15 |
| BAIAP2 | 4.98361 | 0.332241 | 15 |
| ZBTB20 | 4.772255 | 0.31815 | 15 |
| RPS6KA2 | 6.525278 | 0.466091 | 14 |
| PRKAG2 | 6.037694 | 0.431264 | 14 |
| C7orf50 | 5.965491 | 0.426107 | 14 |
| MIR548F5 | 4.766224 | 0.340445 | 14 |
| GNG7 | 4.731929 | 0.337995 | 14 |
| MSI2 | 8.116375 | 0.624337 | 13 |
| SPTBN4 | 5.54136 | 0.426258 | 13 |
| MYT1L | 5.028356 | 0.386797 | 13 |
| ZC3H3 | 5.032763 | 0.419397 | 12 |
| CMIP | 4.971106 | 0.414259 | 12 |
| FBRSL1 | 4.79912 | 0.399927 | 12 |
| TNS3 | 4.75218 | 0.396015 | 12 |
| SORCS2 | 4.921415 | 0.447401 | 11 |
| VGLL4 | 4.606674 | 0.418789 | 11 |
| COL4A1 | 4.48589 | 0.407808 | 11 |
| ACOT7 | 5.030053 | 0.503005 | 10 |
| AKAP13 | 4.56057 | 0.456057 | 10 |
| SND1 | 7.281794 | 0.809088 | 9 |
| ADAMTS2 | 5.153743 | 0.572638 | 9 |
| TSPAN9 | 4.538052 | 0.504228 | 9 |
| TRAPPC12 | 4.457085 | 0.495232 | 9 |
| SSBP3 | 4.353363 | 0.483707 | 9 |
| LINC00311 | 4.787609 | 0.598451 | 8 |
| DLEU1 | 4.646289 | 0.580786 | 8 |
| RGS20 | 4.459601 | 0.55745 | 8 |
| DUSP6 | 5.217385 | 0.745341 | 7 |
| LINC00461 | 4.68498 | 0.669283 | 7 |
| NAV1 | 4.450325 | 0.635761 | 7 |
| FBXL18 | 4.963335 | 0.827222 | 6 |
| TSNAX-DISC1 | 4.412335 | 0.882467 | 5 |
| SOX10 | 4.332658 | 2.166329 | 2 |

TABLE 67
Cancer Type GBM_ped_ND_A

| Gene site | imp_sum | imp_mean | n |
|---|---|---|---|
| PTPRN2 | 4.660027 | 0.05683 | 82 |
| PRDM16 | 1.212407 | 0.017076 | 71 |
| PCDHGA1 | 1.98213 | 0.033595 | 59 |
| PCDHGA2 | 1.98213 | 0.034774 | 57 |
| PCDHGA3 | 1.98213 | 0.036706 | 54 |
| PCDHGB1 | 1.98213 | 0.037399 | 53 |
| PCDHGA4 | 1.665744 | 0.032662 | 51 |
| PCDHGB2 | 1.665744 | 0.033995 | 49 |
| PCDHGA5 | 1.265544 | 0.026926 | 47 |
| PCDHGB3 | 1.265544 | 0.029431 | 43 |
| PCDHGA6 | 1.265544 | 0.031639 | 40 |
| HDAC4 | 2.229184 | 0.060248 | 37 |
| DIP2C | 2.621531 | 0.081923 | 32 |
| SOX2-OT | 2.793191 | 0.096317 | 29 |
| SHANK2 | 1.387906 | 0.053381 | 26 |
| ADARB2 | 1.080209 | 0.041547 | 26 |
| CAMTA1 | 2.15173 | 0.086069 | 25 |
| AGAP1 | 1.310034 | 0.052401 | 25 |
| SATB2 | 3.618022 | 0.150751 | 24 |
| RPTOR | 1.304413 | 0.056714 | 23 |
| RIMBP2 | 1.265544 | 0.055024 | 23 |
| PRKCZ | 1.835344 | 0.083425 | 22 |
| SKI | 2.527028 | 0.120335 | 21 |
| ZIC4 | 1.396595 | 0.066505 | 21 |
| ZNF423 | 2.805755 | 0.147671 | 19 |
| MAD1L1 | 2.765159 | 0.145535 | 19 |
| SMG1P2 | 2.46524 | 0.129749 | 19 |
| BOLA2 | 2.46524 | 0.129749 | 19 |
| LOC613038 | 2.46524 | 0.129749 | 19 |
| CASZ1 | 2.132961 | 0.112261 | 19 |
| FOXK1 | 2.36923 | 0.131624 | 18 |
| SEPTIN9 | 1.792162 | 0.099565 | 18 |
| MCF2L | 1.431384 | 0.079521 | 18 |
| RBFOX1 | 1.38183 | 0.076768 | 18 |
| TBX15 | 1.93143 | 0.113614 | 17 |
| OPCML | 1.606827 | 0.094519 | 17 |
| PAX6-AS1 | 1.265544 | 0.074444 | 17 |
| RCN1 | 1.265544 | 0.074444 | 17 |
| GLI2 | 2.853675 | 0.190245 | 15 |
| LRMDA | 1.58193 | 0.105462 | 15 |
| CUX1 | 2.424641 | 0.173189 | 14 |
| RPS6KA2 | 2.029367 | 0.144955 | 14 |
| PRKAG2 | 1.396595 | 0.099757 | 14 |
| CLYBL | 1.712981 | 0.131768 | 13 |
| ADGRD1 | 1.743981 | 0.145332 | 12 |
| FBRSL1 | 1.298956 | 0.108246 | 12 |
| TBX4 | 1.265544 | 0.105462 | 12 |
| CMIP | 1.180952 | 0.098413 | 12 |
| ZC3H12D | 2.137458 | 0.194314 | 11 |
| RAD51B | 1.387906 | 0.126173 | 11 |
| TBCD | 1.080209 | 0.098201 | 11 |
| NTM | 1.918556 | 0.191856 | 10 |
| TFAP2B | 1.34721 | 0.134721 | 10 |
| ACOT7 | 1.227596 | 0.12276 | 10 |
| BCL11B | 1.206764 | 0.120676 | 10 |
| AUTS2 | 1.080209 | 0.108021 | 10 |
| ATP11A | 1.929964 | 0.21444 | 9 |
| AXIN2 | 1.916799 | 0.212978 | 9 |
| SND1 | 1.197867 | 0.133096 | 9 |
| TSPAN9 | 1.174158 | 0.130462 | 9 |
| SYNJ2 | 1.650285 | 0.206286 | 8 |
| RGS20 | 1.387906 | 0.173488 | 8 |
| LHX4 | 1.265544 | 0.158193 | 8 |
| NR2E1 | 1.080209 | 0.135026 | 8 |
| LINC00311 | 1.080209 | 0.135026 | 8 |
| CDYL | 1.884525 | 0.269218 | 7 |
| TRIM2 | 1.396595 | 0.199514 | 7 |
| ITPKB | 1.205787 | 0.172255 | 7 |
| LHX2 | 1.193883 | 0.170555 | 7 |
| OTX2-AS1 | 1.080209 | 0.154316 | 7 |
| FBXL18 | 1.784169 | 0.297362 | 6 |
| ACTR3C | 1.704515 | 0.284086 | 6 |
| SATB2-AS1 | 1.681932 | 0.280322 | 6 |
| FAM181A | 1.440657 | 0.24011 | 6 |
| LRRFIP1 | 1.330824 | 0.221804 | 6 |
| SLC22A18AS | 1.202572 | 0.200429 | 6 |
| LIMCH1 | 1.20248 | 0.200413 | 6 |
| FMNL2 | 1.097757 | 0.18296 | 6 |
| CDK6 | 1.080209 | 0.180035 | 6 |
| JAKMIP1 | 1.080209 | 0.180035 | 6 |
| CELSR1 | 1.075712 | 0.179285 | 6 |
| TRABD2B | 1.071723 | 0.178621 | 6 |
| CACNA2D3 | 1.07152 | 0.178587 | 6 |
| MNX1 | 2.115646 | 0.423129 | 5 |
| HLX | 1.527647 | 0.305529 | 5 |
| ARHGEF7 | 1.354671 | 0.270934 | 5 |
| TMEM132C | 1.160199 | 0.23204 | 5 |
| SHOX2 | 1.119658 | 0.223932 | 5 |
| CPZ | 1.07152 | 0.214304 | 5 |
| NPHP4 | 1.06875 | 0.21375 | 5 |
| RBMS3 | 1.492019 | 0.373005 | 4 |
| IGF2BP3 | 1.432903 | 0.358226 | 4 |
| VOPP1 | 1.354583 | 0.338646 | 4 |
| PPM1H | 1.24313 | 0.310783 | 4 |
| UNQ6494 | 1.241017 | 0.310254 | 4 |
| LIPE-AS1 | 1.076052 | 0.269013 | 4 |
| DAGLB | 1.703494 | 0.567831 | 3 |
| SLC6A9 | 1.086286 | 0.362095 | 3 |
| TLX1NB | 1.080209 | 0.36007 | 3 |
| SLC25A10 | 2.125032 | 1.062516 | 2 |

TABLE 68
Cancer Type GBM_ped_ND_B

| Gene site | imp_sum | imp_mean | n |
|---|---|---|---|
| PTPRN2 | 12.14662 | 0.14813 | 82 |
| PRDM16 | 6.993189 | 0.098496 | 71 |
| PCDHGA1 | 5.102496 | 0.086483 | 59 |
| PCDHGA2 | 5.102496 | 0.089517 | 57 |
| PCDHGA3 | 4.681997 | 0.086704 | 54 |
| PCDHGB1 | 4.681997 | 0.08834 | 53 |
| PCDHGA4 | 4.365611 | 0.0856 | 51 |
| PCDHGB2 | 4.365611 | 0.089094 | 49 |
| PCDHGA5 | 3.843487 | 0.081776 | 47 |
| PCDHGB3 | 3.527101 | 0.082026 | 43 |
| PCDHGA6 | 3.527101 | 0.088178 | 40 |
| HDAC4 | 6.965959 | 0.188269 | 37 |
| PCDHGA7 | 3.210715 | 0.086776 | 37 |
| PAX6 | 8.183288 | 0.233808 | 35 |
| RBFOX3 | 4.508841 | 0.128824 | 35 |
| PCDHGB4 | 3.210715 | 0.091735 | 35 |
| PCDHGA8 | 3.210715 | 0.091735 | 35 |
| DIP2C | 5.416515 | 0.169266 | 32 |
| PCDHGB5 | 3.210715 | 0.100335 | 32 |
| PCDHGA9 | 3.210715 | 0.103571 | 31 |
| PCDHGB6 | 2.584559 | 0.089123 | 29 |
| SHANK2 | 3.321582 | 0.127753 | 26 |
| ADARB2 | 3.108278 | 0.119549 | 26 |
| AGAP1 | 5.4006 | 0.216024 | 25 |
| PDGFRA | 2.602431 | 0.104097 | 25 |
| CAMTA1 | 2.419096 | 0.096764 | 25 |
| SATB2 | 7.161246 | 0.298385 | 24 |
| MEIS1 | 3.279392 | 0.136641 | 24 |
| NCOR2 | 4.341474 | 0.18876 | 23 |
| RPTOR | 3.937426 | 0.171192 | 23 |
| INPP5A | 3.519542 | 0.153024 | 23 |
| SKI | 5.30783 | 0.252754 | 21 |
| SIM2 | 3.927126 | 0.187006 | 21 |
| ABR | 2.58979 | 0.12949 | 20 |
| FRMD4A | 2.396029 | 0.119801 | 20 |
| MAD1L1 | 6.393482 | 0.336499 | 19 |
| ZNF423 | 6.385805 | 0.336095 | 19 |
| SMG1P2 | 4.47727 | 0.235646 | 19 |
| BOLA2 | 4.47727 | 0.235646 | 19 |
| LOC613038 | 4.47727 | 0.235646 | 19 |
| CASZ1 | 4.285857 | 0.225571 | 19 |
| MCF2L | 4.109657 | 0.228314 | 18 |
| ANKRD11 | 2.709106 | 0.150506 | 18 |
| SEPTIN9 | 2.548878 | 0.141604 | 18 |
| SIM1 | 5.797883 | 0.341052 | 17 |
| TBX15 | 4.177295 | 0.245723 | 17 |
| OPCML | 4.163199 | 0.244894 | 17 |
| FOXP1 | 2.710848 | 0.169428 | 16 |
| EBF3 | 2.326947 | 0.145434 | 16 |
| GLI2 | 7.550957 | 0.503397 | 15 |
| LRMDA | 2.788694 | 0.185913 | 15 |
| CUX1 | 4.424777 | 0.316056 | 14 |
| C7orf50 | 2.990176 | 0.213584 | 14 |
| RPS6KA2 | 2.923735 | 0.208838 | 14 |
| IQSEC1 | 2.848773 | 0.203484 | 14 |
| ARHGEF10 | 2.658323 | 0.18988 | 14 |
| PRKAG2 | 2.548134 | 0.18201 | 14 |
| SPTBN4 | 3.758864 | 0.289143 | 13 |
| MSI2 | 3.316939 | 0.255149 | 13 |
| CLYBL | 2.507192 | 0.192861 | 13 |
| TBX4 | 3.229651 | 0.269138 | 12 |
| ZC3H3 | 3.02575 | 0.252146 | 12 |
| TNS3 | 2.80412 | 0.233677 | 12 |
| CMIP | 2.559671 | 0.213306 | 12 |
| FBRSL1 | 2.511935 | 0.209328 | 12 |
| ADGRD1 | 2.397913 | 0.199826 | 12 |
| TBCD | 3.339869 | 0.303624 | 11 |
| RAD51B | 3.175857 | 0.288714 | 11 |
| ZC3H12D | 2.811273 | 0.25557 | 11 |
| TFAP2B | 3.53736 | 0.353736 | 10 |
| AKAP13 | 2.601768 | 0.260177 | 10 |
| LBX1-AS1 | 2.447679 | 0.244768 | 10 |
| ATP11A | 4.313543 | 0.479283 | 9 |
| SND1 | 3.356261 | 0.372918 | 9 |
| ADAMTS2 | 2.928678 | 0.325409 | 9 |
| RUNX1 | 2.889622 | 0.321069 | 9 |
| TRAPPC12 | 2.864223 | 0.318247 | 9 |
| NOTCH1 | 2.764459 | 0.307162 | 9 |
| ASAP1 | 2.588346 | 0.287594 | 9 |
| LHX9 | 2.382751 | 0.26475 | 9 |
| DMRTA2 | 2.361578 | 0.262398 | 9 |
| LINC00311 | 3.544951 | 0.443119 | 8 |
| NR2E1 | 2.462557 | 0.30782 | 8 |
| GRIK2 | 2.427412 | 0.303426 | 8 |
| CDYL | 3.880029 | 0.55429 | 7 |
| LHX2 | 2.714765 | 0.387824 | 7 |
| SATB2-AS1 | 3.780636 | 0.630106 | 6 |
| PAX1 | 3.657875 | 0.609646 | 6 |
| ACTR3C | 2.897499 | 0.482916 | 6 |
| FAM181A | 2.66049 | 0.443415 | 6 |
| FBXL18 | 2.482766 | 0.413794 | 6 |
| ARHGEF7 | 3.550002 | 0.71 | 5 |
| RUNDC3A | 2.678331 | 0.535666 | 5 |
| TSNAX-DISC1 | 2.443815 | 0.488763 | 5 |
| RBMS3 | 2.902629 | 0.725657 | 4 |
| UNQ6494 | 2.490583 | 0.622646 | 4 |
| CRB2 | 2.432396 | 0.608099 | 4 |
| SLC25A10 | 3.623653 | 1.811826 | 2 |
| ANKLE2 | 2.456756 | 1.228378 | 2 |
| ACAD10 | 2.40091 | 2.40091 | 1 |

TABLE 69
Cancer Type GBM_pedMYCN

| Gene site | imp_sum | imp_mean | n |
|---|---|---|---|
| PTPRN2 | 13.7309 | 0.16745 | 82 |
| PRDM16 | 14.16247 | 0.199471 | 71 |
| PCDHGA1 | 8.092392 | 0.137159 | 59 |
| PCDHGA2 | 7.776006 | 0.136421 | 57 |
| PCDHGA3 | 7.143234 | 0.132282 | 54 |
| PCDHGB1 | 7.45962 | 0.140748 | 53 |
| PCDHGA4 | 7.45962 | 0.146267 | 51 |
| PCDHGB2 | 7.143234 | 0.14578 | 49 |
| PCDHGA5 | 6.332692 | 0.134738 | 47 |
| PCDHGB3 | 5.629493 | 0.130918 | 43 |
| PCDHGA6 | 5.313107 | 0.132828 | 40 |
| HDAC4 | 6.570127 | 0.177571 | 37 |
| PCDHGA7 | 4.996721 | 0.135047 | 37 |
| PAX6 | 11.10894 | 0.317398 | 35 |
| RBFOX3 | 5.104816 | 0.145852 | 35 |
| PCDHGB4 | 4.984633 | 0.142418 | 35 |
| PCDHGA8 | 4.984633 | 0.142418 | 35 |
| DIP2C | 8.089298 | 0.252791 | 32 |
| PCDHGB5 | 4.809739 | 0.150304 | 32 |
| PCDHGA9 | 4.493353 | 0.144947 | 31 |
| SOX2-OT | 3.57114 | 0.123143 | 29 |
| PCDHGB6 | 3.322727 | 0.114577 | 29 |
| ADARB2 | 4.248209 | 0.163393 | 26 |
| SHANK2 | 4.211053 | 0.161964 | 26 |
| CAMTA1 | 8.757924 | 0.350317 | 25 |
| PDGFRA | 5.018825 | 0.200753 | 25 |
| AGAP1 | 4.881521 | 0.195261 | 25 |
| SATB2 | 10.03345 | 0.41806 | 24 |
| MEIS1 | 4.687863 | 0.195328 | 24 |
| NCOR2 | 5.290152 | 0.230007 | 23 |
| RPTOR | 4.949618 | 0.215201 | 23 |
| RIMBP2 | 4.056962 | 0.17639 | 23 |
| INPP5A | 3.448069 | 0.149916 | 23 |
| SKI | 6.838609 | 0.325648 | 21 |
| HOXA-AS3 | 3.484558 | 0.165931 | 21 |
| ABR | 5.172557 | 0.258628 | 20 |
| SDK1 | 4.600207 | 0.23001 | 20 |
| MAD1L1 | 7.765849 | 0.408729 | 19 |
| ZNF423 | 5.615465 | 0.295551 | 19 |
| CASZ1 | 4.149527 | 0.218396 | 19 |
| SMG1P2 | 3.848223 | 0.202538 | 19 |
| BOLA2 | 3.848223 | 0.202538 | 19 |
| LOC613038 | 3.848223 | 0.202538 | 19 |
| KCNQ1 | 3.783269 | 0.199119 | 19 |
| FOXK1 | 6.938724 | 0.385485 | 18 |
| SEPTIN9 | 5.291204 | 0.293956 | 18 |
| RBFOX1 | 4.540653 | 0.252258 | 18 |
| TBC1D16 | 3.39222 | 0.188457 | 18 |
| OPCML | 5.532892 | 0.325464 | 17 |
| TBX15 | 5.350234 | 0.31472 | 17 |
| PAX6-AS1 | 3.345572 | 0.196798 | 17 |
| RCN1 | 3.345572 | 0.196798 | 17 |
| FOXP1 | 3.748139 | 0.234259 | 16 |
| GLI2 | 4.770497 | 0.318033 | 15 |
| SLX1B- | 4.051811 | 0.270121 | 15 |
| SULT1A4 | | | |
| SLX1A | 4.051811 | 0.270121 | 15 |
| LOC606724 | 4.051811 | 0.270121 | 15 |
| RPS6KA2 | 4.640371 | 0.331455 | 14 |
| CUX1 | 4.195972 | 0.299712 | 14 |
| PRKAG2 | 3.509503 | 0.250679 | 14 |
| MSI2 | 3.661582 | 0.28166 | 13 |
| CLYBL | 3.430496 | 0.263884 | 13 |
| RFX4 | 3.323302 | 0.255639 | 13 |
| ZC3H3 | 5.034914 | 0.419576 | 12 |
| MIRLET7BHG | 4.906574 | 0.408881 | 12 |
| TBX4 | 4.513305 | 0.376109 | 12 |
| TNS3 | 4.300972 | 0.358414 | 12 |
| CMIP | 3.897793 | 0.324816 | 12 |
| SPON2 | 3.155581 | 0.286871 | 11 |
| ZC3H12D | 3.130966 | 0.284633 | 11 |
| TFAP2B | 4.794462 | 0.479446 | 10 |
| LBX1-AS1 | 4.313126 | 0.431313 | 10 |
| OTX1 | 3.891279 | 0.389128 | 10 |
| NTM | 3.878567 | 0.387857 | 10 |
| ACOT7 | 3.560066 | 0.356007 | 10 |
| NR5A2 | 3.307077 | 0.330708 | 10 |
| ADGRA1 | 3.244699 | 0.32447 | 10 |
| GAS7 | 3.133788 | 0.313379 | 10 |
| ATP11A | 5.134152 | 0.570461 | 9 |
| KCNH2 | 3.411673 | 0.379075 | 9 |
| SND1 | 3.364139 | 0.373793 | 9 |
| LINC00311 | 3.722809 | 0.465351 | 8 |
| VEPH1 | 3.630206 | 0.453776 | 8 |
| DLEU1 | 3.626791 | 0.453349 | 8 |
| LRRC61 | 3.498689 | 0.437336 | 8 |
| RGS20 | 3.332919 | 0.416615 | 8 |
| AFF3 | 3.311203 | 0.4139 | 8 |
| DNMT3A | 3.195727 | 0.399466 | 8 |
| ASPSCR1 | 3.123 | 0.390375 | 8 |
| CDYL | 4.192885 | 0.598984 | 7 |
| LHX2 | 3.769659 | 0.538523 | 7 |
| DUSP6 | 3.465504 | 0.495072 | 7 |
| SATB2-AS1 | 4.890843 | 0.81514 | 6 |
| ACTR3C | 3.265273 | 0.544212 | 6 |
| ATP2B4 | 4.18037 | 0.836074 | 5 |
| ARHGEF7 | 3.279377 | 0.655875 | 5 |
| SHOX2 | 3.12614 | 0.625228 | 5 |
| GRIN2B | 3.309093 | 1.103031 | 3 |
| SOX10 | 3.801967 | 1.900984 | 2 |
| SLC25A10 | 3.604396 | 1.802198 | 2 |

TABLE 70
Cancer Type GBM_pedRTK1a

| Gene site | imp_sum | imp_mean | n |
|---|---|---|---|
| PTPRN2 | 24.80392 | 0.302487 | 82 |
| PRDM16 | 16.05384 | 0.22611 | 71 |
| PCDHGA1 | 9.715844 | 0.164675 | 59 |
| PCDHGA2 | 9.715844 | 0.170453 | 57 |
| PCDHGA3 | 10.03223 | 0.185782 | 54 |
| PCDHGB1 | 10.34862 | 0.195257 | 53 |
| PCDHGA4 | 10.34862 | 0.202914 | 51 |
| PCDHGB2 | 10.03223 | 0.204739 | 49 |
| PCDHGA5 | 9.858888 | 0.209764 | 47 |
| PCDHGB3 | 9.516396 | 0.221312 | 43 |
| PCDHGA6 | 8.883624 | 0.222091 | 40 |
| HDAC4 | 11.62845 | 0.314282 | 37 |
| PCDHGA7 | 9.516396 | 0.2572 | 37 |
| RBFOX3 | 10.31311 | 0.29466 | 35 |
| PCDHGB4 | 8.883624 | 0.253818 | 35 |
| PCDHGA8 | 8.883624 | 0.253818 | 35 |
| PAX6 | 8.730832 | 0.249452 | 35 |
| DIP2C | 12.67672 | 0.396148 | 32 |
| PCDHGB5 | 8.567238 | 0.267726 | 32 |
| PCDHGA9 | 8.136833 | 0.262478 | 31 |
| SOX2-OT | 10.55781 | 0.364062 | 29 |
| PCDHGB6 | 7.482216 | 0.258007 | 29 |
| PCDHGA10 | 7.482216 | 0.267222 | 28 |
| SHANK2 | 4.574269 | 0.175933 | 26 |
| AGAP1 | 9.283145 | 0.371326 | 25 |
| PDGFRA | 7.722014 | 0.308881 | 25 |
| CAMTA1 | 6.438737 | 0.257549 | 25 |
| SATB2 | 9.78528 | 0.40772 | 24 |
| MEIS1 | 7.400244 | 0.308343 | 24 |
| PCDHGB7 | 7.16583 | 0.298576 | 24 |
| RPTOR | 8.582795 | 0.373165 | 23 |
| PCDHGA11 | 6.458615 | 0.280809 | 23 |
| INPP5A | 6.355389 | 0.276321 | 23 |
| PRKCZ | 5.929783 | 0.269536 | 22 |
| SKI | 11.02648 | 0.52507 | 21 |
| SIM2 | 6.157468 | 0.293213 | 21 |
| ABR | 6.332246 | 0.316612 | 20 |
| FRMD4A | 5.456517 | 0.272826 | 20 |
| SDK1 | 4.58138 | 0.229069 | 20 |
| MAD1L1 | 12.11511 | 0.637637 | 19 |
| ZNF423 | 10.45062 | 0.550033 | 19 |
| SMG1P2 | 6.194484 | 0.326025 | 19 |
| BOLA2 | 6.194484 | 0.326025 | 19 |
| LOC613038 | 6.194484 | 0.326025 | 19 |
| CASZ1 | 5.647379 | 0.29723 | 19 |
| FOXK1 | 7.159214 | 0.397734 | 18 |
| MCF2L | 4.622141 | 0.256786 | 18 |
| TBX15 | 5.525197 | 0.325012 | 17 |
| PAX6-AS1 | 4.792128 | 0.28189 | 17 |
| RCN1 | 4.792128 | 0.28189 | 17 |
| OPCML | 4.748257 | 0.279309 | 17 |
| NAV2 | 4.932821 | 0.308301 | 16 |
| GLI2 | 9.602972 | 0.640198 | 15 |
| ZBTB20 | 6.998146 | 0.466543 | 15 |
| LRMDA | 4.327524 | 0.288502 | 15 |
| COL23A1 | 4.216483 | 0.281099 | 15 |
| PCDHGA12 | 5.596429 | 0.399745 | 14 |
| RPS6KA2 | 5.49329 | 0.392378 | 14 |
| PRKAG2 | 4.76182 | 0.34013 | 14 |
| CUX1 | 4.426468 | 0.316176 | 14 |
| TBX5 | 4.404041 | 0.314574 | 14 |
| C7orf50 | 4.382117 | 0.313008 | 14 |
| MSI2 | 6.547676 | 0.503667 | 13 |
| MYT1L | 5.523665 | 0.424897 | 13 |
| RFX4 | 5.099645 | 0.39228 | 13 |
| GSE1 | 4.415732 | 0.339672 | 13 |
| CMIP | 6.031148 | 0.502596 | 12 |
| MEIS2 | 5.728016 | 0.477335 | 12 |
| ZC3H3 | 5.622596 | 0.46855 | 12 |
| TNS3 | 4.046921 | 0.337243 | 12 |
| FBRSL1 | 4.044398 | 0.337033 | 12 |
| VGLL4 | 5.44074 | 0.494613 | 11 |
| RAD51B | 4.763093 | 0.433008 | 11 |
| PCDHGC3 | 4.647271 | 0.422479 | 11 |
| FGFR2 | 4.172656 | 0.379332 | 11 |
| GLUD1P2 | 4.096334 | 0.372394 | 11 |
| LBX1-AS1 | 6.643877 | 0.664388 | 10 |
| ACOT7 | 4.245559 | 0.424556 | 10 |
| GRID1 | 4.217946 | 0.421795 | 10 |
| NR2F1-AS1 | 4.198591 | 0.419859 | 10 |
| SH3RF3 | 4.070687 | 0.407069 | 10 |
| SND1 | 6.143544 | 0.682616 | 9 |
| ATP11A | 5.905842 | 0.656205 | 9 |
| ASAP1 | 5.312638 | 0.590293 | 9 |
| ADGRB1 | 5.153716 | 0.572635 | 9 |
| TRAPPC12 | 4.912758 | 0.545862 | 9 |
| NOTCH1 | 4.490583 | 0.498954 | 9 |
| ADAMTS2 | 4.435597 | 0.492844 | 9 |
| LINC00311 | 4.672861 | 0.584108 | 8 |
| NXPH1 | 4.415364 | 0.55192 | 8 |
| DUSP6 | 6.259741 | 0.894249 | 7 |
| VPS13D | 4.510809 | 0.644401 | 7 |
| LHX2 | 4.153165 | 0.593309 | 7 |
| FBXL18 | 4.458406 | 0.743068 | 6 |
| RUNDC3A | 5.156 | 1.0312 | 5 |
| ATP2B4 | 5.053604 | 1.010721 | 5 |
| STAP2 | 5.171362 | 1.292841 | 4 |
| RBMS3 | 4.424791 | 1.106198 | 4 |
| GRIN2B | 4.55116 | 1.517053 | 3 |
| SOX10 | 4.786496 | 2.393248 | 2 |

TABLE 71
Cancer Type GBM_pedRTK1b

| Gene site | imp_sum | imp_mean | n |
|---|---|---|---|
| PTPRN2 | 16.8441 | 0.205416 | 82 |
| PRDM16 | 8.257376 | 0.116301 | 71 |
| PCDHGA1 | 4.124719 | 0.06991 | 59 |
| PCDHGA2 | 4.124719 | 0.072363 | 57 |
| PCDHGA3 | 4.441105 | 0.082243 | 54 |
| PCDHGB1 | 4.441105 | 0.083794 | 53 |
| PCDHGA4 | 4.124719 | 0.080877 | 51 |
| PCDHGB2 | 4.2585 | 0.086908 | 49 |
| PCDHGA5 | 3.96155 | 0.084288 | 47 |
| PCDHGB3 | 3.923728 | 0.091249 | 43 |
| PCDHGA6 | 3.607342 | 0.090184 | 40 |
| HDAC4 | 11.9522 | 0.323032 | 37 |
| PCDHGA7 | 3.607342 | 0.097496 | 37 |
| RBFOX3 | 11.41951 | 0.326272 | 35 |
| PAX6 | 7.858159 | 0.224519 | 35 |
| PCDHGB4 | 3.607342 | 0.103067 | 35 |
| PCDHGA8 | 3.607342 | 0.103067 | 35 |
| DIP2C | 8.969986 | 0.280312 | 32 |
| SOX2-OT | 8.36321 | 0.288387 | 29 |
| ADARB2 | 4.170747 | 0.160413 | 26 |
| SHANK2 | 4.005233 | 0.154047 | 26 |
| PDGFRA | 7.265464 | 0.290619 | 25 |
| AGAP1 | 7.15294 | 0.286118 | 25 |
| CAMTA1 | 5.170631 | 0.206825 | 25 |
| SATB2 | 5.301858 | 0.220911 | 24 |
| MEIS1 | 4.769272 | 0.19872 | 24 |
| RPTOR | 10.70811 | 0.46557 | 23 |
| INPP5A | 5.238358 | 0.227755 | 23 |
| NCOR2 | 3.92109 | 0.170482 | 23 |
| PRKCZ | 3.654551 | 0.166116 | 22 |
| SKI | 6.381008 | 0.303858 | 21 |
| FRMD4A | 5.678504 | 0.283925 | 20 |
| ABR | 3.950629 | 0.197531 | 20 |
| SDK1 | 3.726003 | 0.1863 | 20 |
| MAD1L1 | 6.973862 | 0.367045 | 19 |
| ZNF423 | 6.674353 | 0.351282 | 19 |
| SMG1P2 | 4.768102 | 0.250953 | 19 |
| BOLA2 | 4.768102 | 0.250953 | 19 |
| LOC613038 | 4.768102 | 0.250953 | 19 |
| CASZ1 | 4.337346 | 0.228281 | 19 |
| KCNQ1 | 3.811966 | 0.20063 | 19 |
| FOXK1 | 6.494021 | 0.360779 | 18 |
| SEPTIN9 | 5.08708 | 0.282616 | 18 |
| RBFOX1 | 5.08074 | 0.282263 | 18 |
| TBC1D16 | 4.43256 | 0.246253 | 18 |
| MCF2L | 3.741877 | 0.207882 | 18 |
| OPCML | 5.119027 | 0.301119 | 17 |
| TBX15 | 4.511745 | 0.265397 | 17 |
| PAX6-AS1 | 4.025643 | 0.236803 | 17 |
| RCN1 | 4.025643 | 0.236803 | 17 |
| FOXP1 | 4.976041 | 0.311003 | 16 |
| GLI2 | 10.24092 | 0.682728 | 15 |
| ZBTB20 | 6.312985 | 0.420866 | 15 |
| NFIX | 3.690353 | 0.246024 | 15 |
| BAIAP2 | 3.667221 | 0.244481 | 15 |
| KIRREL3 | 3.462071 | 0.230805 | 15 |
| NFATC1 | 3.451441 | 0.230096 | 15 |
| CUX1 | 5.320574 | 0.380041 | 14 |
| C7orf50 | 4.81344 | 0.343817 | 14 |
| RPS6KA2 | 4.752512 | 0.339465 | 14 |
| IQSEC1 | 4.536437 | 0.324031 | 14 |
| MSI2 | 5.416546 | 0.416657 | 13 |
| MYT1L | 4.465743 | 0.343519 | 13 |
| KIF26B | 3.910967 | 0.300844 | 13 |
| MIRLET7BHG | 5.539514 | 0.461626 | 12 |
| CMIP | 4.937353 | 0.411446 | 12 |
| ZC3H3 | 4.925995 | 0.4105 | 12 |
| FBRSL1 | 3.8216 | 0.318467 | 12 |
| RAD51B | 4.467921 | 0.406175 | 11 |
| GLUD1P2 | 4.168221 | 0.378929 | 11 |
| VGLL4 | 4.132147 | 0.37565 | 11 |
| CCDC140 | 3.554233 | 0.323112 | 11 |
| LBX1-AS1 | 7.500434 | 0.750043 | 10 |
| TSPAN4 | 4.208367 | 0.420837 | 10 |
| NR2F1-AS1 | 4.171545 | 0.417154 | 10 |
| SND1 | 5.542731 | 0.615859 | 9 |
| ATP11A | 5.413101 | 0.601456 | 9 |
| ZNF833P | 4.763877 | 0.52932 | 9 |
| ASAP1 | 4.354548 | 0.483839 | 9 |
| TRAPPC12 | 4.284941 | 0.476105 | 9 |
| NOTCH1 | 3.817776 | 0.424197 | 9 |
| GRIK2 | 4.906423 | 0.613303 | 8 |
| LINC00311 | 4.410606 | 0.551326 | 8 |
| DLEU1 | 3.741214 | 0.467652 | 8 |
| MSRA | 3.471661 | 0.433958 | 8 |
| NR2E1 | 3.463409 | 0.432926 | 8 |
| SOX6 | 5.964048 | 0.852007 | 7 |
| DUSP6 | 5.893848 | 0.841978 | 7 |
| NAV1 | 3.867131 | 0.552447 | 7 |
| GALNT2 | 3.781673 | 0.540239 | 7 |
| FBXL18 | 5.063272 | 0.843879 | 6 |
| CRACR2A | 3.885679 | 0.647613 | 6 |
| DNAJB6 | 3.881887 | 0.646981 | 6 |
| HOXD4 | 3.774326 | 0.629054 | 6 |
| VAX2 | 3.636933 | 0.606156 | 6 |
| RUNDC3A | 5.488615 | 1.097723 | 5 |
| TSNAX-DISC1 | 4.149847 | 0.829969 | 5 |
| STAP2 | 3.883946 | 0.970986 | 4 |
| GRIN2B | 4.116633 | 1.372211 | 3 |
| SOX10 | 5.368365 | 2.684182 | 2 |

TABLE 72
Cancer Type GBM_pedRTK1c

| Gene site | imp_sum | imp_mean | n |
|---|---|---|---|
| PTPRN2 | 21.58137 | 0.263187 | 82 |
| PRDM16 | 15.24929 | 0.214779 | 71 |
| PCDHGA1 | 13.78797 | 0.233694 | 59 |
| PCDHGA2 | 13.78797 | 0.241894 | 57 |
| PCDHGA3 | 13.11033 | 0.242784 | 54 |
| PCDHGB1 | 13.11033 | 0.247365 | 53 |
| PCDHGA4 | 13.11033 | 0.257065 | 51 |
| PCDHGB2 | 12.31356 | 0.251297 | 49 |
| PCDHGA5 | 11.60184 | 0.246848 | 47 |
| PCDHGB3 | 10.59932 | 0.246496 | 43 |
| PCDHGA6 | 9.643087 | 0.241077 | 40 |
| PCDHGA7 | 9.195832 | 0.248536 | 37 |
| HDAC4 | 8.502729 | 0.229803 | 37 |
| RBFOX3 | 9.03437 | 0.258125 | 35 |
| PCDHGB4 | 8.879446 | 0.253698 | 35 |
| PCDHGA8 | 8.879446 | 0.253698 | 35 |
| PAX6 | 5.81069 | 0.16602 | 35 |
| DIP2C | 10.58032 | 0.330635 | 32 |
| PCDHGB5 | 8.795632 | 0.274863 | 32 |
| PCDHGA9 | 8.479246 | 0.273524 | 31 |
| SOX2-OT | 7.604816 | 0.262235 | 29 |
| PCDHGB6 | 7.51977 | 0.259302 | 29 |
| PCDHGA10 | 7.51977 | 0.268563 | 28 |
| SHANK2 | 4.015922 | 0.154459 | 26 |
| CAMTA1 | 8.165847 | 0.326634 | 25 |
| PDGFRA | 7.934166 | 0.317367 | 25 |
| AGAP1 | 6.960914 | 0.278437 | 25 |
| SATB2 | 9.605772 | 0.40024 | 24 |
| PCDHGB7 | 6.570612 | 0.273776 | 24 |
| RPTOR | 7.988668 | 0.347333 | 23 |
| INPP5A | 6.102587 | 0.26533 | 23 |
| PCDHGA11 | 6.042179 | 0.262703 | 23 |
| HOXB3 | 4.130717 | 0.179596 | 23 |
| RIMBP2 | 4.09859 | 0.1782 | 23 |
| NCOR2 | 4.009765 | 0.174338 | 23 |
| PRKCZ | 6.119476 | 0.278158 | 22 |
| SKI | 6.474332 | 0.308302 | 21 |
| SIM2 | 5.283129 | 0.251578 | 21 |
| ZIC4 | 4.033671 | 0.19208 | 21 |
| FRMD4A | 6.903309 | 0.345165 | 20 |
| ABR | 5.841206 | 0.29206 | 20 |
| SDK1 | 4.903843 | 0.245192 | 20 |
| MAD1L1 | 9.776501 | 0.514553 | 19 |
| ZNF423 | 6.705634 | 0.352928 | 19 |
| SMG1P2 | 5.695178 | 0.299746 | 19 |
| BOLA2 | 5.695178 | 0.299746 | 19 |
| LOC613038 | 5.695178 | 0.299746 | 19 |
| CASZ1 | 5.679773 | 0.298935 | 19 |
| KCNQ1 | 5.066135 | 0.266639 | 19 |
| FOXK1 | 6.058288 | 0.336572 | 18 |
| TBC1D16 | 5.42445 | 0.301358 | 18 |
| MCF2L | 5.130007 | 0.285 | 18 |
| ANKRD11 | 4.908939 | 0.272719 | 18 |
| RBFOX1 | 3.99222 | 0.22179 | 18 |
| SEPTIN9 | 3.846863 | 0.213715 | 18 |
| TBX15 | 6.876137 | 0.404479 | 17 |
| OPCML | 4.769349 | 0.28055 | 17 |
| FOXP1 | 6.147698 | 0.384231 | 16 |
| SORBS2 | 4.38522 | 0.274076 | 16 |
| GLI2 | 11.62047 | 0.774698 | 15 |
| ZBTB20 | 4.843045 | 0.32287 | 15 |
| NFIX | 3.97448 | 0.264965 | 15 |
| CUX1 | 5.937357 | 0.424097 | 14 |
| RPS6KA2 | 4.826212 | 0.344729 | 14 |
| C7orf50 | 4.504922 | 0.32178 | 14 |
| MYT1L | 6.483682 | 0.498745 | 13 |
| MSI2 | 5.743576 | 0.441814 | 13 |
| RFX4 | 4.041167 | 0.310859 | 13 |
| ADGRD1 | 5.342894 | 0.445241 | 12 |
| MIRLET7BHG | 4.044424 | 0.337035 | 12 |
| CMIP | 4.025176 | 0.335431 | 12 |
| ZC3H3 | 3.947124 | 0.328927 | 12 |
| VGLL4 | 5.135635 | 0.466876 | 11 |
| RAD51B | 4.162093 | 0.378372 | 11 |
| LBX1-AS1 | 7.429146 | 0.742915 | 10 |
| GRID1 | 5.065253 | 0.506525 | 10 |
| NR2F1-AS1 | 4.644931 | 0.464493 | 10 |
| SH3RF3 | 4.491597 | 0.44916 | 10 |
| AKAP13 | 3.898361 | 0.389836 | 10 |
| ZNF833P | 6.168989 | 0.685443 | 9 |
| ATP11A | 5.682604 | 0.6314 | 9 |
| ASAP1 | 5.017223 | 0.557469 | 9 |
| SND1 | 4.822785 | 0.535865 | 9 |
| ADAMTS2 | 4.475024 | 0.497225 | 9 |
| GPC6 | 4.225264 | 0.469474 | 9 |
| NEAT1 | 4.193073 | 0.465897 | 9 |
| LINC00311 | 4.876328 | 0.609541 | 8 |
| GRIK2 | 4.622532 | 0.577816 | 8 |
| NR2E1 | 4.620947 | 0.577618 | 8 |
| RORA | 4.290015 | 0.536252 | 8 |
| PPP2R2B | 4.121802 | 0.515225 | 8 |
| DUSP6 | 5.596834 | 0.799548 | 7 |
| NAV1 | 5.228216 | 0.746888 | 7 |
| ITPKB | 4.251161 | 0.607309 | 7 |
| LHX2 | 4.084893 | 0.583556 | 7 |
| RUNDC3A | 4.809346 | 0.961869 | 5 |
| ARHGEF7 | 3.962916 | 0.792583 | 5 |
| STAP2 | 4.016796 | 1.004199 | 4 |
| GRIN2B | 4.484791 | 1.49493 | 3 |
| SOX10 | 5.491093 | 2.745546 | 2 |

TABLE 73
Cancer Type GBM_pedRTK2a

| Gene site | imp_sum | imp_mean | n |
|---|---|---|---|
| PTPRN2 | 28.1641 | 0.343465 | 82 |
| PRDM16 | 21.49848 | 0.302796 | 71 |
| PCDHGA1 | 10.54351 | 0.178704 | 59 |
| PCDHGA2 | 9.783748 | 0.171645 | 57 |
| PCDHGA3 | 9.467362 | 0.175322 | 54 |
| PCDHGB1 | 9.467362 | 0.178629 | 53 |
| PCDHGA4 | 9.783748 | 0.191838 | 51 |
| PCDHGB2 | 9.807264 | 0.200148 | 49 |
| PCDHGA5 | 9.379782 | 0.19957 | 47 |
| PCDHGB3 | 8.128167 | 0.189027 | 43 |
| PCDHGA6 | 8.128167 | 0.203204 | 40 |
| HDAC4 | 12.80694 | 0.346133 | 37 |
| PCDHGA7 | 8.030161 | 0.217031 | 37 |
| PAX6 | 13.01784 | 0.371938 | 35 |
| RBFOX3 | 9.143529 | 0.261244 | 35 |
| PCDHGB4 | 8.278399 | 0.236526 | 35 |
| PCDHGA8 | 8.278399 | 0.236526 | 35 |
| DIP2C | 10.34585 | 0.323308 | 32 |
| PCDHGB5 | 7.731808 | 0.241619 | 32 |
| PCDHGA9 | 7.731808 | 0.249413 | 31 |
| SOX2-OT | 12.30557 | 0.42433 | 29 |
| PCDHGB6 | 7.002877 | 0.241479 | 29 |
| PCDHGA10 | 7.002877 | 0.250103 | 28 |
| GALNT9 | 6.062111 | 0.224523 | 27 |
| ADARB2 | 8.59359 | 0.330523 | 26 |
| SHANK2 | 6.854793 | 0.263646 | 26 |
| AGAP1 | 8.555426 | 0.342217 | 25 |
| CAMTA1 | 8.267775 | 0.330711 | 25 |
| PDGFRA | 7.508267 | 0.300331 | 25 |
| SATB2 | 11.18465 | 0.466027 | 24 |
| MEIS1 | 6.644202 | 0.276842 | 24 |
| PCDHGB7 | 6.555907 | 0.273163 | 24 |
| RPTOR | 11.37789 | 0.494691 | 23 |
| NCOR2 | 7.036286 | 0.305925 | 23 |
| PCDHGA11 | 6.047336 | 0.262928 | 23 |
| RIMBP2 | 4.742972 | 0.206216 | 23 |
| PRKCZ | 5.937995 | 0.269909 | 22 |
| SKI | 12.07293 | 0.574901 | 21 |
| HOXA-AS3 | 4.937572 | 0.235122 | 21 |
| FRMD4A | 6.668317 | 0.333416 | 20 |
| SDK1 | 6.323901 | 0.316195 | 20 |
| ABR | 5.327392 | 0.26637 | 20 |
| MAD1L1 | 11.44563 | 0.602402 | 19 |
| ZNF423 | 9.669321 | 0.508912 | 19 |
| CASZ1 | 7.624501 | 0.40129 | 19 |
| SMG1P2 | 6.95649 | 0.366131 | 19 |
| BOLA2 | 6.95649 | 0.366131 | 19 |
| LOC613038 | 6.95649 | 0.366131 | 19 |
| CFAP46 | 4.887135 | 0.257218 | 19 |
| FOXK1 | 7.572598 | 0.4207 | 18 |
| TBC1D16 | 5.958143 | 0.331008 | 18 |
| ANKRD11 | 4.911447 | 0.272858 | 18 |
| MCF2L | 4.815097 | 0.267505 | 18 |
| OPCML | 6.655209 | 0.391483 | 17 |
| PAX6-AS1 | 5.534909 | 0.325583 | 17 |
| RCN1 | 5.534909 | 0.325583 | 17 |
| TBX15 | 5.496154 | 0.323303 | 17 |
| HBG2 | 4.603913 | 0.270818 | 17 |
| NAV2 | 5.046775 | 0.315423 | 16 |
| FOXP1 | 4.916724 | 0.307295 | 16 |
| GLI2 | 9.048138 | 0.603209 | 15 |
| ZBTB20 | 5.031503 | 0.335434 | 15 |
| BAIAP2 | 4.611745 | 0.30745 | 15 |
| RPS6KA2 | 7.976409 | 0.569744 | 14 |
| CUX1 | 6.534683 | 0.466763 | 14 |
| PRKAG2 | 5.038111 | 0.359865 | 14 |
| MSI2 | 7.113944 | 0.547226 | 13 |
| MYT1L | 6.357355 | 0.489027 | 13 |
| CLYBL | 4.987379 | 0.383645 | 13 |
| RFX4 | 4.929773 | 0.379213 | 13 |
| SPTBN4 | 4.556067 | 0.350467 | 13 |
| MIRLET7BHG | 6.349523 | 0.529127 | 12 |
| CMIP | 5.979667 | 0.498306 | 12 |
| TBX4 | 5.161419 | 0.430118 | 12 |
| TNS3 | 5.124884 | 0.427074 | 12 |
| ZC3H12D | 7.204827 | 0.654984 | 11 |
| RAD51B | 5.065146 | 0.460468 | 11 |
| AKAP13 | 4.664413 | 0.466441 | 10 |
| NR5A2 | 4.618816 | 0.461882 | 10 |
| ATP11A | 7.175656 | 0.797295 | 9 |
| SND1 | 6.615857 | 0.735095 | 9 |
| ADAMTS2 | 6.153891 | 0.683766 | 9 |
| TSPAN9 | 5.140176 | 0.571131 | 9 |
| KCNH2 | 5.02434 | 0.55826 | 9 |
| TRAPPC12 | 4.909557 | 0.545506 | 9 |
| ADGRB1 | 4.550072 | 0.505564 | 9 |
| LINC00311 | 5.588942 | 0.698618 | 8 |
| DUSP6 | 6.487949 | 0.92685 | 7 |
| LINC01551 | 5.202681 | 0.74324 | 7 |
| CDYL | 4.932539 | 0.704648 | 7 |
| FBXL18 | 5.24403 | 0.874005 | 6 |
| FAM181A | 4.729407 | 0.788235 | 6 |
| SATB2-AS1 | 4.656288 | 0.776048 | 6 |
| ATP2B4 | 5.000298 | 1.00006 | 5 |
| RUNDC3A | 4.913925 | 0.982785 | 5 |
| ARHGEF7 | 4.639519 | 0.927904 | 5 |
| STAP2 | 4.549002 | 1.137251 | 4 |
| METAP1D | 5.050681 | 1.68356 | 3 |
| OLIG2 | 5.738568 | 2.869284 | 2 |
| SOX10 | 4.568744 | 2.284372 | 2 |

TABLE 74
Cancer Type GBM_pedRTK2b

| Gene site | imp_sum | imp_mean | n |
|---|---|---|---|
| PTPRN2 | 11.04087 | 0.134645 | 82 |
| PRDM16 | 8.286591 | 0.116713 | 71 |
| PCDHGA1 | 5.501873 | 0.093252 | 59 |
| PCDHGA2 | 5.501873 | 0.096524 | 57 |
| PCDHGA3 | 5.818259 | 0.107746 | 54 |
| PCDHGB1 | 5.818259 | 0.109778 | 53 |
| PCDHGA4 | 5.818259 | 0.114084 | 51 |
| PCDHGB2 | 5.818259 | 0.11874 | 49 |
| PCDHGA5 | 5.376909 | 0.114402 | 47 |
| PCDHGB3 | 4.744137 | 0.110329 | 43 |
| PCDHGA6 | 5.060523 | 0.126513 | 40 |
| HDAC4 | 8.161755 | 0.220588 | 37 |
| PCDHGA7 | 5.376909 | 0.145322 | 37 |
| PAX6 | 6.948512 | 0.198529 | 35 |
| PCDHGB4 | 5.376909 | 0.153626 | 35 |
| PCDHGA8 | 5.376909 | 0.153626 | 35 |
| RBFOX3 | 4.667296 | 0.133351 | 35 |
| PCDHGB5 | 5.060523 | 0.158141 | 32 |
| DIP2C | 3.099325 | 0.096854 | 32 |
| PCDHGA9 | 4.744137 | 0.153037 | 31 |
| SOX2-OT | 5.636251 | 0.194353 | 29 |
| PCDHGB6 | 3.986475 | 0.137465 | 29 |
| PCDHGA10 | 3.986475 | 0.142374 | 28 |
| GALNT9 | 2.756451 | 0.102091 | 27 |
| SHANK2 | 3.6576 | 0.140677 | 26 |
| AGAP1 | 4.791877 | 0.191675 | 25 |
| CAMTA1 | 4.553356 | 0.182134 | 25 |
| SATB2 | 7.4428 | 0.310117 | 24 |
| PCDHGB7 | 4.020792 | 0.167533 | 24 |
| INPP5A | 4.580119 | 0.199136 | 23 |
| RPTOR | 4.330385 | 0.188278 | 23 |
| PCDHGA11 | 4.020792 | 0.174817 | 23 |
| NCOR2 | 3.21157 | 0.139633 | 23 |
| RIMBP2 | 2.324574 | 0.101068 | 23 |
| PRKCZ | 4.457482 | 0.202613 | 22 |
| SKI | 6.52049 | 0.3105 | 21 |
| ABR | 3.258228 | 0.162911 | 20 |
| MAD1L1 | 5.960424 | 0.313707 | 19 |
| ZNF423 | 5.395207 | 0.283958 | 19 |
| SMG1P2 | 4.421746 | 0.232723 | 19 |
| BOLA2 | 4.421746 | 0.232723 | 19 |
| LOC613038 | 4.421746 | 0.232723 | 19 |
| CASZ1 | 3.503762 | 0.184409 | 19 |
| FOXK1 | 3.481892 | 0.193438 | 18 |
| SEPTIN9 | 2.899965 | 0.161109 | 18 |
| MCF2L | 2.827648 | 0.157092 | 18 |
| TBX15 | 4.863068 | 0.286063 | 17 |
| OPCML | 4.147014 | 0.243942 | 17 |
| NAV2 | 3.194876 | 0.19968 | 16 |
| GLI2 | 6.363292 | 0.424219 | 15 |
| LRMDA | 2.353996 | 0.156933 | 15 |
| RPS6KA2 | 3.202018 | 0.228716 | 14 |
| PRKAG2 | 2.939428 | 0.209959 | 14 |
| PCDHGA12 | 2.755248 | 0.196803 | 14 |
| CUX1 | 2.690397 | 0.192171 | 14 |
| MOB2 | 2.625962 | 0.187569 | 14 |
| MIR548F5 | 2.444184 | 0.174585 | 14 |
| MSI2 | 3.469356 | 0.266874 | 13 |
| CLYBL | 3.086376 | 0.237414 | 13 |
| RFX4 | 2.839211 | 0.218401 | 13 |
| ADGRD1 | 3.516245 | 0.29302 | 12 |
| MEGF6 | 2.874126 | 0.239511 | 12 |
| TNS3 | 2.58521 | 0.215434 | 12 |
| MIRLET7BHG | 2.470717 | 0.205893 | 12 |
| ZC3H3 | 2.325213 | 0.193768 | 12 |
| ANAPC16 | 3.200292 | 0.290936 | 11 |
| VGLL4 | 2.922761 | 0.265706 | 11 |
| RAD51B | 2.753059 | 0.250278 | 11 |
| ZC3H12D | 2.366425 | 0.21513 | 11 |
| AKAP13 | 3.046862 | 0.304686 | 10 |
| NR2F1-AS1 | 2.926888 | 0.292689 | 10 |
| ACOT7 | 2.851214 | 0.285121 | 10 |
| TFAP2B | 2.488557 | 0.248856 | 10 |
| BCL11B | 2.409928 | 0.240993 | 10 |
| AUTS2 | 2.313751 | 0.231375 | 10 |
| ATP11A | 3.937952 | 0.43755 | 9 |
| KCNH2 | 3.612538 | 0.401393 | 9 |
| TSPAN9 | 3.420374 | 0.380042 | 9 |
| SND1 | 2.556235 | 0.284026 | 9 |
| TRAPPC12 | 2.513835 | 0.279315 | 9 |
| JPH3 | 2.327109 | 0.258568 | 9 |
| ESRRG | 3.313599 | 0.4142 | 8 |
| MCC | 2.724467 | 0.340558 | 8 |
| ANK1 | 2.680844 | 0.335106 | 8 |
| MBP | 2.522589 | 0.315324 | 8 |
| CDYL | 3.198895 | 0.456985 | 7 |
| DUSP6 | 2.847414 | 0.406773 | 7 |
| RBM20 | 2.626792 | 0.375256 | 7 |
| SATB2-AS1 | 4.193875 | 0.698979 | 6 |
| FAM181A | 3.402264 | 0.567044 | 6 |
| FBXL18 | 3.214322 | 0.53572 | 6 |
| COL26A1 | 2.824265 | 0.470711 | 6 |
| ATP2B4 | 3.761507 | 0.752301 | 5 |
| RUNDC3A | 2.668414 | 0.533683 | 5 |
| ARHGEF7 | 2.51674 | 0.503348 | 5 |
| RBMS3 | 3.232868 | 0.808217 | 4 |
| STAP2 | 2.547391 | 0.636848 | 4 |
| SASH1 | 2.332012 | 0.583003 | 4 |
| SOX10 | 2.350214 | 1.175107 | 2 |
| SLC25A10 | 2.344204 | 1.172102 | 2 |

TABLE 75
Cancer Type GBM_PNC

| Gene site | imp_sum | imp_mean | n |
|---|---|---|---|
| PTPRN2 | 6.423062 | 0.07833 | 82 |
| PRDM16 | 2.898317 | 0.040821 | 71 |
| PCDHGA1 | 6.790692 | 0.115096 | 59 |
| PCDHGA2 | 7.107078 | 0.124686 | 57 |
| PCDHGA3 | 6.027488 | 0.11162 | 54 |
| PCDHGB1 | 6.027488 | 0.113726 | 53 |
| PCDHGA4 | 6.027488 | 0.118186 | 51 |
| PCDHGB2 | 5.394716 | 0.110096 | 49 |
| PCDHGA5 | 5.07833 | 0.10805 | 47 |
| PCDHGB3 | 5.394716 | 0.125459 | 43 |
| PCDHGA6 | 5.711102 | 0.142778 | 40 |
| HDAC4 | 6.431201 | 0.173816 | 37 |
| PCDHGA7 | 5.272353 | 0.142496 | 37 |
| PAX6 | 6.287148 | 0.179633 | 35 |
| PCDHGB4 | 5.272353 | 0.150639 | 35 |
| PCDHGA8 | 5.272353 | 0.150639 | 35 |
| RBFOX3 | 3.210057 | 0.091716 | 35 |
| PCDHGB5 | 4.955967 | 0.154874 | 32 |
| DIP2C | 3.948744 | 0.123398 | 32 |
| PCDHGA9 | 4.955967 | 0.15987 | 31 |
| PCDHGB6 | 4.114368 | 0.141875 | 29 |
| PCDHGA10 | 4.114368 | 0.146942 | 28 |
| AGAP1 | 6.176979 | 0.247079 | 25 |
| CAMTA1 | 4.11764 | 0.164706 | 25 |
| PDGFRA | 3.491247 | 0.13965 | 25 |
| SATB2 | 3.653961 | 0.152248 | 24 |
| PCDHGB7 | 3.352383 | 0.139683 | 24 |
| RPTOR | 6.97111 | 0.303092 | 23 |
| NCOR2 | 3.367096 | 0.146395 | 23 |
| PCDHGA11 | 2.905452 | 0.126324 | 23 |
| PRKCZ | 4.050971 | 0.184135 | 22 |
| SKI | 5.862098 | 0.279148 | 21 |
| ZIC4 | 3.52581 | 0.167896 | 21 |
| FRMD4A | 2.726461 | 0.136323 | 20 |
| ABR | 2.57363 | 0.128681 | 20 |
| ZNF423 | 5.300859 | 0.278993 | 19 |
| SMG1P2 | 3.971251 | 0.209013 | 19 |
| BOLA2 | 3.971251 | 0.209013 | 19 |
| LOC613038 | 3.971251 | 0.209013 | 19 |
| MAD1L1 | 3.297692 | 0.173563 | 19 |
| CASZ1 | 2.676858 | 0.140887 | 19 |
| FOXK1 | 5.10052 | 0.283362 | 18 |
| SEPTIN9 | 2.752116 | 0.152895 | 18 |
| OPCML | 4.969368 | 0.292316 | 17 |
| TBX15 | 4.693877 | 0.27611 | 17 |
| SIM1 | 3.561681 | 0.209511 | 17 |
| PAX6-AS1 | 3.028129 | 0.178125 | 17 |
| RCN1 | 3.028129 | 0.178125 | 17 |
| NAV2 | 4.319793 | 0.269987 | 16 |
| FOXP1 | 4.003332 | 0.250208 | 16 |
| GLI2 | 5.244434 | 0.349629 | 15 |
| EMX2OS | 3.026256 | 0.20175 | 15 |
| SLX1B- | 2.81556 | 0.187704 | 15 |
| SULT1A4 | | | |
| SLX1A | 2.81556 | 0.187704 | 15 |
| LOC606724 | 2.81556 | 0.187704 | 15 |
| ZBTB20 | 2.709311 | 0.180621 | 15 |
| KNDC1 | 2.633055 | 0.175537 | 15 |
| RPS6KA2 | 3.433396 | 0.245243 | 14 |
| IQSEC1 | 2.953314 | 0.210951 | 14 |
| CUX1 | 2.779521 | 0.198537 | 14 |
| PRKAG2 | 2.722693 | 0.194478 | 14 |
| PCDHGA12 | 2.612582 | 0.186613 | 14 |
| SPTBN4 | 5.213154 | 0.401012 | 13 |
| MSI2 | 4.418725 | 0.339902 | 13 |
| MYT1L | 2.901417 | 0.223186 | 13 |
| MIRLET7BHG | 3.722823 | 0.310235 | 12 |
| TNS3 | 3.361623 | 0.280135 | 12 |
| FBRSL1 | 3.348249 | 0.279021 | 12 |
| ZC3H3 | 3.273033 | 0.272753 | 12 |
| TBX4 | 2.979561 | 0.248297 | 12 |
| ZC3H12D | 3.001307 | 0.272846 | 11 |
| SKOR1 | 3.370501 | 0.33705 | 10 |
| LBX1-AS1 | 2.881476 | 0.288148 | 10 |
| OBI1-AS1 | 2.81532 | 0.281532 | 10 |
| KLHL29 | 2.755884 | 0.275588 | 10 |
| ACOT7 | 2.743144 | 0.274314 | 10 |
| ATP11A | 5.442526 | 0.604725 | 9 |
| ASAP1 | 3.670701 | 0.407856 | 9 |
| SND1 | 3.64327 | 0.404808 | 9 |
| TSPAN9 | 3.445264 | 0.382807 | 9 |
| CACNA2D4 | 3.278697 | 0.3643 | 9 |
| ADAMTS2 | 3.192983 | 0.354776 | 9 |
| KCNH2 | 3.135611 | 0.348401 | 9 |
| AXIN2 | 2.668943 | 0.296549 | 9 |
| LINC00311 | 3.914549 | 0.489319 | 8 |
| DNMT3A | 3.17287 | 0.396609 | 8 |
| PRDM6 | 2.737071 | 0.342134 | 8 |
| RORA | 2.6248 | 0.3281 | 8 |
| MCC | 2.578296 | 0.322287 | 8 |
| TRAPPC9 | 2.557848 | 0.319731 | 8 |
| NAV1 | 3.346483 | 0.478069 | 7 |
| CDYL | 2.959039 | 0.42272 | 7 |
| MIR548H4 | 2.759179 | 0.394168 | 7 |
| FBXL18 | 4.388585 | 0.731431 | 6 |
| STK10 | 2.64978 | 0.44163 | 6 |
| RUNDC3A | 4.488731 | 0.897746 | 5 |
| DAGLB | 2.714242 | 0.904747 | 3 |
| DICER1 | 2.613815 | 0.871272 | 3 |
| SOX10 | 2.866816 | 1.433408 | 2 |
| SLC25A10 | 2.644748 | 1.322374 | 2 |

TABLE 76
Cancer Type GBM_RTK1

| Gene site | imp_sum | imp_mean | n |
|---|---|---|---|
| PTPRN2 | 28.44191 | 0.346853 | 82 |
| PRDM16 | 20.84059 | 0.293529 | 71 |
| PCDHGA1 | 12.39232 | 0.210039 | 59 |
| PCDHGA2 | 12.07594 | 0.211859 | 57 |
| PCDHGA3 | 11.12678 | 0.206051 | 54 |
| PCDHGB1 | 11.12678 | 0.209939 | 53 |
| PCDHGA4 | 11.12678 | 0.218172 | 51 |
| PCDHGB2 | 10.49401 | 0.214163 | 49 |
| PCDHGA5 | 9.753145 | 0.207514 | 47 |
| PCDHGB3 | 9.449537 | 0.219757 | 43 |
| PCDHGA6 | 9.133151 | 0.228329 | 40 |
| HDAC4 | 12.30965 | 0.332693 | 37 |
| PCDHGA7 | 9.14593 | 0.247187 | 37 |
| RBFOX3 | 12.19811 | 0.348517 | 35 |
| PAX6 | 11.04636 | 0.31561 | 35 |
| PCDHGB4 | 9.14593 | 0.261312 | 35 |
| PCDHGA8 | 9.14593 | 0.261312 | 35 |
| DIP2C | 9.579993 | 0.299375 | 32 |
| PCDHGB5 | 8.597751 | 0.26868 | 32 |
| PCDHGA9 | 8.281365 | 0.267141 | 31 |
| SOX2-OT | 11.87077 | 0.409337 | 29 |
| PCDHGB6 | 7.520914 | 0.259342 | 29 |
| PCDHGA10 | 7.520914 | 0.268604 | 28 |
| GALNT9 | 4.804374 | 0.17794 | 27 |
| ADARB2 | 7.490435 | 0.288094 | 26 |
| SHANK2 | 5.723285 | 0.220126 | 26 |
| AGAP1 | 9.620862 | 0.384834 | 25 |
| CAMTA1 | 7.42271 | 0.296908 | 25 |
| PDGFRA | 6.579112 | 0.263164 | 25 |
| MEIS1 | 9.833254 | 0.409719 | 24 |
| PCDHGB7 | 6.762717 | 0.28178 | 24 |
| RPTOR | 10.48325 | 0.455793 | 23 |
| INPP5A | 7.884809 | 0.342818 | 23 |
| RIMBP2 | 6.547014 | 0.284653 | 23 |
| PCDHGA11 | 6.150797 | 0.267426 | 23 |
| NCOR2 | 5.982639 | 0.260115 | 23 |
| PRKCZ | 8.395716 | 0.381623 | 22 |
| SKI | 10.55635 | 0.502683 | 21 |
| SIM2 | 6.320251 | 0.300964 | 21 |
| HOXA-AS3 | 5.76096 | 0.274331 | 21 |
| FRMD4A | 7.221386 | 0.361069 | 20 |
| ABR | 5.131695 | 0.256585 | 20 |
| SDK1 | 5.003845 | 0.250192 | 20 |
| MAD1L1 | 12.34894 | 0.649944 | 19 |
| ZNF423 | 9.475006 | 0.498685 | 19 |
| CASZ1 | 6.441073 | 0.339004 | 19 |
| SMG1P2 | 6.064086 | 0.319162 | 19 |
| BOLA2 | 6.064086 | 0.319162 | 19 |
| LOC613038 | 6.064086 | 0.319162 | 19 |
| FOXK1 | 8.450817 | 0.46949 | 18 |
| SEPTIN9 | 5.128235 | 0.284902 | 18 |
| PAX6-AS1 | 6.095445 | 0.358556 | 17 |
| RCN1 | 6.095445 | 0.358556 | 17 |
| TBX15 | 5.67349 | 0.333735 | 17 |
| OPCML | 5.359936 | 0.31529 | 17 |
| FOXP1 | 5.657345 | 0.353584 | 16 |
| NAV2 | 5.487794 | 0.342987 | 16 |
| SORBS2 | 4.740616 | 0.296288 | 16 |
| GLI2 | 10.48235 | 0.698823 | 15 |
| BAIAP2 | 6.399272 | 0.426618 | 15 |
| ZBTB20 | 6.189875 | 0.412658 | 15 |
| SLX1B- | 4.983773 | 0.332252 | 15 |
| SULT1A4 | | | |
| SLX1A | 4.983773 | 0.332252 | 15 |
| LOC606724 | 4.983773 | 0.332252 | 15 |
| RPS6KA2 | 7.065162 | 0.504654 | 14 |
| CUX1 | 6.693427 | 0.478102 | 14 |
| PRKAG2 | 5.619134 | 0.401367 | 14 |
| C7orf50 | 5.0646 | 0.361757 | 14 |
| IQSEC1 | 4.856892 | 0.346921 | 14 |
| MYT1L | 6.962197 | 0.535554 | 13 |
| SPTBN4 | 5.549333 | 0.426872 | 13 |
| MSI2 | 5.429656 | 0.417666 | 13 |
| GSE1 | 5.293354 | 0.407181 | 13 |
| HOXA10- | 4.962239 | 0.381711 | 13 |
| HOXA9 | | | |
| CMIP | 5.283035 | 0.440253 | 12 |
| ZC3H3 | 4.974593 | 0.414549 | 12 |
| MAML3 | 4.830029 | 0.402502 | 12 |
| VGLL4 | 5.27689 | 0.479717 | 11 |
| RAD51B | 5.159886 | 0.469081 | 11 |
| ZC3H12D | 4.848675 | 0.440789 | 11 |
| LBX1-AS1 | 6.275327 | 0.627533 | 10 |
| ACOT7 | 5.334854 | 0.533485 | 10 |
| SH3RF3 | 5.188231 | 0.518823 | 10 |
| AKAP13 | 4.795264 | 0.479526 | 10 |
| SND1 | 6.244847 | 0.693872 | 9 |
| ATP11A | 5.774312 | 0.64159 | 9 |
| TSPAN9 | 5.127746 | 0.56975 | 9 |
| ASAP1 | 5.047038 | 0.560782 | 9 |
| AXIN2 | 4.911017 | 0.545669 | 9 |
| ADAMTS2 | 4.847841 | 0.538649 | 9 |
| ADGRB1 | 4.763301 | 0.529256 | 9 |
| LINC00311 | 5.827952 | 0.728494 | 8 |
| DUSP6 | 6.547525 | 0.935361 | 7 |
| LINC00461 | 5.023787 | 0.717684 | 7 |
| NAV1 | 4.941564 | 0.705938 | 7 |
| FBXL18 | 5.08984 | 0.848307 | 6 |
| RUNDC3A | 5.299092 | 1.059818 | 5 |
| STAP2 | 5.035557 | 1.258889 | 4 |
| GRIN2B | 4.823391 | 1.607797 | 3 |
| SOX10 | 5.5945 | 2.79725 | 2 |

TABLE 77
Cancer Type GBM_RTK2

| Gene site | imp_sum | imp_mean | n |
|---|---|---|---|
| PTPRN2 | 19.6513 | 0.23965 | 82 |
| PRDM16 | 18.95536 | 0.266977 | 71 |
| PCDHGA1 | 13.06176 | 0.221386 | 59 |
| PCDHGA2 | 12.74538 | 0.223603 | 57 |
| PCDHGA3 | 11.57895 | 0.214425 | 54 |
| PCDHGB1 | 11.57895 | 0.218471 | 53 |
| PCDHGA4 | 10.94618 | 0.214631 | 51 |
| PCDHGB2 | 10.94618 | 0.223391 | 49 |
| PCDHGA5 | 10.46056 | 0.222565 | 47 |
| PCDHGB3 | 9.740708 | 0.226528 | 43 |
| PCDHGA6 | 9.107936 | 0.227698 | 40 |
| HDAC4 | 14.32705 | 0.387217 | 37 |
| PCDHGA7 | 8.79155 | 0.237609 | 37 |
| RBFOX3 | 11.54054 | 0.32973 | 35 |
| PAX6 | 11.22163 | 0.320618 | 35 |
| PCDHGB4 | 8.268738 | 0.23625 | 35 |
| PCDHGA8 | 8.268738 | 0.23625 | 35 |
| PCDHGB5 | 8.268738 | 0.258398 | 32 |
| DIP2C | 7.532289 | 0.235384 | 32 |
| PCDHGA9 | 8.268738 | 0.266733 | 31 |
| SOX2-OT | 8.995953 | 0.310205 | 29 |
| PCDHGB6 | 7.071556 | 0.243847 | 29 |
| PCDHGA10 | 7.071556 | 0.252556 | 28 |
| SHANK2 | 6.280585 | 0.241561 | 26 |
| ADARB2 | 4.727206 | 0.181816 | 26 |
| AGAP1 | 9.622224 | 0.384889 | 25 |
| CAMTA1 | 7.433597 | 0.297344 | 25 |
| PDGFRA | 5.709785 | 0.228391 | 25 |
| SATB2 | 10.64248 | 0.443437 | 24 |
| MEIS1 | 7.688916 | 0.320371 | 24 |
| PCDHGB7 | 6.307733 | 0.262822 | 24 |
| RPTOR | 12.03723 | 0.523358 | 23 |
| NCOR2 | 8.962317 | 0.389666 | 23 |
| NXN | 6.297388 | 0.273799 | 23 |
| HOXB3 | 5.798086 | 0.252091 | 23 |
| PCDHGA11 | 5.732892 | 0.249256 | 23 |
| INPP5A | 5.068774 | 0.220381 | 23 |
| PRKCZ | 6.517701 | 0.296259 | 22 |
| SKI | 10.8709 | 0.517662 | 21 |
| HOXA-AS3 | 5.410938 | 0.257664 | 21 |
| ZIC4 | 4.773249 | 0.227298 | 21 |
| ABR | 8.490465 | 0.424523 | 20 |
| FRMD4A | 5.641957 | 0.282098 | 20 |
| SDK1 | 4.713856 | 0.235693 | 20 |
| MAD1L1 | 11.38517 | 0.599219 | 19 |
| ZNF423 | 8.122477 | 0.427499 | 19 |
| SMG1P2 | 6.862892 | 0.361205 | 19 |
| BOLA2 | 6.862892 | 0.361205 | 19 |
| LOC613038 | 6.862892 | 0.361205 | 19 |
| CASZ1 | 5.755603 | 0.302926 | 19 |
| ANKRD11 | 7.390952 | 0.410608 | 18 |
| FOXK1 | 7.256107 | 0.403117 | 18 |
| SEPTIN9 | 5.800177 | 0.322232 | 18 |
| MCF2L | 5.699282 | 0.316627 | 18 |
| OPCML | 6.8263 | 0.401547 | 17 |
| TBX15 | 6.010796 | 0.353576 | 17 |
| PAX6-AS1 | 4.937854 | 0.290462 | 17 |
| RCN1 | 4.937854 | 0.290462 | 17 |
| FOXP1 | 6.393653 | 0.399603 | 16 |
| NAV2 | 5.910149 | 0.369384 | 16 |
| GLI2 | 10.11008 | 0.674006 | 15 |
| LRMDA | 5.176466 | 0.345098 | 15 |
| BAIAP2 | 5.016139 | 0.334409 | 15 |
| SLX1B- | 4.974586 | 0.331639 | 15 |
| SULT1A4 | | | |
| SLX1A | 4.974586 | 0.331639 | 15 |
| LOC606724 | 4.974586 | 0.331639 | 15 |
| RPS6KA2 | 7.413005 | 0.5295 | 14 |
| IQSEC1 | 5.770443 | 0.412175 | 14 |
| CUX1 | 5.510593 | 0.393614 | 14 |
| MSI2 | 8.266631 | 0.635895 | 13 |
| MYT1L | 5.590905 | 0.43007 | 13 |
| SPTBN4 | 5.57676 | 0.428982 | 13 |
| GSE1 | 5.208374 | 0.400644 | 13 |
| ZC3H3 | 6.33547 | 0.527956 | 12 |
| MIRLET7BHG | 6.225246 | 0.518771 | 12 |
| TNS3 | 5.933709 | 0.494476 | 12 |
| CMIP | 5.395776 | 0.449648 | 12 |
| ADGRD1 | 4.719988 | 0.393332 | 12 |
| VGLL4 | 4.902711 | 0.445701 | 11 |
| SH3RF3 | 5.296941 | 0.529694 | 10 |
| LBX1-AS1 | 5.044842 | 0.504484 | 10 |
| NR2F1-AS1 | 4.856945 | 0.485695 | 10 |
| ATP11A | 6.945317 | 0.771702 | 9 |
| SND1 | 6.758195 | 0.750911 | 9 |
| AXIN2 | 5.341699 | 0.593522 | 9 |
| ADAMTS2 | 5.162272 | 0.573586 | 9 |
| TRAPPC12 | 5.068641 | 0.563182 | 9 |
| ASAP1 | 4.919802 | 0.546645 | 9 |
| TSPAN9 | 4.90379 | 0.544866 | 9 |
| DMRTA2 | 4.730823 | 0.525647 | 9 |
| LINC00311 | 5.353218 | 0.669152 | 8 |
| DLEU1 | 5.160303 | 0.645038 | 8 |
| PPP2R2B | 4.979109 | 0.622389 | 8 |
| MBP | 4.625602 | 0.5782 | 8 |
| DUSP6 | 6.155281 | 0.879326 | 7 |
| NAV1 | 5.179188 | 0.739884 | 7 |
| CDYL | 5.115782 | 0.730826 | 7 |
| TSNAX-DISC1 | 4.793222 | 0.958644 | 5 |
| ARHGEF7 | 4.65138 | 0.930276 | 5 |
| SOX10 | 5.000024 | 2.500012 | 2 |

TABLE 78
Cancer Type GCT_GERM_A

| Gene site | imp_sum | imp_mean | n |
|---|---|---|---|
| PTPRN2 | 9.101473 | 0.110994 | 82 |
| PRDM16 | 8.043839 | 0.113294 | 71 |
| PCDHGA1 | 2.974028 | 0.050407 | 59 |
| PCDHGA2 | 2.974028 | 0.052176 | 57 |
| PCDHGA3 | 2.974028 | 0.055075 | 54 |
| PCDHGB1 | 2.974028 | 0.056114 | 53 |
| PCDHGA4 | 2.974028 | 0.058314 | 51 |
| PCDHGB2 | 2.974028 | 0.060694 | 49 |
| PCDHGA5 | 2.974028 | 0.063277 | 47 |
| PCDHGB3 | 2.974028 | 0.069163 | 43 |
| PCDHGA6 | 2.341256 | 0.058531 | 40 |
| HDAC4 | 10.80254 | 0.291961 | 37 |
| PCDHGA7 | 2.341256 | 0.063277 | 37 |
| PAX6 | 4.725962 | 0.135027 | 35 |
| RBFOX3 | 3.270117 | 0.093432 | 35 |
| PCDHGB4 | 2.341256 | 0.066893 | 35 |
| PCDHGA8 | 2.341256 | 0.066893 | 35 |
| DIP2C | 4.662698 | 0.145709 | 32 |
| SOX2-OT | 2.662139 | 0.091798 | 29 |
| AGAP1 | 6.21563 | 0.248625 | 25 |
| CAMTA1 | 2.834911 | 0.113396 | 25 |
| SATB2 | 2.57308 | 0.107212 | 24 |
| RPTOR | 6.923574 | 0.301025 | 23 |
| INPP5A | 3.284902 | 0.142822 | 23 |
| NCOR2 | 2.447521 | 0.106414 | 23 |
| SKI | 6.513082 | 0.310147 | 21 |
| ZIC4 | 3.927683 | 0.187033 | 21 |
| SDK1 | 2.463619 | 0.123181 | 20 |
| MAD1L1 | 4.754699 | 0.250247 | 19 |
| SMG1P2 | 2.985947 | 0.157155 | 19 |
| BOLA2 | 2.985947 | 0.157155 | 19 |
| LOC613038 | 2.985947 | 0.157155 | 19 |
| ZNF423 | 2.952116 | 0.155375 | 19 |
| CASZ1 | 2.272645 | 0.119613 | 19 |
| TBC1D16 | 4.224717 | 0.234707 | 18 |
| FOXK1 | 3.763196 | 0.209066 | 18 |
| SEPTIN9 | 3.473925 | 0.192996 | 18 |
| ANKRD11 | 3.207682 | 0.178205 | 18 |
| OPCML | 3.696412 | 0.217436 | 17 |
| NAV2 | 3.016295 | 0.188518 | 16 |
| FOXP1 | 2.315913 | 0.144745 | 16 |
| NFIX | 3.557653 | 0.237177 | 15 |
| SLX1B- | 3.248136 | 0.216542 | 15 |
| SULT1A4 | | | |
| SLX1A | 3.248136 | 0.216542 | 15 |
| LOC606724 | 3.248136 | 0.216542 | 15 |
| ZBTB20 | 2.616493 | 0.174433 | 15 |
| GLI2 | 2.424166 | 0.161611 | 15 |
| NFATC1 | 2.332888 | 0.155526 | 15 |
| RPS6KA2 | 5.447932 | 0.389138 | 14 |
| MIR548F5 | 3.459727 | 0.247123 | 14 |
| IQSEC1 | 3.360687 | 0.240049 | 14 |
| GNG7 | 2.978525 | 0.212752 | 14 |
| C7orf50 | 2.941557 | 0.210111 | 14 |
| CUX1 | 2.854477 | 0.203891 | 14 |
| PRKAG2 | 2.623327 | 0.187381 | 14 |
| ARHGEF10 | 2.531088 | 0.180792 | 14 |
| MSI2 | 3.74575 | 0.288135 | 13 |
| MYT1L | 3.317276 | 0.255175 | 13 |
| GSE1 | 2.318814 | 0.17837 | 13 |
| CMIP | 3.895785 | 0.324649 | 12 |
| ADGRD1 | 2.926081 | 0.24384 | 12 |
| ZC3H3 | 2.88618 | 0.240515 | 12 |
| GNA12 | 2.495305 | 0.207942 | 12 |
| ISLR2 | 2.4525 | 0.204375 | 12 |
| TBX4 | 2.325781 | 0.193815 | 12 |
| ZC3H12D | 2.609661 | 0.237242 | 11 |
| WNT5A | 2.549258 | 0.231751 | 11 |
| ACOT7 | 3.651995 | 0.365199 | 10 |
| NR2F1-AS1 | 2.902074 | 0.290207 | 10 |
| BCL11B | 2.337443 | 0.233744 | 10 |
| TSPAN4 | 2.231434 | 0.223143 | 10 |
| SND1 | 4.244156 | 0.471573 | 9 |
| TRAPPC12 | 3.440843 | 0.382316 | 9 |
| ATP11A | 3.195474 | 0.355053 | 9 |
| SSBP3 | 3.053275 | 0.339253 | 9 |
| CACNA2D4 | 2.342664 | 0.260296 | 9 |
| KCNH2 | 2.310504 | 0.256723 | 9 |
| MSRA | 3.189972 | 0.398746 | 8 |
| SYNJ2 | 2.727817 | 0.340977 | 8 |
| DLEU1 | 2.683196 | 0.3354 | 8 |
| CDH4 | 2.395494 | 0.299437 | 8 |
| DNMT3A | 2.392436 | 0.299055 | 8 |
| TENM2 | 2.339529 | 0.292441 | 8 |
| SHROOM3 | 2.255323 | 0.281915 | 8 |
| C19orf25 | 4.052101 | 0.578872 | 7 |
| GAK | 2.852329 | 0.407476 | 7 |
| MIR548H4 | 2.571419 | 0.367346 | 7 |
| VPS13D | 2.460848 | 0.35155 | 7 |
| STK10 | 3.198507 | 0.533084 | 6 |
| RADIL | 3.066899 | 0.51115 | 6 |
| FBXL18 | 2.858599 | 0.476433 | 6 |
| CCDC177 | 2.672475 | 0.445412 | 6 |
| RUNDC3A | 3.376471 | 0.675294 | 5 |
| CCR6 | 3.187996 | 0.637599 | 5 |
| TSNAX-DISC1 | 3.062186 | 0.612437 | 5 |
| ARHGEF7 | 2.892383 | 0.578477 | 5 |
| AP2A2 | 2.57388 | 0.514776 | 5 |
| ARHGAP26 | 2.557087 | 0.511417 | 5 |
| DTNA | 2.421815 | 0.605454 | 4 |
| TBC1D7 | 3.196945 | 1.065648 | 3 |

TABLE 79
Cancer Type GCT_GERM_B

| Gene site | imp_sum | imp_mean | n |
|---|---|---|---|
| PTPRN2 | 19.31761 | 0.235581 | 82 |
| PRDM16 | 18.84404 | 0.265409 | 71 |
| PCDHGA1 | 11.03441 | 0.187024 | 59 |
| PCDHGA2 | 10.71803 | 0.188036 | 57 |
| PCDHGA3 | 9.768867 | 0.180905 | 54 |
| PCDHGB1 | 9.452481 | 0.178349 | 53 |
| PCDHGA4 | 9.452481 | 0.185343 | 51 |
| PCDHGB2 | 9.136095 | 0.186451 | 49 |
| PCDHGA5 | 8.819709 | 0.187653 | 47 |
| PCDHGB3 | 8.396513 | 0.195268 | 43 |
| PCDHGA6 | 8.080127 | 0.202003 | 40 |
| HDAC4 | 13.99709 | 0.3783 | 37 |
| PCDHGA7 | 7.447355 | 0.20128 | 37 |
| RBFOX3 | 9.974812 | 0.284995 | 35 |
| PAX6 | 7.738563 | 0.221102 | 35 |
| PCDHGB4 | 7.130969 | 0.203742 | 35 |
| PCDHGA8 | 7.130969 | 0.203742 | 35 |
| DIP2C | 10.74588 | 0.335809 | 32 |
| PCDHGB5 | 6.217327 | 0.194291 | 32 |
| PCDHGA9 | 6.217327 | 0.200559 | 31 |
| SOX2-OT | 7.245309 | 0.249838 | 29 |
| PCDHGB6 | 5.584555 | 0.192571 | 29 |
| PCDHGA10 | 5.584555 | 0.199448 | 28 |
| GALNT9 | 5.550231 | 0.205564 | 27 |
| ADARB2 | 7.655789 | 0.294453 | 26 |
| SHANK2 | 6.731637 | 0.258909 | 26 |
| AGAP1 | 9.790224 | 0.391609 | 25 |
| CAMTA1 | 7.134214 | 0.285369 | 25 |
| PDGFRA | 6.733768 | 0.269351 | 25 |
| SATB2 | 6.469941 | 0.269581 | 24 |
| PCDHGB7 | 5.165607 | 0.215234 | 24 |
| RPTOR | 11.22884 | 0.488211 | 23 |
| NCOR2 | 7.659987 | 0.333043 | 23 |
| NXN | 6.652723 | 0.289249 | 23 |
| INPP5A | 6.507467 | 0.282933 | 23 |
| HOXB3 | 4.777145 | 0.207702 | 23 |
| PCDHGA11 | 4.723644 | 0.205376 | 23 |
| PRKCZ | 8.538897 | 0.388132 | 22 |
| SKI | 7.434102 | 0.354005 | 21 |
| ZIC4 | 4.447648 | 0.211793 | 21 |
| HOXA-AS3 | 4.239343 | 0.201873 | 21 |
| ABR | 5.742782 | 0.287139 | 20 |
| FRMD4A | 5.473026 | 0.273651 | 20 |
| SDK1 | 4.769503 | 0.238475 | 20 |
| MAD1L1 | 10.94435 | 0.576018 | 19 |
| ZNF423 | 6.837359 | 0.359861 | 19 |
| CASZ1 | 5.715937 | 0.300839 | 19 |
| SMG1P2 | 4.984773 | 0.262356 | 19 |
| BOLA2 | 4.984773 | 0.262356 | 19 |
| LOC613038 | 4.984773 | 0.262356 | 19 |
| SEPTIN9 | 7.182444 | 0.399025 | 18 |
| TBC1D16 | 6.250265 | 0.347237 | 18 |
| ANKRD11 | 6.040036 | 0.335558 | 18 |
| HOXA3 | 4.762563 | 0.264587 | 18 |
| FOXK1 | 4.554552 | 0.253031 | 18 |
| MCF2L | 3.738665 | 0.207704 | 18 |
| OPCML | 7.256601 | 0.426859 | 17 |
| PAX6-AS1 | 3.966804 | 0.233341 | 17 |
| RCN1 | 3.966804 | 0.233341 | 17 |
| FOXP1 | 5.738304 | 0.358644 | 16 |
| GLI2 | 8.145145 | 0.54301 | 15 |
| KNDC1 | 4.826227 | 0.321748 | 15 |
| SLX1B- | 3.946591 | 0.263106 | 15 |
| SULT1A4 | | | |
| SLX1A | 3.946591 | 0.263106 | 15 |
| LOC606724 | 3.946591 | 0.263106 | 15 |
| RPS6KA2 | 7.147811 | 0.510558 | 14 |
| CUX1 | 6.450239 | 0.460731 | 14 |
| PRKAG2 | 5.410973 | 0.386498 | 14 |
| CACNA1H | 4.776324 | 0.341166 | 14 |
| MOB2 | 4.437151 | 0.316939 | 14 |
| IQSEC1 | 4.235867 | 0.302562 | 14 |
| MYT1L | 5.984541 | 0.460349 | 13 |
| MSI2 | 5.847016 | 0.44977 | 13 |
| RFX4 | 4.210517 | 0.323886 | 13 |
| KIF26B | 3.750733 | 0.288518 | 13 |
| FBRSL1 | 4.946713 | 0.412226 | 12 |
| ADGRD1 | 4.94334 | 0.411945 | 12 |
| MAML3 | 3.926583 | 0.327215 | 12 |
| RASA3 | 3.885229 | 0.323769 | 12 |
| CMIP | 3.883371 | 0.323614 | 12 |
| ZC3H3 | 3.800354 | 0.316696 | 12 |
| ZC3H12D | 4.564659 | 0.414969 | 11 |
| TBCD | 3.721824 | 0.338348 | 11 |
| TRAPPC12 | 5.592923 | 0.621436 | 9 |
| SND1 | 5.51222 | 0.612469 | 9 |
| ATP11A | 4.466621 | 0.496291 | 9 |
| RUNX1 | 4.068281 | 0.452031 | 9 |
| AXIN2 | 3.879315 | 0.431035 | 9 |
| TSPAN9 | 3.811645 | 0.423516 | 9 |
| CACNA2D4 | 3.738174 | 0.415353 | 9 |
| VRK2 | 4.449892 | 0.556237 | 8 |
| AFF3 | 4.052908 | 0.506614 | 8 |
| DLEU1 | 3.93938 | 0.492422 | 8 |
| PPP2R2B | 3.861173 | 0.482647 | 8 |
| NAV1 | 4.691965 | 0.670281 | 7 |
| DUSP6 | 4.203916 | 0.600559 | 7 |
| GAK | 3.708546 | 0.529792 | 7 |
| FBXL18 | 3.708094 | 0.618016 | 6 |
| TSNAX-DISC1 | 4.859345 | 0.971869 | 5 |
| RUNDC3A | 3.725693 | 0.745139 | 5 |

TABLE 80
Cancer Type GCT_TERA

| Gene site | imp_sum | imp_mean | n |
|---|---|---|---|
| PTPRN2 | 17.87431 | 0.217979 | 82 |
| PRDM16 | 15.90775 | 0.224053 | 71 |
| PCDHGA1 | 4.154031 | 0.070407 | 59 |
| PCDHGA2 | 4.470417 | 0.078428 | 57 |
| PCDHGA3 | 4.018183 | 0.074411 | 54 |
| PCDHGB1 | 4.018183 | 0.075815 | 53 |
| PCDHGA4 | 4.018183 | 0.078788 | 51 |
| PCDHGB2 | 4.018183 | 0.082004 | 49 |
| PCDHGA5 | 4.295947 | 0.091403 | 47 |
| HDAC4 | 17.99685 | 0.486401 | 37 |
| RBFOX3 | 9.614951 | 0.274713 | 35 |
| PAX6 | 9.381022 | 0.268029 | 35 |
| DIP2C | 9.374361 | 0.292949 | 32 |
| SOX2-OT | 4.59365 | 0.158402 | 29 |
| GALNT9 | 4.846109 | 0.179486 | 27 |
| SHANK2 | 5.967514 | 0.22952 | 26 |
| AGAP1 | 10.10199 | 0.40408 | 25 |
| CAMTA1 | 9.78895 | 0.391558 | 25 |
| PDGFRA | 6.632905 | 0.265316 | 25 |
| MEIS1 | 6.378497 | 0.265771 | 24 |
| SATB2 | 5.7202 | 0.238342 | 24 |
| RPTOR | 13.34639 | 0.580278 | 23 |
| NCOR2 | 9.562957 | 0.415781 | 23 |
| NXN | 5.929367 | 0.257799 | 23 |
| PRKCZ | 6.904633 | 0.313847 | 22 |
| SKI | 8.750163 | 0.416674 | 21 |
| FRMD4A | 7.225964 | 0.361298 | 20 |
| SDK1 | 6.522443 | 0.326122 | 20 |
| MAD1L1 | 11.14816 | 0.586745 | 19 |
| CASZ1 | 7.408534 | 0.389923 | 19 |
| ZNF423 | 6.4314 | 0.338495 | 19 |
| SMG1P2 | 6.203487 | 0.326499 | 19 |
| BOLA2 | 6.203487 | 0.326499 | 19 |
| LOC613038 | 6.203487 | 0.326499 | 19 |
| TBC1D16 | 7.737052 | 0.429836 | 18 |
| ANKRD11 | 6.607758 | 0.367098 | 18 |
| FOXK1 | 6.211291 | 0.345072 | 18 |
| MCF2L | 5.36849 | 0.298249 | 18 |
| RBFOX1 | 3.760071 | 0.208893 | 18 |
| PAX6-AS1 | 5.905532 | 0.347384 | 17 |
| RCN1 | 5.905532 | 0.347384 | 17 |
| OPCML | 3.974252 | 0.23378 | 17 |
| FOXP1 | 5.642803 | 0.352675 | 16 |
| SORBS2 | 5.266291 | 0.329143 | 16 |
| NAV2 | 4.03055 | 0.251909 | 16 |
| BAIAP2 | 5.289703 | 0.352647 | 15 |
| GLI2 | 4.695861 | 0.313057 | 15 |
| KIRREL3 | 4.319986 | 0.287999 | 15 |
| NFIX | 4.191253 | 0.279417 | 15 |
| ZBTB20 | 4.018173 | 0.267878 | 15 |
| COL23A1 | 3.724193 | 0.24828 | 15 |
| RPS6KA2 | 6.902618 | 0.493044 | 14 |
| ARHGEF10 | 5.265573 | 0.376112 | 14 |
| PRKAG2 | 4.694434 | 0.335317 | 14 |
| C7orf50 | 4.404999 | 0.314643 | 14 |
| MOB2 | 4.213358 | 0.300954 | 14 |
| TBX5 | 4.202229 | 0.300159 | 14 |
| MSI2 | 5.703035 | 0.438695 | 13 |
| MIR9-3HG | 4.989205 | 0.383785 | 13 |
| SPTBN4 | 4.626165 | 0.355859 | 13 |
| RFX4 | 4.49132 | 0.345486 | 13 |
| MYT1L | 4.371628 | 0.336279 | 13 |
| GSE1 | 3.778988 | 0.290691 | 13 |
| ZC3H3 | 5.296445 | 0.44137 | 12 |
| LRBA | 5.208066 | 0.434005 | 12 |
| ADGRD1 | 4.681358 | 0.390113 | 12 |
| CMIP | 4.38781 | 0.365651 | 12 |
| TNS3 | 4.246333 | 0.353861 | 12 |
| FBRSL1 | 4.013577 | 0.334465 | 12 |
| MIRLET7BHG | 3.678431 | 0.306536 | 12 |
| ANAPC16 | 4.975722 | 0.452338 | 11 |
| CTBP2 | 4.523532 | 0.41123 | 11 |
| ZC3H12D | 4.448097 | 0.404372 | 11 |
| TBCD | 4.235393 | 0.385036 | 11 |
| RAD51B | 4.092926 | 0.372084 | 11 |
| CCDC140 | 3.835235 | 0.348658 | 11 |
| PCDHGC3 | 3.759371 | 0.341761 | 11 |
| TP73 | 5.395891 | 0.539589 | 10 |
| KLHL29 | 4.211312 | 0.421131 | 10 |
| RGS12 | 4.028726 | 0.402873 | 10 |
| SH3RF3 | 3.735144 | 0.373514 | 10 |
| SND1 | 5.405361 | 0.600596 | 9 |
| ATP11A | 5.190054 | 0.576673 | 9 |
| ADAMTS2 | 4.816169 | 0.53513 | 9 |
| CACNA2D4 | 4.7708 | 0.530089 | 9 |
| MGMT | 4.018641 | 0.446516 | 9 |
| ASAP1 | 3.692621 | 0.410291 | 9 |
| DLEU1 | 5.903349 | 0.737919 | 8 |
| MSRA | 4.837281 | 0.60466 | 8 |
| LHX4 | 4.117693 | 0.514712 | 8 |
| DNMT3A | 3.852664 | 0.481583 | 8 |
| RORA | 3.836926 | 0.479616 | 8 |
| VRK2 | 3.678644 | 0.45983 | 8 |
| NAV1 | 4.495543 | 0.64222 | 7 |
| GAK | 4.323294 | 0.617613 | 7 |
| FBXL18 | 5.140929 | 0.856822 | 6 |
| RUNDC3A | 5.185511 | 1.037102 | 5 |
| ARHGEF7 | 4.182116 | 0.836423 | 5 |
| BCAR1 | 3.830265 | 0.766053 | 5 |
| TSNAX-DISC1 | 3.757437 | 0.751487 | 5 |

TABLE 81
Cancer Type GCT_YOLKSAC

| Gene site | imp_sum | imp_mean | n |
|---|---|---|---|
| PTPRN2 | 4.99835 | 0.060955 | 82 |
| PRDM16 | 5.801836 | 0.081716 | 71 |
| PCDHGA3 | 2.502743 | 0.046347 | 54 |
| PCDHGB1 | 2.502743 | 0.047222 | 53 |
| PCDHGA4 | 2.502743 | 0.049073 | 51 |
| HDAC4 | 11.14682 | 0.301266 | 37 |
| RBFOX3 | 4.511934 | 0.128912 | 35 |
| PAX6 | 3.453012 | 0.098657 | 35 |
| DIP2C | 6.987383 | 0.218356 | 32 |
| SHANK2 | 3.496089 | 0.134465 | 26 |
| AGAP1 | 7.738 | 0.30952 | 25 |
| CAMTA1 | 4.366767 | 0.174671 | 25 |
| PDGFRA | 2.790693 | 0.111628 | 25 |
| RPTOR | 8.298155 | 0.360789 | 23 |
| NCOR2 | 6.257643 | 0.272071 | 23 |
| NXN | 5.325576 | 0.231547 | 23 |
| PRKCZ | 3.769165 | 0.171326 | 22 |
| SKI | 6.772891 | 0.322519 | 21 |
| ABR | 2.749045 | 0.137452 | 20 |
| SDK1 | 2.517911 | 0.125896 | 20 |
| MAD1L1 | 8.328458 | 0.43834 | 19 |
| CASZ1 | 3.960116 | 0.208427 | 19 |
| KCNQ1 | 3.539228 | 0.186275 | 19 |
| SMG1P2 | 2.739954 | 0.144208 | 19 |
| BOLA2 | 2.739954 | 0.144208 | 19 |
| LOC613038 | 2.739954 | 0.144208 | 19 |
| FOXK1 | 6.469351 | 0.359408 | 18 |
| TBC1D16 | 4.904479 | 0.272471 | 18 |
| SEPTIN9 | 2.749956 | 0.152775 | 18 |
| PAX6-AS1 | 2.751846 | 0.161873 | 17 |
| RCN1 | 2.751846 | 0.161873 | 17 |
| FOXP1 | 4.98589 | 0.311618 | 16 |
| EBF3 | 3.495841 | 0.21849 | 16 |
| GLI2 | 3.827065 | 0.255138 | 15 |
| SLX1B- | 3.01742 | 0.201161 | 15 |
| SULT1A4 | | | |
| SLX1A | 3.01742 | 0.201161 | 15 |
| LOC606724 | 3.01742 | 0.201161 | 15 |
| PRKAG2 | 4.033346 | 0.288096 | 14 |
| CUX1 | 3.696431 | 0.264031 | 14 |
| C7orf50 | 3.680209 | 0.262872 | 14 |
| IQSEC1 | 3.21317 | 0.229512 | 14 |
| ARHGEF10 | 2.563992 | 0.183142 | 14 |
| RPS6KA2 | 2.556839 | 0.182631 | 14 |
| MSI2 | 5.590865 | 0.430067 | 13 |
| GSE1 | 5.181869 | 0.398605 | 13 |
| CMIP | 5.62367 | 0.468639 | 12 |
| ZC3H3 | 3.288293 | 0.274024 | 12 |
| GNA12 | 3.222275 | 0.268523 | 12 |
| RASA3 | 2.940557 | 0.245046 | 12 |
| MEIS2 | 2.75406 | 0.229505 | 12 |
| TBX4 | 2.530601 | 0.210883 | 12 |
| ADGRD1 | 2.482515 | 0.206876 | 12 |
| GLUD1P2 | 4.223631 | 0.383966 | 11 |
| RAD51B | 3.500001 | 0.318182 | 11 |
| CTBP2 | 3.119431 | 0.283585 | 11 |
| VGLL4 | 2.636152 | 0.23965 | 11 |
| ZC3H12D | 2.51935 | 0.229032 | 11 |
| FGFR2 | 2.458012 | 0.223456 | 11 |
| TSPAN4 | 3.917092 | 0.391709 | 10 |
| ACOT7 | 3.318852 | 0.331885 | 10 |
| AKAP13 | 3.17245 | 0.317245 | 10 |
| CHST11 | 2.657571 | 0.265757 | 10 |
| SH3RF3 | 2.64241 | 0.264241 | 10 |
| KLHL29 | 2.557927 | 0.255793 | 10 |
| SND1 | 5.450853 | 0.60565 | 9 |
| ATP11A | 5.3636 | 0.595956 | 9 |
| MGMT | 3.116205 | 0.346245 | 9 |
| AXIN2 | 2.804539 | 0.311615 | 9 |
| TSPAN9 | 2.737463 | 0.304163 | 9 |
| MACROD1 | 3.046225 | 0.380778 | 8 |
| TRIM71 | 2.748109 | 0.343514 | 8 |
| DNMT3A | 2.729414 | 0.341177 | 8 |
| LINC00311 | 2.713531 | 0.339191 | 8 |
| DLEU1 | 2.630831 | 0.328854 | 8 |
| TRAPPC9 | 2.590092 | 0.323761 | 8 |
| SYNJ2 | 2.540975 | 0.317622 | 8 |
| RXRA | 3.981993 | 0.568856 | 7 |
| CXXC5 | 3.667471 | 0.523924 | 7 |
| MIR548H4 | 2.932401 | 0.418914 | 7 |
| OTX2-AS1 | 2.720198 | 0.3886 | 7 |
| CRADD | 4.975217 | 0.829203 | 6 |
| FBXL18 | 4.219659 | 0.703277 | 6 |
| TRAK1 | 3.020541 | 0.503424 | 6 |
| MYO16 | 2.676559 | 0.446093 | 6 |
| FMNL2 | 2.639078 | 0.439846 | 6 |
| RUNDC3A | 3.406303 | 0.681261 | 5 |
| ARHGEF7 | 3.345842 | 0.669168 | 5 |
| BCAR1 | 2.989539 | 0.597908 | 5 |
| FAM53B | 2.816195 | 0.563239 | 5 |
| AP2A2 | 2.728119 | 0.545624 | 5 |
| ZMIZ1 | 2.638003 | 0.659501 | 4 |
| DUSP5 | 2.553512 | 0.638378 | 4 |
| LPP | 2.466561 | 0.61664 | 4 |
| DTNA | 2.44406 | 0.611015 | 4 |
| SLC6A9 | 2.449393 | 0.816464 | 3 |
| RALGAPA2 | 3.817503 | 1.908751 | 2 |
| RAB11FIP3 | 2.739979 | 1.36999 | 2 |
| ERI3 | 2.704809 | 1.352405 | 2 |
| TRIM65 | 2.64978 | 1.32489 | 2 |
| KCNV2 | 2.795229 | 2.795229 | 1 |

TABLE 82
Cancer Type GG

| Gene site | imp_sum | imp_mean | n |
|---|---|---|---|
| PTPRN2 | 25.34553 | 0.309092 | 82 |
| PRDM16 | 29.31827 | 0.412933 | 71 |
| PCDHGA1 | 9.194939 | 0.155846 | 59 |
| PCDHGA2 | 8.878553 | 0.155764 | 57 |
| PCDHGA3 | 9.194939 | 0.170277 | 54 |
| PCDHGB1 | 9.194939 | 0.173489 | 53 |
| PCDHGA4 | 9.194939 | 0.180293 | 51 |
| PCDHGB2 | 9.511325 | 0.194109 | 49 |
| PCDHGA5 | 8.625482 | 0.183521 | 47 |
| PCDHGB3 | 7.99271 | 0.185877 | 43 |
| PCDHGA6 | 7.676324 | 0.191908 | 40 |
| HDAC4 | 17.47931 | 0.472414 | 37 |
| PCDHGA7 | 7.043552 | 0.190366 | 37 |
| PAX6 | 15.42818 | 0.440805 | 35 |
| RBFOX3 | 13.02851 | 0.372243 | 35 |
| PCDHGB4 | 6.813347 | 0.194667 | 35 |
| PCDHGA8 | 6.813347 | 0.194667 | 35 |
| DIP2C | 13.69455 | 0.427955 | 32 |
| PCDHGB5 | 6.813347 | 0.212917 | 32 |
| PCDHGA9 | 6.813347 | 0.219785 | 31 |
| SOX2-OT | 12.0816 | 0.416607 | 29 |
| PCDHGB6 | 5.734782 | 0.197751 | 29 |
| PCDHGA10 | 5.734782 | 0.204814 | 28 |
| SHANK2 | 8.764206 | 0.337085 | 26 |
| ADARB2 | 7.918374 | 0.304553 | 26 |
| AGAP1 | 10.13629 | 0.405452 | 25 |
| CAMTA1 | 8.46813 | 0.338725 | 25 |
| PDGFRA | 6.710821 | 0.268433 | 25 |
| SATB2 | 8.66246 | 0.360936 | 24 |
| MEIS1 | 7.857727 | 0.327405 | 24 |
| RPTOR | 13.73371 | 0.597118 | 23 |
| NCOR2 | 8.935001 | 0.388478 | 23 |
| HOXB3 | 7.16603 | 0.311567 | 23 |
| INPP5A | 7.097167 | 0.308572 | 23 |
| NXN | 6.273458 | 0.272759 | 23 |
| RIMBP2 | 5.900218 | 0.256531 | 23 |
| PRKCZ | 7.814398 | 0.3552 | 22 |
| SKI | 13.60206 | 0.647717 | 21 |
| SIM2 | 7.465344 | 0.355493 | 21 |
| ZIC4 | 6.097637 | 0.290364 | 21 |
| ABR | 9.118534 | 0.455927 | 20 |
| FRMD4A | 8.819341 | 0.440967 | 20 |
| SDK1 | 5.901252 | 0.295063 | 20 |
| MAD1L1 | 13.06315 | 0.687534 | 19 |
| ZNF423 | 10.99371 | 0.578616 | 19 |
| CASZ1 | 8.968132 | 0.472007 | 19 |
| SMG1P2 | 6.003089 | 0.315952 | 19 |
| BOLA2 | 6.003089 | 0.315952 | 19 |
| LOC613038 | 6.003089 | 0.315952 | 19 |
| FOXK1 | 8.454174 | 0.469676 | 18 |
| ANKRD11 | 6.82245 | 0.379025 | 18 |
| MCF2L | 6.745235 | 0.374735 | 18 |
| SEPTIN9 | 5.530185 | 0.307233 | 18 |
| TBC1D16 | 5.445359 | 0.30252 | 18 |
| OPCML | 8.474402 | 0.498494 | 17 |
| TBX15 | 7.334093 | 0.431417 | 17 |
| PAX6-AS1 | 5.324681 | 0.313217 | 17 |
| RCN1 | 5.324681 | 0.313217 | 17 |
| FOXP1 | 8.364046 | 0.522753 | 16 |
| NAV2 | 5.598424 | 0.349902 | 16 |
| GLI2 | 12.02527 | 0.801685 | 15 |
| ZBTB20 | 6.936051 | 0.462403 | 15 |
| NFIX | 5.624007 | 0.374934 | 15 |
| LRMDA | 5.508807 | 0.367254 | 15 |
| RPS6KA2 | 7.775948 | 0.555425 | 14 |
| C7orf50 | 6.54699 | 0.467642 | 14 |
| CUX1 | 6.333639 | 0.452403 | 14 |
| PRKAG2 | 5.297489 | 0.378392 | 14 |
| MSI2 | 8.236219 | 0.633555 | 13 |
| GSE1 | 6.344139 | 0.488011 | 13 |
| KIF26B | 5.955905 | 0.458147 | 13 |
| RFX4 | 5.736025 | 0.441233 | 13 |
| MYTIL | 5.609456 | 0.431497 | 13 |
| SPTBN4 | 5.601586 | 0.430891 | 13 |
| ZC3H3 | 6.473633 | 0.539469 | 12 |
| TNS3 | 6.410599 | 0.534217 | 12 |
| CMIP | 5.938821 | 0.494902 | 12 |
| TBX4 | 5.883156 | 0.490263 | 12 |
| MIRLET7BHG | 5.653598 | 0.471133 | 12 |
| ADGRD1 | 5.444733 | 0.453728 | 12 |
| MEGF6 | 5.315412 | 0.442951 | 12 |
| MAML3 | 5.176265 | 0.431355 | 12 |
| ZC3H12D | 7.116886 | 0.64699 | 11 |
| VGLLA | 5.735209 | 0.521383 | 11 |
| RAD51B | 5.701272 | 0.518297 | 11 |
| SPON2 | 5.238344 | 0.476213 | 11 |
| ACOT7 | 5.762192 | 0.576219 | 10 |
| OTX1 | 5.712617 | 0.571262 | 10 |
| IGF1R | 5.600259 | 0.560026 | 10 |
| SND1 | 6.771402 | 0.752378 | 9 |
| ATP11A | 6.746126 | 0.74957 | 9 |
| ASAP1 | 5.982675 | 0.664742 | 9 |
| AXIN2 | 5.952509 | 0.66139 | 9 |
| TSPAN9 | 5.389787 | 0.598865 | 9 |
| LHX4 | 6.42543 | 0.803179 | 8 |
| LINC00311 | 5.699983 | 0.712498 | 8 |
| ASPSCR1 | 5.1551 | 0.644388 | 8 |
| DUSP6 | 6.819031 | 0.974147 | 7 |
| LINC00461 | 5.320591 | 0.760084 | 7 |
| FBXL18 | 5.134469 | 0.855745 | 6 |

TABLE 83
Cancer Type GNT_ND

| Gene site | imp_sum | imp_mean | n |
|---|---|---|---|
| PTPRN2 | 11.49988 | 0.140242 | 82 |
| PRDM16 | 10.36101 | 0.14593 | 71 |
| PCDHGA1 | 2.628587 | 0.044552 | 59 |
| PCDHGA2 | 2.628587 | 0.046116 | 57 |
| PCDHGA3 | 2.944973 | 0.054537 | 54 |
| PCDHGB1 | 2.944973 | 0.055566 | 53 |
| PCDHGA4 | 2.628587 | 0.051541 | 51 |
| PCDHGA5 | 2.628587 | 0.055927 | 47 |
| PCDHGB3 | 3.577745 | 0.083203 | 43 |
| PCDHGA6 | 2.807114 | 0.070178 | 40 |
| HDAC4 | 9.886463 | 0.267202 | 37 |
| RBFOX3 | 7.509306 | 0.214552 | 35 |
| PAX6 | 5.357323 | 0.153066 | 35 |
| DIP2C | 8.208457 | 0.256514 | 32 |
| SOX2-OT | 8.728742 | 0.300991 | 29 |
| ADARB2 | 3.267447 | 0.125671 | 26 |
| CAMTA1 | 6.086511 | 0.24346 | 25 |
| PDGFRA | 5.626339 | 0.225054 | 25 |
| AGAP1 | 5.331453 | 0.213258 | 25 |
| PCDHGB7 | 2.759321 | 0.114972 | 24 |
| RPTOR | 6.427431 | 0.279454 | 23 |
| NCOR2 | 4.320246 | 0.187837 | 23 |
| RIMBP2 | 3.703202 | 0.161009 | 23 |
| NXN | 2.693327 | 0.117101 | 23 |
| PRKCZ | 4.280145 | 0.194552 | 22 |
| SKI | 8.403006 | 0.400143 | 21 |
| FRMD4A | 5.84965 | 0.292483 | 20 |
| ZNF423 | 7.989529 | 0.420502 | 19 |
| MAD1L1 | 6.742287 | 0.354857 | 19 |
| SMG1P2 | 5.493399 | 0.289126 | 19 |
| BOLA2 | 5.493399 | 0.289126 | 19 |
| LOC613038 | 5.493399 | 0.289126 | 19 |
| CASZ1 | 3.400766 | 0.178988 | 19 |
| MCF2L | 4.583134 | 0.254619 | 18 |
| FOXK1 | 3.13369 | 0.174094 | 18 |
| SEPTIN9 | 2.728531 | 0.151585 | 18 |
| TBX15 | 4.164269 | 0.244957 | 17 |
| OPCML | 4.137456 | 0.24338 | 17 |
| FOXP1 | 4.774371 | 0.298398 | 16 |
| GLI2 | 9.168754 | 0.61125 | 15 |
| KIRREL3 | 3.814096 | 0.254273 | 15 |
| LRMDA | 3.771615 | 0.251441 | 15 |
| ZBTB20 | 3.032585 | 0.202172 | 15 |
| CUX1 | 3.015518 | 0.215394 | 14 |
| MYTIL | 4.276737 | 0.32898 | 13 |
| MSI2 | 3.848376 | 0.296029 | 13 |
| RFX4 | 2.894789 | 0.222676 | 13 |
| SPTBN4 | 2.681901 | 0.2063 | 13 |
| CMIP | 5.471674 | 0.455973 | 12 |
| ZC3H3 | 3.35249 | 0.279374 | 12 |
| MIRLET7BHG | 2.987944 | 0.248995 | 12 |
| ADGRD1 | 2.913691 | 0.242808 | 12 |
| TNS3 | 2.719485 | 0.226624 | 12 |
| TBX4 | 2.638051 | 0.219838 | 12 |
| FGFR2 | 4.110203 | 0.373655 | 11 |
| RAD51B | 3.301774 | 0.300161 | 11 |
| VGLL4 | 3.180565 | 0.289142 | 11 |
| LBX1-AS1 | 5.781882 | 0.578188 | 10 |
| ACOT7 | 4.055634 | 0.405563 | 10 |
| SH3RF3 | 3.706206 | 0.370621 | 10 |
| ADGRB1 | 5.36614 | 0.596238 | 9 |
| ATP11A | 5.061607 | 0.562401 | 9 |
| SND1 | 3.843547 | 0.427061 | 9 |
| ASAP1 | 3.648247 | 0.405361 | 9 |
| NOTCH1 | 3.530086 | 0.392232 | 9 |
| ZNF833P | 3.196336 | 0.355148 | 9 |
| RUNX1 | 3.10094 | 0.344549 | 9 |
| TRAPPC12 | 3.083809 | 0.342645 | 9 |
| KCNMA1 | 2.976558 | 0.330729 | 9 |
| AXIN2 | 2.910305 | 0.323367 | 9 |
| TSPAN9 | 2.775641 | 0.308405 | 9 |
| ADAMTS2 | 2.645081 | 0.293898 | 9 |
| GPC6 | 2.638177 | 0.293131 | 9 |
| LINC00311 | 2.95298 | 0.369122 | 8 |
| GRIK2 | 2.800493 | 0.350062 | 8 |
| ESRRG | 2.688412 | 0.336052 | 8 |
| MSRA | 2.685591 | 0.335699 | 8 |
| DUSP6 | 4.29677 | 0.613824 | 7 |
| LINC00461 | 3.812362 | 0.544623 | 7 |
| NAV1 | 3.484596 | 0.497799 | 7 |
| SOX6 | 3.175191 | 0.453599 | 7 |
| FHIT | 2.908577 | 0.415511 | 7 |
| LHX2 | 2.781746 | 0.397392 | 7 |
| LINC01140 | 2.688698 | 0.3841 | 7 |
| CXXC5 | 2.684351 | 0.383479 | 7 |
| FBXL18 | 3.966795 | 0.661133 | 6 |
| FAM181A | 3.321132 | 0.553522 | 6 |
| MYO16 | 3.110838 | 0.518473 | 6 |
| RUNDC3A | 4.597805 | 0.919561 | 5 |
| PRR5L | 3.231042 | 0.646208 | 5 |
| TSNAX-DISC1 | 3.12277 | 0.624554 | 5 |
| ARHGEF7 | 3.056062 | 0.611212 | 5 |
| THRB | 2.723247 | 0.544649 | 5 |
| RBMS3 | 3.544672 | 0.886168 | 4 |
| STAP2 | 3.066668 | 0.766667 | 4 |
| LINC00856 | 2.744387 | 0.686097 | 4 |
| GRIN2B | 3.331979 | 1.11066 | 3 |
| DAGLB | 2.993153 | 0.997718 | 3 |
| SOX10 | 4.597364 | 2.298682 | 2 |
| SLC25A10 | 2.817577 | 1.408788 | 2 |

TABLE 84
Cancer Type HGAP

| Gene site | imp_sum | imp_mean | n |
|---|---|---|---|
| PTPRN2 | 24.4535 | 0.298213 | 82 |
| PRDM16 | 19.6305 | 0.276486 | 71 |
| PCDHGA1 | 12.32161 | 0.208841 | 59 |
| PCDHGA2 | 12.00523 | 0.210618 | 57 |
| PCDHGA3 | 10.70417 | 0.198225 | 54 |
| PCDHGB1 | 10.70417 | 0.201966 | 53 |
| PCDHGA4 | 10.56268 | 0.207111 | 51 |
| PCDHGB2 | 9.92991 | 0.202651 | 49 |
| PCDHGA5 | 9.267611 | 0.197183 | 47 |
| PCDHGB3 | 8.503787 | 0.197762 | 43 |
| PCDHGA6 | 8.318986 | 0.207975 | 40 |
| HDAC4 | 14.08724 | 0.380736 | 37 |
| PCDHGA7 | 7.686214 | 0.207736 | 37 |
| PAX6 | 12.7288 | 0.36368 | 35 |
| RBFOX3 | 10.1735 | 0.290671 | 35 |
| PCDHGB4 | 7.686214 | 0.219606 | 35 |
| PCDHGA8 | 7.686214 | 0.219606 | 35 |
| DIP2C | 12.73497 | 0.397968 | 32 |
| PCDHGB5 | 7.053442 | 0.22042 | 32 |
| PCDHGA9 | 7.053442 | 0.22753 | 31 |
| SOX2-OT | 11.2276 | 0.387159 | 29 |
| PCDHGB6 | 6.465793 | 0.222958 | 29 |
| PCDHGA10 | 6.149407 | 0.219622 | 28 |
| SHANK2 | 5.314729 | 0.204413 | 26 |
| CAMTA1 | 9.327048 | 0.373082 | 25 |
| AGAP1 | 8.252622 | 0.330105 | 25 |
| PDGFRA | 5.639808 | 0.225592 | 25 |
| SATB2 | 7.592696 | 0.316362 | 24 |
| MEIS1 | 7.443434 | 0.310143 | 24 |
| PCDHGB7 | 5.833021 | 0.243043 | 24 |
| RPTOR | 9.629501 | 0.418674 | 23 |
| NCOR2 | 7.868925 | 0.342127 | 23 |
| INPP5A | 6.119086 | 0.266047 | 23 |
| NXN | 5.884705 | 0.255857 | 23 |
| RIMBP2 | 5.5258 | 0.240252 | 23 |
| PCDHGA11 | 5.385766 | 0.234164 | 23 |
| PRKCZ | 6.311547 | 0.286888 | 22 |
| SKI | 10.8685 | 0.517548 | 21 |
| SIM2 | 7.261332 | 0.345778 | 21 |
| HOXA-AS3 | 4.630083 | 0.22048 | 21 |
| FRMD4A | 5.211017 | 0.260551 | 20 |
| ABR | 4.617089 | 0.230854 | 20 |
| MAD1L1 | 12.86645 | 0.677181 | 19 |
| ZNF423 | 9.219133 | 0.485218 | 19 |
| SMG1P2 | 7.153844 | 0.376518 | 19 |
| BOLA2 | 7.153844 | 0.376518 | 19 |
| LOC613038 | 7.153844 | 0.376518 | 19 |
| KCNQ1 | 6.379811 | 0.33578 | 19 |
| SEPTIN9 | 5.374577 | 0.298588 | 18 |
| FOXK1 | 5.363211 | 0.297956 | 18 |
| MCF2L | 5.30329 | 0.294627 | 18 |
| ANKRD11 | 4.888001 | 0.271556 | 18 |
| OPCML | 7.865005 | 0.462647 | 17 |
| TBX15 | 6.224702 | 0.366159 | 17 |
| PAX6-AS1 | 5.918508 | 0.348148 | 17 |
| RCN1 | 5.918508 | 0.348148 | 17 |
| NAV2 | 5.629729 | 0.351858 | 16 |
| SORBS2 | 5.629435 | 0.35184 | 16 |
| FOXP1 | 5.595224 | 0.349701 | 16 |
| GLI2 | 10.32721 | 0.688481 | 15 |
| BAIAP2 | 6.495956 | 0.433064 | 15 |
| SLX1B- | 5.023958 | 0.334931 | 15 |
| SULT1A4 | | | |
| SLX1A | 5.023958 | 0.334931 | 15 |
| LOC606724 | 5.023958 | 0.334931 | 15 |
| COL23A1 | 4.715474 | 0.314365 | 15 |
| LRMDA | 4.577949 | 0.305197 | 15 |
| C7orf50 | 5.186346 | 0.370453 | 14 |
| RPS6KA2 | 5.142733 | 0.367338 | 14 |
| MSI2 | 6.845577 | 0.526583 | 13 |
| MYTIL | 5.449512 | 0.419193 | 13 |
| SPTBN4 | 5.417407 | 0.416724 | 13 |
| RFX4 | 5.175823 | 0.39814 | 13 |
| MIR9-3HG | 4.57855 | 0.352196 | 13 |
| ZC3H3 | 7.215793 | 0.601316 | 12 |
| CMIP | 5.485913 | 0.457159 | 12 |
| MIRLET7BHG | 4.868696 | 0.405725 | 12 |
| ADGRD1 | 4.826819 | 0.402235 | 12 |
| VGLLA | 5.635849 | 0.51235 | 11 |
| FGFR2 | 5.206888 | 0.473353 | 11 |
| RAD51B | 5.131747 | 0.466522 | 11 |
| LBX1-AS1 | 6.227283 | 0.622728 | 10 |
| AKAP13 | 4.714159 | 0.471416 | 10 |
| CHST11 | 4.491095 | 0.449109 | 10 |
| OTX1 | 4.46974 | 0.446974 | 10 |
| ADGRB1 | 5.954707 | 0.661634 | 9 |
| ATP11A | 5.724009 | 0.636001 | 9 |
| TSPAN9 | 5.3629 | 0.595878 | 9 |
| ASAP1 | 4.940787 | 0.548976 | 9 |
| NEAT1 | 4.925836 | 0.547315 | 9 |
| ADAMTS2 | 4.535995 | 0.503999 | 9 |
| KCNH2 | 4.42098 | 0.49122 | 9 |
| LINC00311 | 4.67027 | 0.583784 | 8 |
| ASPSCR1 | 4.437863 | 0.554733 | 8 |
| DUSP6 | 6.379713 | 0.911388 | 7 |
| LINC00461 | 5.629928 | 0.804275 | 7 |
| NAV1 | 5.075466 | 0.725067 | 7 |
| FAM181A | 4.627874 | 0.771312 | 6 |
| RUNDC3A | 4.993431 | 0.998686 | 5 |
| TSNAX-DISC1 | 4.881004 | 0.976201 | 5 |
| STAP2 | 4.615269 | 1.153817 | 4 |

TABLE 85
Cancer Type HGNET_BCOR_Fus

| Gene site | imp_sum | imp_mean | n |
|---|---|---|---|
| PTPRN2 | 8.695059 | 0.106037 | 82 |
| PRDM16 | 9.086343 | 0.127977 | 71 |
| HDAC4 | 6.063527 | 0.163879 | 37 |
| RBFOX3 | 9.137664 | 0.261076 | 35 |
| PAX6 | 7.319629 | 0.209132 | 35 |
| DIP2C | 3.760208 | 0.117507 | 32 |
| SOX2-OT | 4.818061 | 0.16614 | 29 |
| GALNT9 | 2.927062 | 0.10841 | 27 |
| ADARB2 | 2.991152 | 0.115044 | 26 |
| SHANK2 | 2.288362 | 0.088014 | 26 |
| CAMTA1 | 5.018457 | 0.200738 | 25 |
| AGAP1 | 4.193611 | 0.167744 | 25 |
| PDGFRA | 3.368038 | 0.134722 | 25 |
| SATB2 | 4.754808 | 0.198117 | 24 |
| RPTOR | 5.570949 | 0.242215 | 23 |
| NCOR2 | 4.164385 | 0.18106 | 23 |
| NXN | 3.100555 | 0.134807 | 23 |
| RIMBP2 | 2.694694 | 0.117161 | 23 |
| PRKCZ | 3.816924 | 0.173497 | 22 |
| SKI | 7.813392 | 0.372066 | 21 |
| ZIC4 | 2.983964 | 0.142094 | 21 |
| SIM2 | 2.501738 | 0.11913 | 21 |
| FRMD4A | 3.927263 | 0.196363 | 20 |
| SDK1 | 3.048273 | 0.152414 | 20 |
| MAD1L1 | 7.395283 | 0.389225 | 19 |
| ZNF423 | 5.272324 | 0.277491 | 19 |
| SMG1P2 | 2.630407 | 0.138442 | 19 |
| BOLA2 | 2.630407 | 0.138442 | 19 |
| LOC613038 | 2.630407 | 0.138442 | 19 |
| CASZ1 | 2.241851 | 0.117992 | 19 |
| FOXK1 | 5.409171 | 0.30051 | 18 |
| ANKRD11 | 3.080524 | 0.17114 | 18 |
| SEPTIN9 | 2.188115 | 0.121562 | 18 |
| OPCML | 4.080539 | 0.240032 | 17 |
| FOXP1 | 2.904035 | 0.181502 | 16 |
| SORBS2 | 2.43297 | 0.152061 | 16 |
| EBF3 | 2.260408 | 0.141276 | 16 |
| GLI2 | 7.058917 | 0.470594 | 15 |
| BAIAP2 | 3.808955 | 0.25393 | 15 |
| EMX2OS | 3.695112 | 0.246341 | 15 |
| ZBTB20 | 2.56894 | 0.171263 | 15 |
| COL23A1 | 2.468116 | 0.164541 | 15 |
| CUX1 | 3.79665 | 0.271189 | 14 |
| PRKAG2 | 3.465237 | 0.247517 | 14 |
| PPP2R2A | 2.952354 | 0.210882 | 14 |
| RPS6KA2 | 2.287237 | 0.163374 | 14 |
| MYTIL | 2.76295 | 0.212535 | 13 |
| GSE1 | 2.657642 | 0.204434 | 13 |
| MSI2 | 2.521813 | 0.193986 | 13 |
| CMIP | 3.396818 | 0.283068 | 12 |
| MIRLET7BHG | 2.83575 | 0.236313 | 12 |
| TNS3 | 2.352031 | 0.196003 | 12 |
| RAD51B | 2.971816 | 0.270165 | 11 |
| SLC9A3 | 2.200231 | 0.200021 | 11 |
| ACOT7 | 3.51291 | 0.351291 | 10 |
| GRID1 | 2.803667 | 0.280367 | 10 |
| FMN1 | 2.770846 | 0.277085 | 10 |
| LBX1-AS1 | 2.677234 | 0.267723 | 10 |
| NR2F1-AS1 | 2.490698 | 0.24907 | 10 |
| NR5A2 | 2.331394 | 0.233139 | 10 |
| ATP11A | 4.224137 | 0.469349 | 9 |
| SND1 | 3.840995 | 0.426777 | 9 |
| AXIN2 | 2.695001 | 0.299445 | 9 |
| ASAP1 | 2.500677 | 0.277853 | 9 |
| RUNX1 | 2.490049 | 0.276672 | 9 |
| TSPAN9 | 2.272582 | 0.252509 | 9 |
| LHX4 | 10.54497 | 1.318122 | 8 |
| DLEU1 | 3.431598 | 0.42895 | 8 |
| ESRRG | 2.898586 | 0.362323 | 8 |
| NR2E1 | 2.736802 | 0.3421 | 8 |
| LINC00311 | 2.598862 | 0.324858 | 8 |
| MSRA | 2.415583 | 0.301948 | 8 |
| AFF3 | 2.262456 | 0.282807 | 8 |
| MCC | 2.244619 | 0.280577 | 8 |
| LHX2 | 3.357274 | 0.479611 | 7 |
| CDYL | 3.302677 | 0.471811 | 7 |
| DUSP6 | 3.1137 | 0.444814 | 7 |
| EBF2 | 2.757276 | 0.393897 | 7 |
| TACC2 | 2.218472 | 0.316925 | 7 |
| WNT6 | 3.408692 | 0.568115 | 6 |
| SATB2-AS1 | 3.133854 | 0.522309 | 6 |
| PAX1 | 3.129753 | 0.521625 | 6 |
| FAM181A | 2.728883 | 0.454814 | 6 |
| ROR1 | 2.626658 | 0.437776 | 6 |
| CALD1 | 2.603399 | 0.4339 | 6 |
| FBXL18 | 2.481157 | 0.413526 | 6 |
| VAX2 | 2.406599 | 0.4011 | 6 |
| AGAP2 | 3.285679 | 0.657136 | 5 |
| RUNDC3A | 3.030862 | 0.606172 | 5 |
| ARHGEF7 | 2.881976 | 0.576395 | 5 |
| MNX1 | 2.619473 | 0.523895 | 5 |
| CCR6 | 2.475371 | 0.495074 | 5 |
| TSNAX-DISC1 | 2.4505 | 0.4901 | 5 |
| VAV2 | 2.274903 | 0.454981 | 5 |
| DTNA | 2.296774 | 0.574194 | 4 |
| RBMS3 | 2.192891 | 0.548223 | 4 |
| LHX5 | 2.424746 | 0.808249 | 3 |
| GRIN2B | 2.213335 | 0.737778 | 3 |
| ICAM5 | 3.406453 | 1.703226 | 2 |
| SOX10 | 2.655583 | 1.327791 | 2 |

TABLE 86
Cancer Type HGNET_BCOR_ITD

| Gene site | imp_sum | imp_mean | n |
|---|---|---|---|
| PTPRN2 | 19.0009 | 0.231718 | 82 |
| PRDM16 | 12.49491 | 0.175985 | 71 |
| HDAC4 | 9.725468 | 0.26285 | 37 |
| RBFOX3 | 9.104029 | 0.260115 | 35 |
| PAX6 | 5.207629 | 0.148789 | 35 |
| DIP2C | 11.88098 | 0.371281 | 32 |
| SOX2-OT | 5.587138 | 0.19266 | 29 |
| GALNT9 | 5.693217 | 0.21086 | 27 |
| SHANK2 | 6.847045 | 0.263348 | 26 |
| ADARB2 | 6.108296 | 0.234934 | 26 |
| AGAP1 | 7.80205 | 0.312082 | 25 |
| CAMTA1 | 6.115775 | 0.244631 | 25 |
| PDGFRA | 4.349081 | 0.173963 | 25 |
| SATB2 | 8.841752 | 0.368406 | 24 |
| RPTOR | 12.31693 | 0.535519 | 23 |
| NCOR2 | 6.809669 | 0.296073 | 23 |
| RIMBP2 | 6.235802 | 0.271122 | 23 |
| NXN | 6.083741 | 0.26451 | 23 |
| PRKCZ | 6.466025 | 0.29391 | 22 |
| SKI | 10.71215 | 0.510102 | 21 |
| SIM2 | 4.336066 | 0.206479 | 21 |
| FRMD4A | 6.19085 | 0.309543 | 20 |
| ABR | 4.797977 | 0.239899 | 20 |
| SDK1 | 3.99684 | 0.199842 | 20 |
| MAD1L1 | 12.21106 | 0.642687 | 19 |
| ZNF423 | 7.681063 | 0.404266 | 19 |
| CASZ1 | 6.387941 | 0.336207 | 19 |
| SMG1P2 | 5.249663 | 0.276298 | 19 |
| BOLA2 | 5.249663 | 0.276298 | 19 |
| LOC613038 | 5.249663 | 0.276298 | 19 |
| FOXK1 | 6.729168 | 0.373843 | 18 |
| TBC1D16 | 4.621618 | 0.256757 | 18 |
| SEPTIN9 | 4.199987 | 0.233333 | 18 |
| MCF2L | 4.174511 | 0.231917 | 18 |
| OPCML | 7.484302 | 0.440253 | 17 |
| PAX6-AS1 | 4.633497 | 0.272559 | 17 |
| RCN1 | 4.633497 | 0.272559 | 17 |
| EBF3 | 6.410784 | 0.400674 | 16 |
| NAV2 | 5.476947 | 0.342309 | 16 |
| FOXP1 | 5.298004 | 0.331125 | 16 |
| GLI2 | 9.711034 | 0.647402 | 15 |
| ZBTB20 | 5.106156 | 0.34041 | 15 |
| NFIX | 4.639626 | 0.309308 | 15 |
| RPS6KA2 | 6.94009 | 0.495721 | 14 |
| CUX1 | 5.863901 | 0.41885 | 14 |
| PRKAG2 | 5.374298 | 0.383878 | 14 |
| MOB2 | 4.099752 | 0.292839 | 14 |
| C7orf50 | 4.038509 | 0.288465 | 14 |
| ARHGEF10 | 3.669185 | 0.262085 | 14 |
| MSI2 | 5.523823 | 0.424909 | 13 |
| KIF26B | 4.504027 | 0.346464 | 13 |
| MYTIL | 3.890961 | 0.299305 | 13 |
| GSE1 | 3.703098 | 0.284854 | 13 |
| CMIP | 5.333268 | 0.444439 | 12 |
| MIRLET7BHG | 5.215694 | 0.434641 | 12 |
| ZC3H3 | 4.979102 | 0.414925 | 12 |
| MEGF6 | 4.063235 | 0.338603 | 12 |
| RASA3 | 3.849104 | 0.320759 | 12 |
| FBRSL1 | 3.633048 | 0.302754 | 12 |
| WNT5A | 5.464912 | 0.49681 | 11 |
| VGLLA | 4.877535 | 0.443412 | 11 |
| GLUD1P2 | 4.790063 | 0.43546 | 11 |
| ZC3H12D | 4.175176 | 0.379561 | 11 |
| RAD51B | 4.078728 | 0.370793 | 11 |
| CTBP2 | 3.650224 | 0.331839 | 11 |
| ACOT7 | 4.879087 | 0.487909 | 10 |
| TSPAN4 | 4.690828 | 0.469083 | 10 |
| NR2F1-AS1 | 4.247365 | 0.424737 | 10 |
| SH3RF3 | 4.173414 | 0.417341 | 10 |
| ATP11A | 7.025335 | 0.780593 | 9 |
| SND1 | 6.735886 | 0.748432 | 9 |
| ADAMTS2 | 6.151802 | 0.683534 | 9 |
| AXIN2 | 5.23349 | 0.581499 | 9 |
| TSPAN9 | 5.193186 | 0.577021 | 9 |
| KAZN | 4.72919 | 0.525466 | 9 |
| RUNX1 | 4.116735 | 0.457415 | 9 |
| NOTCH1 | 3.965165 | 0.440574 | 9 |
| CACNA2D4 | 3.931642 | 0.436849 | 9 |
| ASAP1 | 3.624512 | 0.402724 | 9 |
| LHX4 | 10.1066 | 1.263325 | 8 |
| RGS20 | 4.895937 | 0.611992 | 8 |
| MSRA | 4.804917 | 0.600615 | 8 |
| LINC00311 | 4.611899 | 0.576487 | 8 |
| DLEU1 | 4.342586 | 0.542823 | 8 |
| PPP2R2B | 3.963711 | 0.495464 | 8 |
| NAV1 | 4.892823 | 0.698975 | 7 |
| DUSP6 | 4.672967 | 0.667567 | 7 |
| CPQ | 3.824497 | 0.637416 | 6 |
| CRADD | 3.798747 | 0.633124 | 6 |
| MIR100HG | 3.683164 | 0.613861 | 6 |
| TSNAX-DISC1 | 5.490268 | 1.098054 | 5 |
| ARHGEF7 | 4.757762 | 0.951552 | 5 |
| RUNDC3A | 3.670234 | 0.734047 | 5 |
| RBMS3 | 3.732722 | 0.933181 | 4 |
| DTNA | 3.700063 | 0.925016 | 4 |
| DAGLB | 3.795143 | 1.265048 | 3 |
| GRIN2B | 3.695401 | 1.2318 | 3 |
| SOX10 | 4.134033 | 2.067016 | 2 |
| SLC25A10 | 4.098196 | 2.049098 | 2 |
| ANKLE2 | 3.947945 | 1.973972 | 2 |

TABLE 87
Cancer Type HGNET_BEND2

| Gene site | imp_sum | imp_mean | n |
|---|---|---|---|
| PTPRN2 | 11.65657 | 0.142153 | 82 |
| PRDM16 | 12.43657 | 0.175163 | 71 |
| PCDHGA1 | 4.072552 | 0.069026 | 59 |
| PCDHGA2 | 3.756166 | 0.065898 | 57 |
| PCDHGA3 | 3.756166 | 0.069559 | 54 |
| PCDHGB1 | 3.756166 | 0.070871 | 53 |
| PCDHGA4 | 3.756166 | 0.07365 | 51 |
| PCDHGB2 | 3.43978 | 0.0702 | 49 |
| PCDHGA5 | 3.43978 | 0.073187 | 47 |
| PCDHGB3 | 3.123394 | 0.072637 | 43 |
| HDAC4 | 9.431211 | 0.254898 | 37 |
| PAX6 | 8.609217 | 0.245978 | 35 |
| RBFOX3 | 5.355051 | 0.153001 | 35 |
| DIP2C | 8.138146 | 0.254317 | 32 |
| SOX2-OT | 4.38671 | 0.151266 | 29 |
| GALNT9 | 3.528299 | 0.130678 | 27 |
| ADARB2 | 4.905996 | 0.188692 | 26 |
| CAMTA1 | 5.38565 | 0.215426 | 25 |
| AGAP1 | 5.293279 | 0.211731 | 25 |
| PDGFRA | 5.028399 | 0.201136 | 25 |
| SATB2 | 5.258892 | 0.219121 | 24 |
| NXN | 8.321484 | 0.361804 | 23 |
| RPTOR | 5.518358 | 0.239929 | 23 |
| RIMBP2 | 3.241004 | 0.140913 | 23 |
| PRKCZ | 6.480769 | 0.29458 | 22 |
| SKI | 4.733328 | 0.225397 | 21 |
| FRMD4A | 5.660585 | 0.283029 | 20 |
| ABR | 5.165881 | 0.258294 | 20 |
| SDK1 | 2.552309 | 0.127615 | 20 |
| MAD1L1 | 9.370734 | 0.493197 | 19 |
| ZNF423 | 6.724885 | 0.353941 | 19 |
| KCNQ1 | 3.554033 | 0.187054 | 19 |
| CASZ1 | 3.474681 | 0.182878 | 19 |
| SMG1P2 | 3.135122 | 0.165006 | 19 |
| BOLA2 | 3.135122 | 0.165006 | 19 |
| LOC613038 | 3.135122 | 0.165006 | 19 |
| SEPTIN9 | 5.11153 | 0.283974 | 18 |
| FOXK1 | 3.764631 | 0.209146 | 18 |
| RBFOX1 | 3.750624 | 0.208368 | 18 |
| TBC1D16 | 3.252347 | 0.180686 | 18 |
| ANKRD11 | 2.628618 | 0.146034 | 18 |
| FOXP1 | 4.369803 | 0.273113 | 16 |
| ZBTB20 | 4.816536 | 0.321102 | 15 |
| BAIAP2 | 4.473171 | 0.298211 | 15 |
| GLI2 | 3.099998 | 0.206667 | 15 |
| CUX1 | 4.203818 | 0.300273 | 14 |
| RPS6KA2 | 4.011043 | 0.286503 | 14 |
| PRKAG2 | 3.903697 | 0.278835 | 14 |
| IQSEC1 | 2.754749 | 0.196768 | 14 |
| MSI2 | 5.503119 | 0.423317 | 13 |
| RFX4 | 4.552872 | 0.350221 | 13 |
| MYTIL | 3.535586 | 0.271968 | 13 |
| CLYBL | 2.869046 | 0.220696 | 13 |
| TNS3 | 6.128524 | 0.51071 | 12 |
| CMIP | 4.165661 | 0.347138 | 12 |
| ADGRD1 | 3.521824 | 0.293485 | 12 |
| MEGF6 | 3.426526 | 0.285544 | 12 |
| GNA12 | 2.844038 | 0.237003 | 12 |
| SPON2 | 4.630129 | 0.420921 | 11 |
| ZC3H12D | 3.845786 | 0.349617 | 11 |
| TBCD | 2.7058 | 0.245982 | 11 |
| TSPAN4 | 3.978882 | 0.397888 | 10 |
| CHST11 | 3.670097 | 0.36701 | 10 |
| AUTS2 | 3.093549 | 0.309355 | 10 |
| NR2F1-AS1 | 3.03703 | 0.303703 | 10 |
| ACOT7 | 3.002526 | 0.300253 | 10 |
| LMF1 | 2.675611 | 0.267561 | 10 |
| ATP11A | 5.470725 | 0.607858 | 9 |
| SND1 | 5.344849 | 0.593872 | 9 |
| ADAMTS2 | 3.427103 | 0.380789 | 9 |
| KAZN | 3.061964 | 0.340218 | 9 |
| CACNA2D4 | 2.703012 | 0.300335 | 9 |
| AXIN2 | 2.666413 | 0.296268 | 9 |
| TSPAN9 | 2.628527 | 0.292059 | 9 |
| DLEU1 | 4.043543 | 0.505443 | 8 |
| LHX4 | 4.02215 | 0.502769 | 8 |
| DNMT3A | 3.144953 | 0.393119 | 8 |
| PPP2R2B | 3.102758 | 0.387845 | 8 |
| MACROD1 | 3.028968 | 0.378621 | 8 |
| AFF3 | 2.958851 | 0.369856 | 8 |
| DLX5 | 2.698816 | 0.337352 | 8 |
| TRIM2 | 3.572583 | 0.510369 | 7 |
| NAV1 | 3.009561 | 0.429937 | 7 |
| C19orf25 | 2.80825 | 0.401179 | 7 |
| LHX2 | 2.68695 | 0.38385 | 7 |
| FAM181A | 3.475105 | 0.579184 | 6 |
| SATB2-AS1 | 3.344044 | 0.557341 | 6 |
| CELSR1 | 3.153194 | 0.525532 | 6 |
| FMNL2 | 3.035279 | 0.50588 | 6 |
| DNAJC17 | 2.948643 | 0.491441 | 6 |
| LRRFIP1 | 2.732459 | 0.45541 | 6 |
| TSNAX-DISC1 | 3.759786 | 0.751957 | 5 |
| ARHGEF7 | 3.698422 | 0.739684 | 5 |
| BCAR1 | 2.750124 | 0.550025 | 5 |
| NPHP4 | 2.647374 | 0.529475 | 5 |
| VOPP1 | 2.754547 | 0.688637 | 4 |
| EXT1 | 2.639232 | 0.659808 | 4 |
| GRIN2B | 3.046582 | 1.015527 | 3 |
| DAGLB | 2.845096 | 0.948365 | 3 |
| SOX10 | 3.388138 | 1.694069 | 2 |

TABLE 88
Cancer Type HGNET_CXXC5

| Gene site | imp_sum | imp_mean | n |
|---|---|---|---|
| PTPRN2 | 2.49268 | 0.030399 | 82 |
| PRDM16 | 8.149901 | 0.114787 | 71 |
| PCDHGA1 | 1.396595 | 0.023671 | 59 |
| PCDHGA2 | 1.396595 | 0.024502 | 57 |
| PCDHGA3 | 1.396595 | 0.025863 | 54 |
| PCDHGB1 | 1.396595 | 0.026351 | 53 |
| PCDHGA4 | 1.396595 | 0.027384 | 51 |
| PCDHGB2 | 1.396595 | 0.028502 | 49 |
| PCDHGA5 | 1.396595 | 0.029715 | 47 |
| PCDHGB3 | 1.396595 | 0.032479 | 43 |
| PCDHGA6 | 1.396595 | 0.034915 | 40 |
| HDAC4 | 6.832493 | 0.184662 | 37 |
| PCDHGA7 | 1.396595 | 0.037746 | 37 |
| PAX6 | 2.536371 | 0.072468 | 35 |
| DIP2C | 2.990636 | 0.093457 | 32 |
| SOX2-OT | 1.396595 | 0.048158 | 29 |
| ADARB2 | 1.396595 | 0.053715 | 26 |
| CAMTA1 | 3.160176 | 0.126407 | 25 |
| AGAP1 | 2.907156 | 0.116286 | 25 |
| NXN | 2.882371 | 0.12532 | 23 |
| INPP5A | 2.303654 | 0.100159 | 23 |
| NCOR2 | 1.836913 | 0.079866 | 23 |
| SKI | 4.368183 | 0.208009 | 21 |
| ABR | 3.446806 | 0.17234 | 20 |
| SDK1 | 2.216034 | 0.110802 | 20 |
| MAD1L1 | 3.129601 | 0.164716 | 19 |
| ZNF423 | 2.543212 | 0.133853 | 19 |
| KCNQ1 | 1.500359 | 0.078966 | 19 |
| TBC1D16 | 2.402423 | 0.133468 | 18 |
| FOXK1 | 2.33257 | 0.129587 | 18 |
| MCF2L | 1.418762 | 0.07882 | 18 |
| SEPTIN9 | 1.396595 | 0.077589 | 18 |
| OPCML | 2.399511 | 0.141148 | 17 |
| EBF3 | 2.809053 | 0.175566 | 16 |
| FOXP1 | 1.790086 | 0.11188 | 16 |
| GLI2 | 2.267675 | 0.151178 | 15 |
| NFATC1 | 1.58193 | 0.105462 | 15 |
| SLX1B- | 1.518958 | 0.101264 | 15 |
| SULT1A4 | | | |
| SLX1A | 1.518958 | 0.101264 | 15 |
| LOC606724 | 1.518958 | 0.101264 | 15 |
| RPS6KA2 | 2.496148 | 0.178296 | 14 |
| CUX1 | 1.532479 | 0.109463 | 14 |
| GSE1 | 2.132961 | 0.164074 | 13 |
| MSI2 | 2.033189 | 0.156399 | 13 |
| MYTIL | 1.337815 | 0.102909 | 13 |
| CMIP | 1.709623 | 0.142469 | 12 |
| MIRLET7BHG | 1.69019 | 0.140849 | 12 |
| CSMD1 | 1.492681 | 0.12439 | 12 |
| FBRSL1 | 1.472528 | 0.122711 | 12 |
| VGLLA | 1.298956 | 0.118087 | 11 |
| GRID1 | 1.743341 | 0.174334 | 10 |
| GAS7 | 1.704292 | 0.170429 | 10 |
| RGS12 | 1.392098 | 0.13921 | 10 |
| ATP11A | 1.748129 | 0.194237 | 9 |
| ADAMTS2 | 1.58545 | 0.176161 | 9 |
| ASAP1 | 1.516276 | 0.168475 | 9 |
| TSPAN9 | 1.397071 | 0.15523 | 9 |
| SND1 | 1.289476 | 0.143275 | 9 |
| TRAPPC12 | 1.279397 | 0.142155 | 9 |
| AFF3 | 1.779233 | 0.222404 | 8 |
| SMAD3 | 1.598138 | 0.199767 | 8 |
| LINC00311 | 1.476182 | 0.184523 | 8 |
| DLEU1 | 1.384494 | 0.173062 | 8 |
| GAK | 1.678084 | 0.239726 | 7 |
| C19orf25 | 1.61115 | 0.230164 | 7 |
| CDYL | 1.563736 | 0.223391 | 7 |
| TBR1 | 1.392098 | 0.198871 | 7 |
| KDM4B | 2.065877 | 0.344313 | 6 |
| PSD3 | 1.622697 | 0.270449 | 6 |
| MIR100HG | 1.529752 | 0.254959 | 6 |
| SLC22A18AS | 1.517593 | 0.252932 | 6 |
| GPR39 | 1.482671 | 0.247112 | 6 |
| LRRFIP1 | 1.396987 | 0.232831 | 6 |
| CCDC177 | 1.387906 | 0.231318 | 6 |
| MYO16 | 1.381014 | 0.230169 | 6 |
| EPHB1 | 1.286386 | 0.214398 | 6 |
| TSNAX-DISC1 | 1.85738 | 0.371476 | 5 |
| ARHGEF7 | 1.687341 | 0.337468 | 5 |
| CABLES1 | 1.527647 | 0.305529 | 5 |
| TK1 | 1.518958 | 0.303792 | 5 |
| THRB | 1.497338 | 0.299468 | 5 |
| RNLS | 1.387906 | 0.277581 | 5 |
| CASP8 | 1.387906 | 0.277581 | 5 |
| TEAD1 | 1.307323 | 0.261465 | 5 |
| MAPK8IP3 | 2.130606 | 0.532651 | 4 |
| EDNRB | 1.881066 | 0.470266 | 4 |
| FOXO1 | 1.546283 | 0.386571 | 4 |
| STOX2 | 1.40626 | 0.351565 | 4 |
| LINC00856 | 1.396128 | 0.349032 | 4 |
| VOPP1 | 1.383603 | 0.345901 | 4 |
| NDST1 | 1.316257 | 0.329064 | 4 |
| MYT1 | 1.303009 | 0.325752 | 4 |
| EPAS1 | 1.841716 | 0.613905 | 3 |
| DICER1 | 1.56627 | 0.52209 | 3 |
| SLC6A9 | 1.450121 | 0.483374 | 3 |
| DAGLB | 1.305795 | 0.435265 | 3 |
| SLC25A10 | 1.882719 | 0.94136 | 2 |
| SOX10 | 1.72484 | 0.86242 | 2 |
| UFSP2 | 1.653183 | 0.826591 | 2 |
| DISC1 | 1.330762 | 0.665381 | 2 |

TABLE 89
Cancer Type HGNET_ND_B

| Gene site | imp_sum | imp_mean | n |
|---|---|---|---|
| PTPRN2 | 11.57447 | 0.141152 | 82 |
| PRDM16 | 4.038915 | 0.056886 | 71 |
| PCDHGA1 | 3.488665 | 0.05913 | 59 |
| PCDHGA2 | 3.488665 | 0.061205 | 57 |
| PCDHGA3 | 3.172279 | 0.058746 | 54 |
| PCDHGB1 | 3.172279 | 0.059854 | 53 |
| PCDHGA4 | 2.855893 | 0.055998 | 51 |
| PCDHGB2 | 2.855893 | 0.058284 | 49 |
| PCDHGA5 | 2.223121 | 0.0473 | 47 |
| HDAC4 | 6.376827 | 0.172347 | 37 |
| PAX6 | 5.147216 | 0.147063 | 35 |
| RBFOX3 | 4.611426 | 0.131755 | 35 |
| DIP2C | 6.615504 | 0.206735 | 32 |
| PCDHGB5 | 2.223121 | 0.069473 | 32 |
| PCDHGA9 | 2.223121 | 0.071714 | 31 |
| SOX2-OT | 4.323853 | 0.149098 | 29 |
| SHANK2 | 2.334295 | 0.089781 | 26 |
| AGAP1 | 4.297918 | 0.171917 | 25 |
| PDGFRA | 3.281884 | 0.131275 | 25 |
| CAMTA1 | 3.235869 | 0.129435 | 25 |
| MEIS1 | 6.112786 | 0.254699 | 24 |
| SATB2 | 3.003986 | 0.125166 | 24 |
| RPTOR | 4.919096 | 0.213874 | 23 |
| INPP5A | 2.831969 | 0.123129 | 23 |
| PRKCZ | 3.058304 | 0.139014 | 22 |
| SKI | 5.751564 | 0.273884 | 21 |
| FRMD4A | 3.997671 | 0.199884 | 20 |
| SDK1 | 2.415599 | 0.12078 | 20 |
| MAD1L1 | 5.24362 | 0.27598 | 19 |
| ZNF423 | 4.461305 | 0.234806 | 19 |
| SMG1P2 | 3.210425 | 0.16897 | 19 |
| BOLA2 | 3.210425 | 0.16897 | 19 |
| LOC613038 | 3.210425 | 0.16897 | 19 |
| CASZ1 | 2.630815 | 0.138464 | 19 |
| FOXK1 | 4.570601 | 0.253922 | 18 |
| MCF2L | 3.630234 | 0.20168 | 18 |
| SEPTIN9 | 3.195472 | 0.177526 | 18 |
| OPCML | 6.284087 | 0.369652 | 17 |
| TBX15 | 4.028118 | 0.236948 | 17 |
| NAV2 | 2.630111 | 0.164382 | 16 |
| FOXP1 | 2.224576 | 0.139036 | 16 |
| GLI2 | 5.770352 | 0.38469 | 15 |
| BAIAP2 | 4.016603 | 0.267774 | 15 |
| ZBTB20 | 2.599909 | 0.173327 | 15 |
| MIR548F5 | 3.480232 | 0.248588 | 14 |
| RPS6KA2 | 2.764372 | 0.197455 | 14 |
| CUX1 | 2.612496 | 0.186607 | 14 |
| PRKAG2 | 2.487324 | 0.177666 | 14 |
| MSI2 | 3.219484 | 0.247653 | 13 |
| MYTIL | 2.901918 | 0.223224 | 13 |
| SPTBN4 | 2.502449 | 0.192496 | 13 |
| CMIP | 4.42819 | 0.369016 | 12 |
| MIRLET7BHG | 2.426833 | 0.202236 | 12 |
| VGLLA | 5.39493 | 0.490448 | 11 |
| GLUD1P2 | 2.888543 | 0.262595 | 11 |
| CACNA1C | 2.659495 | 0.241772 | 11 |
| ATP11A | 3.97013 | 0.441126 | 9 |
| ADAMTS2 | 3.669879 | 0.407764 | 9 |
| AXIN2 | 3.418227 | 0.379803 | 9 |
| RUNX1 | 3.347958 | 0.371995 | 9 |
| SND1 | 3.134135 | 0.348237 | 9 |
| NOTCH1 | 2.670621 | 0.296736 | 9 |
| ASAP1 | 2.47974 | 0.275527 | 9 |
| CACNB2 | 2.449655 | 0.272184 | 9 |
| TRAPPC12 | 2.194112 | 0.24379 | 9 |
| GRIK2 | 6.924673 | 0.865584 | 8 |
| LINC00311 | 2.704552 | 0.338069 | 8 |
| ASPSCR1 | 2.620689 | 0.327586 | 8 |
| MBP | 2.552522 | 0.319065 | 8 |
| ESRRG | 2.400991 | 0.300124 | 8 |
| NR2E1 | 2.262175 | 0.282772 | 8 |
| NAV1 | 3.393725 | 0.484818 | 7 |
| DUSP6 | 2.942372 | 0.420339 | 7 |
| ADAMTS17 | 2.832985 | 0.404712 | 7 |
| TBR1 | 2.483161 | 0.354737 | 7 |
| LINC00461 | 2.476002 | 0.353715 | 7 |
| VPS13D | 2.406937 | 0.343848 | 7 |
| SOX6 | 2.305773 | 0.329396 | 7 |
| ITPKB | 2.303968 | 0.329138 | 7 |
| SLC22A18AS | 2.76306 | 0.46051 | 6 |
| FBXL18 | 2.717941 | 0.45299 | 6 |
| COQ8A | 2.380451 | 0.396742 | 6 |
| LIMCH1 | 2.275298 | 0.379216 | 6 |
| FMNL2 | 2.225253 | 0.370876 | 6 |
| RUNDC3A | 3.568779 | 0.713756 | 5 |
| GAREM2 | 2.432091 | 0.486418 | 5 |
| TK1 | 2.28875 | 0.45775 | 5 |
| TSNAX-DISC1 | 2.244638 | 0.448928 | 5 |
| ARHGEF7 | 2.206025 | 0.441205 | 5 |
| NFIB | 4.010649 | 1.002662 | 4 |
| DTNA | 3.340887 | 0.835222 | 4 |
| ONECUT2 | 3.070253 | 0.767563 | 4 |
| STAP2 | 2.550313 | 0.637578 | 4 |
| RBMS3 | 2.471495 | 0.617874 | 4 |
| SASH1 | 2.315015 | 0.578754 | 4 |
| GRIN2B | 3.638806 | 1.212935 | 3 |
| DAGLB | 2.323308 | 0.774436 | 3 |
| LOXL3 | 2.31565 | 0.771883 | 3 |
| TTC12 | 2.28273 | 0.76091 | 3 |
| MAP2K3 | 2.157708 | 1.078854 | 2 |

TABLE 90
Cancer Type HGNET_ND_C

| Gene site | imp_sum | imp_mean | n |
|---|---|---|---|
| PTPRN2 | 9.737831 | 0.118754 | 82 |
| PRDM16 | 5.153874 | 0.07259 | 71 |
| HDAC4 | 4.968572 | 0.134286 | 37 |
| RBFOX3 | 5.080853 | 0.145167 | 35 |
| PAX6 | 4.020079 | 0.114859 | 35 |
| DIP2C | 4.067567 | 0.127111 | 32 |
| SOX2-OT | 5.505808 | 0.189855 | 29 |
| ADARB2 | 4.089054 | 0.157271 | 26 |
| SHANK2 | 3.054717 | 0.117489 | 26 |
| AGAP1 | 6.291578 | 0.251663 | 25 |
| CAMTA1 | 2.683617 | 0.107345 | 25 |
| PDGFRA | 2.01336 | 0.080534 | 25 |
| SATB2 | 4.086095 | 0.170254 | 24 |
| RPTOR | 4.202601 | 0.182722 | 23 |
| INPP5A | 2.531088 | 0.110047 | 23 |
| NCOR2 | 2.446499 | 0.10637 | 23 |
| PRKCZ | 3.53049 | 0.160477 | 22 |
| SKI | 4.931482 | 0.234832 | 21 |
| FRMD4A | 3.027059 | 0.151353 | 20 |
| MAD1L1 | 5.636523 | 0.296659 | 19 |
| KCNQ1 | 2.847474 | 0.149867 | 19 |
| ZNF423 | 2.584632 | 0.136033 | 19 |
| SEPTIN9 | 6.304789 | 0.350266 | 18 |
| FOXK1 | 2.265772 | 0.125876 | 18 |
| RBFOX1 | 1.710245 | 0.095014 | 18 |
| FOXP1 | 3.143963 | 0.196498 | 16 |
| SORBS2 | 2.899457 | 0.181216 | 16 |
| EBF3 | 2.255027 | 0.140939 | 16 |
| GLI2 | 3.951824 | 0.263455 | 15 |
| ZBTB20 | 2.759924 | 0.183995 | 15 |
| NFATC1 | 2.025083 | 0.135006 | 15 |
| CUX1 | 2.824382 | 0.201742 | 14 |
| IQSEC1 | 2.472231 | 0.176588 | 14 |
| ARHGEF10 | 2.345753 | 0.167554 | 14 |
| RPS6KA2 | 2.249066 | 0.160648 | 14 |
| PRKAG2 | 2.103343 | 0.150239 | 14 |
| C7orf50 | 1.875874 | 0.133991 | 14 |
| MYTIL | 2.655877 | 0.204298 | 13 |
| MIR9-3HG | 2.582158 | 0.198628 | 13 |
| KIF26B | 1.803358 | 0.13872 | 13 |
| MSI2 | 1.769056 | 0.136081 | 13 |
| ZC3H3 | 3.083274 | 0.256939 | 12 |
| CMIP | 3.058493 | 0.254874 | 12 |
| RASA3 | 2.896784 | 0.241399 | 12 |
| TBX4 | 2.123167 | 0.176931 | 12 |
| TNS3 | 1.935834 | 0.161319 | 12 |
| CTNNA2 | 1.926265 | 0.160522 | 12 |
| TBCD | 2.487809 | 0.226164 | 11 |
| RAD51B | 1.82219 | 0.165654 | 11 |
| AKAP13 | 2.800951 | 0.280095 | 10 |
| CHST11 | 2.72077 | 0.272077 | 10 |
| BCL11B | 2.6064 | 0.26064 | 10 |
| ACOT7 | 2.500636 | 0.250064 | 10 |
| LBX1-AS1 | 2.461608 | 0.246161 | 10 |
| KLHL29 | 2.348852 | 0.234885 | 10 |
| ETS1 | 1.756824 | 0.175682 | 10 |
| ATP11A | 3.391144 | 0.376794 | 9 |
| RUNX1 | 3.20046 | 0.355607 | 9 |
| ASAP1 | 2.892005 | 0.321334 | 9 |
| NOTCH1 | 2.535825 | 0.281758 | 9 |
| APBA2 | 1.926545 | 0.214061 | 9 |
| PAX3 | 1.841296 | 0.204588 | 9 |
| SND1 | 1.791119 | 0.199013 | 9 |
| KCNMA1 | 1.738471 | 0.193163 | 9 |
| SSBP3 | 1.731396 | 0.192377 | 9 |
| AXIN2 | 1.717771 | 0.190863 | 9 |
| MACROD1 | 3.289917 | 0.41124 | 8 |
| MSRA | 2.995025 | 0.374378 | 8 |
| BAHCC1 | 2.627357 | 0.32842 | 8 |
| LINC00311 | 2.386556 | 0.29832 | 8 |
| VRK2 | 1.942024 | 0.242753 | 8 |
| AFF3 | 1.797905 | 0.224738 | 8 |
| TRAPPC9 | 1.776346 | 0.222043 | 8 |
| SYNJ2 | 1.77498 | 0.221872 | 8 |
| DUSP6 | 3.619583 | 0.517083 | 7 |
| RBMS1 | 1.893431 | 0.27049 | 7 |
| PRKCA | 1.810447 | 0.258635 | 7 |
| TRIM2 | 1.810327 | 0.258618 | 7 |
| ZNF664-RFLNA | 1.796796 | 0.256685 | 7 |
| CXXC5 | 1.764596 | 0.252085 | 7 |
| FBXL18 | 2.644251 | 0.440709 | 6 |
| SLC22A18AS | 2.461434 | 0.410239 | 6 |
| TG | 2.157854 | 0.359642 | 6 |
| SATB2-AS1 | 2.04251 | 0.340418 | 6 |
| HOXD4 | 1.836799 | 0.306133 | 6 |
| SRGAP3 | 1.739316 | 0.289886 | 6 |
| ARHGEF7 | 2.395104 | 0.479021 | 5 |
| BCAR1 | 1.866178 | 0.373236 | 5 |
| PRR5L | 1.74963 | 0.349926 | 5 |
| SASH1 | 2.149578 | 0.537394 | 4 |
| VOPP1 | 1.976727 | 0.494182 | 4 |
| RBMS3 | 1.940124 | 0.485031 | 4 |
| ACOX3 | 1.719939 | 0.429985 | 4 |
| GRIN2B | 3.178745 | 1.059582 | 3 |
| DICER1 | 2.067448 | 0.689149 | 3 |
| SLC6A9 | 1.970891 | 0.656964 | 3 |
| IFFO1 | 1.811975 | 0.603992 | 3 |
| EPAS1 | 1.765209 | 0.588403 | 3 |
| SOX10 | 3.343898 | 1.671949 | 2 |
| KIF21B | 1.814686 | 0.907343 | 2 |

TABLE 91
Cancer Type HGNET_ND_D

| Gene site | imp_sum | imp_mean | n |
|---|---|---|---|
| PTPRN2 | 9.864449 | 0.120298 | 82 |
| PRDM16 | 9.259115 | 0.13041 | 71 |
| PCDHGA1 | 3.439024 | 0.058289 | 59 |
| PCDHGA2 | 3.439024 | 0.060334 | 57 |
| PCDHGA3 | 3.014547 | 0.055825 | 54 |
| PCDHGB1 | 3.014547 | 0.056878 | 53 |
| PCDHGA4 | 3.014547 | 0.059109 | 51 |
| PCDHGB2 | 3.014547 | 0.061521 | 49 |
| PCDHGA5 | 3.014547 | 0.064139 | 47 |
| PCDHGB3 | 3.014547 | 0.070106 | 43 |
| PCDHGA6 | 3.014547 | 0.075364 | 40 |
| HDAC4 | 6.917241 | 0.186952 | 37 |
| PCDHGA7 | 2.698161 | 0.072923 | 37 |
| PAX6 | 6.524986 | 0.186428 | 35 |
| RBFOX3 | 3.342572 | 0.095502 | 35 |
| PCDHGB4 | 2.381775 | 0.068051 | 35 |
| PCDHGA8 | 2.381775 | 0.068051 | 35 |
| DIP2C | 7.027478 | 0.219609 | 32 |
| PCDHGB5 | 2.357303 | 0.073666 | 32 |
| SOX2-OT | 4.8712 | 0.167972 | 29 |
| GALNT9 | 2.278284 | 0.084381 | 27 |
| SHANK2 | 2.623623 | 0.100909 | 26 |
| AGAP1 | 5.019296 | 0.200772 | 25 |
| PDGFRA | 4.475775 | 0.179031 | 25 |
| CAMTA1 | 3.807931 | 0.152317 | 25 |
| MEIS1 | 2.889276 | 0.120387 | 24 |
| SATB2 | 2.52298 | 0.105124 | 24 |
| RPTOR | 5.902472 | 0.256629 | 23 |
| NCOR2 | 2.516777 | 0.109425 | 23 |
| PRKCZ | 3.91809 | 0.178095 | 22 |
| SKI | 5.236337 | 0.249349 | 21 |
| FRMD4A | 4.373247 | 0.218662 | 20 |
| MAD1L1 | 6.162868 | 0.324361 | 19 |
| SMG1P2 | 3.647932 | 0.191996 | 19 |
| BOLA2 | 3.647932 | 0.191996 | 19 |
| LOC613038 | 3.647932 | 0.191996 | 19 |
| ZNF423 | 3.494232 | 0.183907 | 19 |
| CASZ1 | 2.658986 | 0.139947 | 19 |
| SEPTIN9 | 3.617041 | 0.200947 | 18 |
| MCF2L | 3.531901 | 0.196217 | 18 |
| FOXK1 | 3.184272 | 0.176904 | 18 |
| ANKRD11 | 2.73067 | 0.151704 | 18 |
| FOXP1 | 4.188119 | 0.261757 | 16 |
| ZBTB20 | 2.583813 | 0.172254 | 15 |
| GLI2 | 2.570217 | 0.171348 | 15 |
| RPS6KA2 | 4.104399 | 0.293171 | 14 |
| CUX1 | 3.949712 | 0.282122 | 14 |
| C7orf50 | 3.928659 | 0.280619 | 14 |
| IQSEC1 | 3.089471 | 0.220677 | 14 |
| TBX5 | 2.692247 | 0.192303 | 14 |
| GNG7 | 2.415288 | 0.172521 | 14 |
| MSI2 | 3.746287 | 0.288176 | 13 |
| MYT1L | 3.666093 | 0.282007 | 13 |
| SPTBN4 | 2.632143 | 0.202473 | 13 |
| CMIP | 3.366597 | 0.28055 | 12 |
| FBRSL1 | 2.872354 | 0.239363 | 12 |
| CTBP2 | 3.574491 | 0.324954 | 11 |
| VGLLA | 3.287994 | 0.298909 | 11 |
| SPON2 | 2.968323 | 0.269848 | 11 |
| GLUD1P2 | 2.744848 | 0.249532 | 11 |
| ZC3H12D | 2.33304 | 0.212095 | 11 |
| RAD51B | 2.318825 | 0.210802 | 11 |
| CHST11 | 3.437065 | 0.343707 | 10 |
| ACOT7 | 3.064985 | 0.306499 | 10 |
| NTM | 2.596398 | 0.25964 | 10 |
| ATP11A | 3.703061 | 0.411451 | 9 |
| SND1 | 2.984411 | 0.331601 | 9 |
| PACS2 | 2.978543 | 0.330949 | 9 |
| ADAMTS2 | 2.841953 | 0.315773 | 9 |
| RUNX1 | 2.765462 | 0.307274 | 9 |
| SSBP3 | 2.762278 | 0.30692 | 9 |
| TRAPPC12 | 2.469924 | 0.274436 | 9 |
| CACNA2D4 | 2.321527 | 0.257947 | 9 |
| TSPAN9 | 2.300269 | 0.255585 | 9 |
| NR2E1 | 2.795337 | 0.349417 | 8 |
| DLEU1 | 2.774543 | 0.346818 | 8 |
| MSRA | 2.533345 | 0.316668 | 8 |
| ESRRG | 2.476585 | 0.309573 | 8 |
| SYNJ2 | 2.466121 | 0.308265 | 8 |
| LINC00461 | 3.138709 | 0.448387 | 7 |
| FBXL18 | 3.766261 | 0.62771 | 6 |
| PVT1 | 2.654909 | 0.442485 | 6 |
| COQ8A | 2.392082 | 0.39868 | 6 |
| FMNL2 | 2.28478 | 0.380797 | 6 |
| RUNDC3A | 3.898227 | 0.779645 | 5 |
| ARHGEF7 | 3.104328 | 0.620866 | 5 |
| PRR5L | 2.514518 | 0.502904 | 5 |
| TGFB3 | 2.282278 | 0.456456 | 5 |
| STOX2 | 2.85666 | 0.714165 | 4 |
| RBMS3 | 2.687846 | 0.671961 | 4 |
| VOPP1 | 2.621298 | 0.655325 | 4 |
| SASH1 | 2.344511 | 0.586128 | 4 |
| PRDM2 | 3.809634 | 1.269878 | 3 |
| THRA | 3.34908 | 1.11636 | 3 |
| GRIN2B | 2.508702 | 0.836234 | 3 |
| DAGLB | 2.390514 | 0.796838 | 3 |
| CNP | 2.335046 | 0.778349 | 3 |
| SOX10 | 3.171381 | 1.585691 | 2 |
| DENND11 | 2.860855 | 1.430428 | 2 |
| NR1D1 | 2.395607 | 1.197804 | 2 |

TABLE 92
Cancer Type HGNET_PATZ

| Gene site | imp_sum | imp_mean | n |
|---|---|---|---|
| PTPRN2 | 17.14336 | 0.209065 | 82 |
| PRDM16 | 12.51692 | 0.176295 | 71 |
| PCDHGA1 | 3.803542 | 0.064467 | 59 |
| PCDHGB2 | 3.487156 | 0.071166 | 49 |
| PCDHGA5 | 3.933456 | 0.083691 | 47 |
| PCDHGA6 | 3.648056 | 0.091201 | 40 |
| HDAC4 | 13.10879 | 0.354292 | 37 |
| RBFOX3 | 9.455681 | 0.270162 | 35 |
| PAX6 | 6.343311 | 0.181237 | 35 |
| DIP2C | 11.99765 | 0.374927 | 32 |
| SOX2-OT | 6.001773 | 0.206958 | 29 |
| GALNT9 | 5.841 | 0.216333 | 27 |
| SHANK2 | 6.679166 | 0.256891 | 26 |
| ADARB2 | 5.552845 | 0.213571 | 26 |
| AGAP1 | 6.78803 | 0.271521 | 25 |
| CAMTA1 | 5.56868 | 0.222747 | 25 |
| SATB2 | 4.700124 | 0.195839 | 24 |
| RPTOR | 10.83693 | 0.471171 | 23 |
| NCOR2 | 7.807486 | 0.339456 | 23 |
| RIMBP2 | 6.394636 | 0.278028 | 23 |
| HOXB3 | 4.338576 | 0.188634 | 23 |
| NXN | 3.893343 | 0.169276 | 23 |
| PRKCZ | 5.89598 | 0.267999 | 22 |
| SKI | 10.8308 | 0.515752 | 21 |
| SIM2 | 4.655035 | 0.221668 | 21 |
| ZIC4 | 4.491162 | 0.213865 | 21 |
| HOXA-AS3 | 3.87165 | 0.184364 | 21 |
| FRMD4A | 6.736049 | 0.336802 | 20 |
| ABR | 6.342327 | 0.317116 | 20 |
| SDK1 | 4.559424 | 0.227971 | 20 |
| ZNF423 | 10.68511 | 0.562374 | 19 |
| MAD1L1 | 7.895225 | 0.415538 | 19 |
| CASZ1 | 6.119203 | 0.322063 | 19 |
| SMG1P2 | 3.883388 | 0.204389 | 19 |
| BOLA2 | 3.883388 | 0.204389 | 19 |
| LOC613038 | 3.883388 | 0.204389 | 19 |
| CFAP46 | 3.554014 | 0.187053 | 19 |
| FOXK1 | 7.423561 | 0.41242 | 18 |
| TBC1D16 | 5.663698 | 0.31465 | 18 |
| ANKRD11 | 4.637601 | 0.257644 | 18 |
| SEPTIN9 | 4.478314 | 0.248795 | 18 |
| HOXA3 | 3.635087 | 0.201949 | 18 |
| OPCML | 6.252435 | 0.36779 | 17 |
| PAX6-AS1 | 3.625755 | 0.21328 | 17 |
| RCN1 | 3.625755 | 0.21328 | 17 |
| FOXP1 | 5.479421 | 0.342464 | 16 |
| NAV2 | 4.769675 | 0.298105 | 16 |
| EBF3 | 4.245607 | 0.26535 | 16 |
| GLI2 | 7.741287 | 0.516086 | 15 |
| NFIX | 6.705372 | 0.447025 | 15 |
| ZBTB20 | 4.563247 | 0.304216 | 15 |
| SLX1B-SULT1A4 | 4.240652 | 0.28271 | 15 |
| SLX1A | 4.240652 | 0.28271 | 15 |
| LOC606724 | 4.240652 | 0.28271 | 15 |
| EMX2OS | 4.236075 | 0.282405 | 15 |
| LRMDA | 3.883948 | 0.25893 | 15 |
| KIRREL3 | 3.505505 | 0.2337 | 15 |
| RPS6KA2 | 5.780924 | 0.412923 | 14 |
| ARHGEF10 | 4.310297 | 0.307878 | 14 |
| MSI2 | 6.201837 | 0.477064 | 13 |
| MYT1L | 3.912213 | 0.300939 | 13 |
| SPTBN4 | 3.634946 | 0.279611 | 13 |
| CMIP | 5.849535 | 0.487461 | 12 |
| ZC3H3 | 5.205313 | 0.433776 | 12 |
| MIRLET7BHG | 5.070343 | 0.422529 | 12 |
| TBX4 | 4.13671 | 0.344726 | 12 |
| TNS3 | 4.118458 | 0.343205 | 12 |
| RASA3 | 3.744375 | 0.312031 | 12 |
| ADGRD1 | 3.661597 | 0.305133 | 12 |
| ZC3H12D | 5.857201 | 0.532473 | 11 |
| FGFR2 | 4.244744 | 0.385886 | 11 |
| RAD51B | 3.665567 | 0.333233 | 11 |
| SPON2 | 3.504301 | 0.318573 | 11 |
| NR2F1-AS1 | 4.920196 | 0.49202 | 10 |
| TSPAN4 | 4.170382 | 0.417038 | 10 |
| ACOT7 | 4.133986 | 0.413399 | 10 |
| AKAP13 | 4.130958 | 0.413096 | 10 |
| MAML2 | 3.920929 | 0.392093 | 10 |
| ANKS1B | 3.577294 | 0.357729 | 10 |
| BCL11B | 3.50077 | 0.350077 | 10 |
| ATP11A | 5.634833 | 0.626093 | 9 |
| TRAPPC12 | 4.970254 | 0.55225 | 9 |
| SND1 | 4.610867 | 0.512319 | 9 |
| KCNH2 | 4.075902 | 0.452878 | 9 |
| AXIN2 | 4.011781 | 0.445753 | 9 |
| CACNA2D4 | 3.763396 | 0.418155 | 9 |
| ASAP1 | 3.633912 | 0.403768 | 9 |
| DLEU1 | 4.647124 | 0.58089 | 8 |
| MSRA | 4.295307 | 0.536913 | 8 |
| LHX4 | 4.246082 | 0.53076 | 8 |
| LINC00311 | 4.23156 | 0.528945 | 8 |
| SMAD3 | 4.093521 | 0.51169 | 8 |
| RORA | 3.917132 | 0.489642 | 8 |
| SHROOM3 | 3.593844 | 0.449231 | 8 |
| RGS20 | 3.52543 | 0.440679 | 8 |
| DUSP6 | 4.110106 | 0.587158 | 7 |
| RXRA | 3.917573 | 0.559653 | 7 |
| LINC00461 | 3.617164 | 0.516738 | 7 |
| TSNAX-DISC1 | 4.095521 | 0.819104 | 5 |
| BOC | 4.393729 | 1.098432 | 4 |

TABLE 93
Cancer Type HGNET_PLAG

| Gene site | imp_sum | imp_mean | n |
|---|---|---|---|
| PTPRN2 | 4.705472 | 0.057384 | 82 |
| PRDM16 | 4.475435 | 0.063034 | 71 |
| PCDHGB1 | 1.291057 | 0.02436 | 53 |
| PCDHGA4 | 1.291057 | 0.025315 | 51 |
| PCDHGB2 | 1.291057 | 0.026348 | 49 |
| PCDHGA5 | 1.291057 | 0.027469 | 47 |
| HDAC4 | 3.756115 | 0.101517 | 37 |
| PAX6 | 3.421466 | 0.097756 | 35 |
| RBFOX3 | 1.806047 | 0.051601 | 35 |
| DIP2C | 2.46776 | 0.077117 | 32 |
| AGAP1 | 1.871741 | 0.07487 | 25 |
| RPTOR | 2.933618 | 0.127549 | 23 |
| INPP5A | 2.125246 | 0.092402 | 23 |
| NCOR2 | 1.764604 | 0.076722 | 23 |
| SKI | 6.178051 | 0.294193 | 21 |
| SDK1 | 1.793089 | 0.089654 | 20 |
| MAD1L1 | 5.540848 | 0.291624 | 19 |
| ZNF423 | 3.343331 | 0.175965 | 19 |
| KCNQ1 | 1.373634 | 0.072297 | 19 |
| SEPTIN9 | 2.332394 | 0.129577 | 18 |
| TBC1D16 | 1.768886 | 0.098271 | 18 |
| PAX6-AS1 | 1.383236 | 0.081367 | 17 |
| RCN1 | 1.383236 | 0.081367 | 17 |
| EBF3 | 2.248947 | 0.140559 | 16 |
| NFIX | 2.486526 | 0.165768 | 15 |
| KIRREL3 | 1.58193 | 0.105462 | 15 |
| SLX1B-SULT1A4 | 1.49431 | 0.099621 | 15 |
| SLX1A | 1.49431 | 0.099621 | 15 |
| LOC606724 | 1.49431 | 0.099621 | 15 |
| KNDC1 | 1.392098 | 0.092807 | 15 |
| RPS6KA2 | 2.950333 | 0.210738 | 14 |
| C7orf50 | 2.75936 | 0.197097 | 14 |
| ARHGEF10 | 1.396595 | 0.099757 | 14 |
| MSI2 | 2.710296 | 0.208484 | 13 |
| MYT1L | 2.21453 | 0.170348 | 13 |
| RFX4 | 1.991563 | 0.153197 | 13 |
| CLYBL | 1.962564 | 0.150966 | 13 |
| SPTBN4 | 1.393859 | 0.10722 | 13 |
| CMIP | 1.761756 | 0.146813 | 12 |
| MEIS2 | 1.58193 | 0.131827 | 12 |
| TBX4 | 1.477921 | 0.12316 | 12 |
| VGLLA | 1.716353 | 0.156032 | 11 |
| TSPAN4 | 2.233461 | 0.223346 | 10 |
| AKAP13 | 1.799866 | 0.179987 | 10 |
| KLHL29 | 1.653739 | 0.165374 | 10 |
| GAS7 | 1.456932 | 0.145693 | 10 |
| AUTS2 | 1.444522 | 0.144452 | 10 |
| MAML2 | 1.387906 | 0.138791 | 10 |
| TSPAN9 | 3.080775 | 0.342308 | 9 |
| KCNH2 | 2.247511 | 0.249723 | 9 |
| ATP11A | 2.224048 | 0.247116 | 9 |
| EGFR | 2.140931 | 0.237881 | 9 |
| SND1 | 1.694061 | 0.188229 | 9 |
| TRAPPC12 | 1.641374 | 0.182375 | 9 |
| ADAMTS2 | 1.608443 | 0.178716 | 9 |
| KAZN | 1.458536 | 0.16206 | 9 |
| ASAP1 | 1.416927 | 0.157436 | 9 |
| CRISPLD2 | 2.200829 | 0.275104 | 8 |
| DNMT3A | 2.002498 | 0.250312 | 8 |
| NR2E1 | 1.708484 | 0.213561 | 8 |
| WWP2 | 1.690684 | 0.211335 | 8 |
| GCSAML | 1.58193 | 0.197741 | 8 |
| DLEU1 | 1.363563 | 0.170445 | 8 |
| C19orf25 | 1.875902 | 0.267986 | 7 |
| RXRA | 1.470451 | 0.210064 | 7 |
| SRGAP3 | 2.643332 | 0.440555 | 6 |
| LYPD1 | 2.531618 | 0.421936 | 6 |
| SLC22A18AS | 2.126474 | 0.354412 | 6 |
| NKD2 | 1.794592 | 0.299099 | 6 |
| LPIN1 | 1.712981 | 0.285497 | 6 |
| CYBA | 1.624883 | 0.270814 | 6 |
| FBXL18 | 1.483841 | 0.247307 | 6 |
| CRACR2A | 1.383259 | 0.230543 | 6 |
| ROR1 | 1.368682 | 0.228114 | 6 |
| RUNDC3A | 2.833298 | 0.56666 | 5 |
| BACH2 | 2.027731 | 0.405546 | 5 |
| CADM1 | 1.951302 | 0.39026 | 5 |
| CUEDC1 | 1.497338 | 0.299468 | 5 |
| HHEX | 1.373634 | 0.274727 | 5 |
| VOPP1 | 2.346855 | 0.586714 | 4 |
| SASH1 | 1.683054 | 0.420763 | 4 |
| CRB2 | 1.568691 | 0.392173 | 4 |
| STAP2 | 1.464166 | 0.366042 | 4 |
| DSE | 1.416996 | 0.354249 | 4 |
| TET1 | 1.392098 | 0.348025 | 4 |
| CSRNP1 | 1.380255 | 0.345064 | 4 |
| PPM1H | 1.346451 | 0.336613 | 4 |
| GNAS | 1.675009 | 0.558336 | 3 |
| SLC6A9 | 1.553944 | 0.517981 | 3 |
| FAM83E | 1.457047 | 0.485682 | 3 |
| FEZ1 | 1.428745 | 0.476248 | 3 |
| HDAC7 | 2.043894 | 1.021947 | 2 |
| SOX10 | 1.908056 | 0.954028 | 2 |
| CHTF18 | 1.6427 | 0.82135 | 2 |
| EXT2 | 1.607093 | 0.803547 | 2 |
| ANKLE2 | 1.503659 | 0.75183 | 2 |
| TSC2 | 1.336326 | 0.668163 | 2 |
| TTLL11 | 1.294769 | 0.647385 | 2 |
| DDA1 | 1.729932 | 1.729932 | 1 |
| HMGCR | 1.438004 | 1.438004 | 1 |

TABLE 94
Cancer Type HMB

| Gene site | imp_sum | imp_mean | n |
|---|---|---|---|
| PTPRN2 | 26.46067 | 0.322691 | 82 |
| PRDM16 | 24.26095 | 0.341704 | 71 |
| PCDHGA1 | 14.03915 | 0.237952 | 59 |
| PCDHGA2 | 13.72276 | 0.24075 | 57 |
| PCDHGA3 | 13.08999 | 0.242407 | 54 |
| PCDHGB1 | 12.7736 | 0.241011 | 53 |
| PCDHGA4 | 12.7736 | 0.250463 | 51 |
| PCDHGB2 | 12.45722 | 0.254229 | 49 |
| PCDHGA5 | 11.75716 | 0.250152 | 47 |
| PCDHGB3 | 10.808 | 0.251349 | 43 |
| PCDHGA6 | 10.17523 | 0.254381 | 40 |
| HDAC4 | 17.71129 | 0.478684 | 37 |
| PCDHGA7 | 9.858841 | 0.266455 | 37 |
| PAX6 | 9.923022 | 0.283515 | 35 |
| PCDHGB4 | 9.106144 | 0.260176 | 35 |
| PCDHGA8 | 9.106144 | 0.260176 | 35 |
| RBFOX3 | 6.361317 | 0.181752 | 35 |
| DIP2C | 12.46961 | 0.389675 | 32 |
| PCDHGB5 | 8.473372 | 0.264793 | 32 |
| PCDHGA9 | 8.026117 | 0.258907 | 31 |
| SOX2-OT | 9.70619 | 0.334696 | 29 |
| PCDHGB6 | 7.175401 | 0.247428 | 29 |
| PCDHGA10 | 6.859015 | 0.244965 | 28 |
| GALNT9 | 7.818675 | 0.289581 | 27 |
| ADARB2 | 7.906132 | 0.304082 | 26 |
| SHANK2 | 7.070504 | 0.271942 | 26 |
| AGAP1 | 11.75792 | 0.470317 | 25 |
| CAMTA1 | 9.840931 | 0.393637 | 25 |
| PDGFRA | 8.698086 | 0.347923 | 25 |
| MEIS1 | 7.999986 | 0.333333 | 24 |
| SATB2 | 7.40875 | 0.308698 | 24 |
| PCDHGB7 | 6.542629 | 0.27261 | 24 |
| RPTOR | 13.45937 | 0.58519 | 23 |
| NCOR2 | 8.791106 | 0.382222 | 23 |
| INPP5A | 7.765362 | 0.337624 | 23 |
| NXN | 7.53317 | 0.327529 | 23 |
| RIMBP2 | 6.453255 | 0.280576 | 23 |
| PCDHGA11 | 6.226243 | 0.270706 | 23 |
| PRKCZ | 6.210195 | 0.282282 | 22 |
| SKI | 11.9245 | 0.567833 | 21 |
| ZIC4 | 5.846935 | 0.278425 | 21 |
| HOXA-AS3 | 5.081374 | 0.24197 | 21 |
| FRMD4A | 7.269919 | 0.363496 | 20 |
| SDK1 | 7.083018 | 0.354151 | 20 |
| MAD1L1 | 14.41389 | 0.758626 | 19 |
| ZNF423 | 10.48737 | 0.551967 | 19 |
| CASZ1 | 9.066917 | 0.477206 | 19 |
| SMG1P2 | 7.991465 | 0.420603 | 19 |
| BOLA2 | 7.991465 | 0.420603 | 19 |
| LOC613038 | 7.991465 | 0.420603 | 19 |
| KCNQ1 | 5.977189 | 0.314589 | 19 |
| FOXK1 | 8.730481 | 0.485027 | 18 |
| TBC1D16 | 8.260186 | 0.458899 | 18 |
| ANKRD11 | 7.878235 | 0.43768 | 18 |
| SEPTIN9 | 7.040446 | 0.391136 | 18 |
| MCF2L | 6.444229 | 0.358013 | 18 |
| OPCML | 6.12059 | 0.360035 | 17 |
| FOXP1 | 7.749369 | 0.484336 | 16 |
| NAV2 | 7.034679 | 0.439667 | 16 |
| SORBS2 | 6.588335 | 0.411771 | 16 |
| GLI2 | 7.702327 | 0.513488 | 15 |
| KIRREL3 | 7.493121 | 0.499541 | 15 |
| ZBTB20 | 6.170748 | 0.411383 | 15 |
| NFIX | 6.062316 | 0.404154 | 15 |
| NFATC1 | 5.634395 | 0.375626 | 15 |
| BAIAP2 | 5.418057 | 0.361204 | 15 |
| LRMDA | 5.416243 | 0.361083 | 15 |
| RPS6KA2 | 7.766361 | 0.55474 | 14 |
| IQSEC1 | 7.107435 | 0.507674 | 14 |
| MIR548F5 | 6.86813 | 0.490581 | 14 |
| CUX1 | 6.527938 | 0.466281 | 14 |
| ARHGEF10 | 5.786339 | 0.41331 | 14 |
| PRKAG2 | 5.056265 | 0.361162 | 14 |
| PCDHGA12 | 5.014631 | 0.358188 | 14 |
| MSI2 | 6.781856 | 0.521681 | 13 |
| MYT1L | 5.974692 | 0.459592 | 13 |
| RFX4 | 5.591116 | 0.430086 | 13 |
| ZC3H3 | 6.534405 | 0.544534 | 12 |
| CMIP | 6.323173 | 0.526931 | 12 |
| GNA12 | 6.002641 | 0.50022 | 12 |
| TNS3 | 5.687364 | 0.473947 | 12 |
| MAML3 | 5.634682 | 0.469557 | 12 |
| RASA3 | 5.562932 | 0.463578 | 12 |
| FBRSL1 | 5.349059 | 0.445755 | 12 |
| RAD51B | 6.362292 | 0.57839 | 11 |
| ANAPC16 | 5.819704 | 0.529064 | 11 |
| VGLL4 | 5.464586 | 0.496781 | 11 |
| ACOT7 | 5.700837 | 0.570084 | 10 |
| KLHL29 | 5.468208 | 0.546821 | 10 |
| SND1 | 6.468907 | 0.718767 | 9 |
| ATP11A | 6.187374 | 0.687486 | 9 |
| ADAMTS2 | 5.936374 | 0.659597 | 9 |
| NOTCH1 | 5.540961 | 0.615662 | 9 |
| ASAP1 | 5.087106 | 0.565234 | 9 |
| LINC00311 | 5.411709 | 0.676464 | 8 |
| MCC | 5.258706 | 0.657338 | 8 |
| DLEU1 | 5.054179 | 0.631772 | 8 |
| RXRA | 5.195303 | 0.742186 | 7 |
| TSNAX-DISC1 | 5.815857 | 1.163171 | 5 |
| ARHGEF7 | 5.557932 | 1.111586 | 5 |

TABLE 95
Cancer Type IDH_B

| Gene site | imp_sum | imp_mean | n |
|---|---|---|---|
| PTPRN2 | 17.16233 | 0.209297 | 82 |
| PRDM16 | 14.96187 | 0.210731 | 71 |
| PCDHGA1 | 7.441341 | 0.126124 | 59 |
| PCDHGA2 | 6.8546 | 0.120256 | 57 |
| PCDHGA3 | 6.407163 | 0.118651 | 54 |
| PCDHGB1 | 6.723549 | 0.126859 | 53 |
| PCDHGA4 | 6.723549 | 0.131834 | 51 |
| PCDHGB2 | 6.407163 | 0.130758 | 49 |
| PCDHGA5 | 6.661662 | 0.141737 | 47 |
| PCDHGB3 | 6.249674 | 0.145341 | 43 |
| PCDHGA6 | 5.82758 | 0.14569 | 40 |
| HDAC4 | 12.51746 | 0.33831 | 37 |
| PCDHGA7 | 6.143966 | 0.166053 | 37 |
| RBFOX3 | 10.87678 | 0.310765 | 35 |
| PAX6 | 10.19727 | 0.291351 | 35 |
| PCDHGB4 | 6.326632 | 0.180761 | 35 |
| PCDHGA8 | 6.326632 | 0.180761 | 35 |
| DIP2C | 11.28103 | 0.352532 | 32 |
| PCDHGB5 | 6.326632 | 0.197707 | 32 |
| PCDHGA9 | 6.326632 | 0.204085 | 31 |
| SOX2-OT | 11.9739 | 0.412893 | 29 |
| PCDHGB6 | 5.935454 | 0.204671 | 29 |
| PCDHGA10 | 5.619068 | 0.200681 | 28 |
| SHANK2 | 4.728557 | 0.181868 | 26 |
| ADARB2 | 4.06952 | 0.15652 | 26 |
| AGAP1 | 8.657739 | 0.34631 | 25 |
| PDGFRA | 6.586265 | 0.263451 | 25 |
| CAMTA1 | 4.939632 | 0.197585 | 25 |
| MEIS1 | 9.504702 | 0.396029 | 24 |
| SATB2 | 7.120392 | 0.296683 | 24 |
| PCDHGB7 | 5.944949 | 0.247706 | 24 |
| RPTOR | 10.58695 | 0.460302 | 23 |
| NCOR2 | 6.324306 | 0.27497 | 23 |
| PCDHGA11 | 5.280202 | 0.229574 | 23 |
| HOXB3 | 5.139593 | 0.223461 | 23 |
| INPP5A | 4.571725 | 0.198771 | 23 |
| RIMBP2 | 4.272317 | 0.185753 | 23 |
| PRKCZ | 6.585171 | 0.299326 | 22 |
| SKI | 9.910396 | 0.471924 | 21 |
| ZIC4 | 4.254706 | 0.202605 | 21 |
| FRMD4A | 7.877648 | 0.393882 | 20 |
| ABR | 6.512398 | 0.32562 | 20 |
| MAD1L1 | 12.08799 | 0.63621 | 19 |
| ZNF423 | 6.7748 | 0.356568 | 19 |
| SMG1P2 | 5.607138 | 0.295113 | 19 |
| BOLA2 | 5.607138 | 0.295113 | 19 |
| LOC613038 | 5.607138 | 0.295113 | 19 |
| CASZ1 | 4.524491 | 0.238131 | 19 |
| FOXK1 | 6.358935 | 0.353274 | 18 |
| ANKRD11 | 5.770334 | 0.320574 | 18 |
| TBC1D16 | 4.557065 | 0.25317 | 18 |
| OPCML | 8.756938 | 0.515114 | 17 |
| PAX6-AS1 | 4.758871 | 0.279934 | 17 |
| RCN1 | 4.758871 | 0.279934 | 17 |
| FOXP1 | 5.7259 | 0.357869 | 16 |
| NAV2 | 5.209677 | 0.325605 | 16 |
| GLI2 | 9.20778 | 0.613852 | 15 |
| ZBTB20 | 6.166419 | 0.411095 | 15 |
| SLX1B-SULT1A4 | 5.138637 | 0.342576 | 15 |
| SLX1A | 5.138637 | 0.342576 | 15 |
| LOC606724 | 5.138637 | 0.342576 | 15 |
| BAIAP2 | 4.870926 | 0.324728 | 15 |
| RPS6KA2 | 5.921087 | 0.422935 | 14 |
| IQSEC1 | 5.061376 | 0.361527 | 14 |
| C7orf50 | 4.660564 | 0.332897 | 14 |
| PRKAG2 | 4.396865 | 0.314062 | 14 |
| MSI2 | 7.087188 | 0.545168 | 13 |
| MYT1L | 5.322932 | 0.409456 | 13 |
| RFX4 | 4.816791 | 0.370522 | 13 |
| KIF26B | 4.55746 | 0.350574 | 13 |
| SPTBN4 | 4.447745 | 0.342134 | 13 |
| ZC3H3 | 5.713517 | 0.476126 | 12 |
| CMIP | 5.59996 | 0.466663 | 12 |
| MIRLET7BHG | 4.177948 | 0.348162 | 12 |
| ADGRD1 | 4.159606 | 0.346634 | 12 |
| FBRSL1 | 4.056428 | 0.338036 | 12 |
| VGLLA | 4.973961 | 0.452178 | 11 |
| FGFR2 | 4.888569 | 0.444415 | 11 |
| RAD51B | 4.783315 | 0.434847 | 11 |
| ZC3H12D | 4.146117 | 0.37692 | 11 |
| NR2F1-AS1 | 4.866915 | 0.486691 | 10 |
| TSPAN4 | 4.645856 | 0.464586 | 10 |
| SH3RF3 | 4.417072 | 0.441707 | 10 |
| OTX1 | 4.083172 | 0.408317 | 10 |
| ATP11A | 5.676572 | 0.63073 | 9 |
| SND1 | 5.130784 | 0.570087 | 9 |
| ADGRB1 | 5.066377 | 0.562931 | 9 |
| TSPAN9 | 5.020702 | 0.557856 | 9 |
| TRAPPC12 | 4.9894 | 0.554378 | 9 |
| ASAP1 | 4.983764 | 0.553752 | 9 |
| AXIN2 | 4.974147 | 0.552683 | 9 |
| RUNX1 | 4.191813 | 0.465757 | 9 |
| ADAMTS2 | 4.02287 | 0.446986 | 9 |
| LINC00311 | 4.643322 | 0.580415 | 8 |
| NR2E1 | 4.551273 | 0.568909 | 8 |
| DLEU1 | 4.506299 | 0.563287 | 8 |
| LINC00461 | 4.90227 | 0.700324 | 7 |
| FBXL18 | 4.159063 | 0.693177 | 6 |
| RUNDC3A | 5.22174 | 1.044348 | 5 |
| TSNAX-DISC1 | 4.071943 | 0.814389 | 5 |

TABLE 96
Cancer Type IHG

| Gene site | imp_sum | imp_mean | n |
|---|---|---|---|
| PTPRN2 | 21.98894 | 0.268158 | 82 |
| PRDM16 | 16.68139 | 0.234949 | 71 |
| PCDHGA1 | 6.820854 | 0.115608 | 59 |
| PCDHGA2 | 6.820854 | 0.119664 | 57 |
| PCDHGA3 | 6.188082 | 0.114594 | 54 |
| PCDHGB1 | 6.188082 | 0.116756 | 53 |
| PCDHGA4 | 5.871696 | 0.115131 | 51 |
| PCDHGB2 | 5.871696 | 0.119831 | 49 |
| PCDHGA5 | 6.318987 | 0.134447 | 47 |
| PCDHGB3 | 5.369829 | 0.12488 | 43 |
| PCDHGA6 | 5.8623 | 0.146558 | 40 |
| HDAC4 | 13.86379 | 0.374697 | 37 |
| PCDHGA7 | 5.229528 | 0.141339 | 37 |
| PAX6 | 10.71551 | 0.306157 | 35 |
| RBFOX3 | 10.31778 | 0.294794 | 35 |
| PCDHGB4 | 5.229528 | 0.149415 | 35 |
| PCDHGA8 | 5.229528 | 0.149415 | 35 |
| DIP2C | 10.44121 | 0.326288 | 32 |
| PCDHGB5 | 4.596756 | 0.143649 | 32 |
| PCDHGA9 | 4.913142 | 0.158488 | 31 |
| SOX2-OT | 9.404015 | 0.324276 | 29 |
| SHANK2 | 5.97329 | 0.229742 | 26 |
| ADARB2 | 5.645742 | 0.217144 | 26 |
| CAMTA1 | 8.361545 | 0.334462 | 25 |
| AGAP1 | 8.047109 | 0.321884 | 25 |
| PDGFRA | 6.74722 | 0.269889 | 25 |
| SATB2 | 7.958792 | 0.331616 | 24 |
| MEIS1 | 7.797292 | 0.324887 | 24 |
| RPTOR | 12.32278 | 0.535773 | 23 |
| NCOR2 | 8.741034 | 0.380045 | 23 |
| NXN | 5.731381 | 0.24919 | 23 |
| INPP5A | 5.566191 | 0.242008 | 23 |
| PRKCZ | 7.299384 | 0.33179 | 22 |
| SKI | 9.972847 | 0.474897 | 21 |
| SIM2 | 5.724523 | 0.272596 | 21 |
| FRMD4A | 9.398365 | 0.469918 | 20 |
| ABR | 6.182838 | 0.309142 | 20 |
| SDK1 | 5.248318 | 0.262416 | 20 |
| MAD1L1 | 11.70125 | 0.615855 | 19 |
| ZNF423 | 7.967461 | 0.41934 | 19 |
| CASZ1 | 7.888011 | 0.415158 | 19 |
| SMG1P2 | 7.249408 | 0.381548 | 19 |
| BOLA2 | 7.249408 | 0.381548 | 19 |
| LOC613038 | 7.249408 | 0.381548 | 19 |
| FOXK1 | 7.589663 | 0.421648 | 18 |
| ANKRD11 | 5.668737 | 0.31493 | 18 |
| SEPTIN9 | 4.595294 | 0.255294 | 18 |
| TBC1D16 | 4.550263 | 0.252792 | 18 |
| OPCML | 7.944399 | 0.467318 | 17 |
| PAX6-AS1 | 5.215924 | 0.306819 | 17 |
| RCN1 | 5.215924 | 0.306819 | 17 |
| FOXP1 | 6.734018 | 0.420876 | 16 |
| GLI2 | 9.012125 | 0.600808 | 15 |
| ZBTB20 | 6.714497 | 0.447633 | 15 |
| BAIAP2 | 5.486625 | 0.365775 | 15 |
| KIRREL3 | 5.185464 | 0.345698 | 15 |
| SLX1B-SULT1A4 | 5.143539 | 0.342903 | 15 |
| SLX1A | 5.143539 | 0.342903 | 15 |
| LOC606724 | 5.143539 | 0.342903 | 15 |
| NFIX | 4.968449 | 0.33123 | 15 |
| TBX5 | 6.484428 | 0.463173 | 14 |
| RPS6KA2 | 6.099945 | 0.43571 | 14 |
| CUX1 | 5.931251 | 0.423661 | 14 |
| IQSEC1 | 5.523478 | 0.394534 | 14 |
| MIR548F5 | 5.231893 | 0.373707 | 14 |
| ARHGEF10 | 4.882863 | 0.348776 | 14 |
| PRKAG2 | 4.696947 | 0.335496 | 14 |
| SPTBN4 | 9.679117 | 0.744547 | 13 |
| MSI2 | 7.306432 | 0.562033 | 13 |
| MYT1L | 5.174987 | 0.398076 | 13 |
| KIF26B | 5.16254 | 0.397118 | 13 |
| RFX4 | 4.804251 | 0.369558 | 13 |
| ZC3H3 | 6.167031 | 0.513919 | 12 |
| MIRLET7BHG | 5.276484 | 0.439707 | 12 |
| CMIP | 5.091453 | 0.424288 | 12 |
| ZC3H12D | 5.829639 | 0.529967 | 11 |
| RAD51B | 5.240653 | 0.476423 | 11 |
| FGFR2 | 5.0712 | 0.461018 | 11 |
| VGLLA | 4.963901 | 0.451264 | 11 |
| NR2F1-AS1 | 4.662872 | 0.466287 | 10 |
| AKAP13 | 4.618214 | 0.461821 | 10 |
| CHST11 | 4.535589 | 0.453559 | 10 |
| GAS7 | 4.521014 | 0.452101 | 10 |
| ATP11A | 7.610869 | 0.845652 | 9 |
| SND1 | 6.161357 | 0.684595 | 9 |
| KCNH2 | 5.738954 | 0.637662 | 9 |
| AXIN2 | 4.982084 | 0.553565 | 9 |
| ADAMTS2 | 4.935406 | 0.548378 | 9 |
| TRAPPC12 | 4.645836 | 0.516204 | 9 |
| LINC00311 | 6.172338 | 0.771542 | 8 |
| LHX4 | 5.191303 | 0.648913 | 8 |
| DLEU1 | 4.549579 | 0.568697 | 8 |
| MSRA | 4.495601 | 0.56195 | 8 |
| RGS20 | 4.410543 | 0.551318 | 8 |
| DUSP6 | 6.409854 | 0.915693 | 7 |
| LINC00461 | 4.952709 | 0.70753 | 7 |
| RUNDC3A | 5.680512 | 1.136102 | 5 |
| TSNAX-DISC1 | 4.566497 | 0.913299 | 5 |
| ARHGEF7 | 4.427856 | 0.885571 | 5 |
| RBMS3 | 4.727666 | 1.181917 | 4 |

TABLE 97
Cancer Type IO_MEPL

| Gene site | imp_sum | imp_mean | n |
|---|---|---|---|
| PTPRN2 | 19.57579 | 0.238729 | 82 |
| PRDM16 | 13.39836 | 0.188709 | 71 |
| PCDHGA2 | 4.149727 | 0.072802 | 57 |
| PCDHGB2 | 4.003444 | 0.081703 | 49 |
| PCDHGA5 | 4.003444 | 0.08518 | 47 |
| PCDHGB3 | 4.089625 | 0.095108 | 43 |
| HDAC4 | 16.86061 | 0.455692 | 37 |
| PAX6 | 7.205322 | 0.205866 | 35 |
| RBFOX3 | 4.407359 | 0.125925 | 35 |
| DIP2C | 10.45506 | 0.32672 | 32 |
| SOX2-OT | 4.188497 | 0.144431 | 29 |
| SHANK2 | 8.032537 | 0.308944 | 26 |
| AGAP1 | 13.61969 | 0.544788 | 25 |
| CAMTA1 | 7.258327 | 0.290333 | 25 |
| PDGFRA | 5.787904 | 0.231516 | 25 |
| MEIS1 | 6.160598 | 0.256692 | 24 |
| RPTOR | 12.21252 | 0.530979 | 23 |
| INPP5A | 6.643328 | 0.28884 | 23 |
| NCOR2 | 6.618779 | 0.287773 | 23 |
| NXN | 6.500086 | 0.282612 | 23 |
| RIMBP2 | 4.707864 | 0.20469 | 23 |
| PRKCZ | 5.144966 | 0.233862 | 22 |
| SKI | 8.219151 | 0.391388 | 21 |
| HOXA-AS3 | 4.440806 | 0.211467 | 21 |
| ZIC4 | 4.366666 | 0.207936 | 21 |
| SDK1 | 7.048012 | 0.352401 | 20 |
| FRMD4A | 6.156727 | 0.307836 | 20 |
| MAD1L1 | 13.30588 | 0.70031 | 19 |
| ZNF423 | 6.364884 | 0.334994 | 19 |
| SMG1P2 | 6.161088 | 0.324268 | 19 |
| BOLA2 | 6.161088 | 0.324268 | 19 |
| LOC613038 | 6.161088 | 0.324268 | 19 |
| CASZ1 | 5.576216 | 0.293485 | 19 |
| TBC1D16 | 6.783411 | 0.376856 | 18 |
| FOXK1 | 6.461694 | 0.358983 | 18 |
| ANKRD11 | 6.360361 | 0.353353 | 18 |
| SEPTIN9 | 4.582259 | 0.25457 | 18 |
| HOXA3 | 4.03831 | 0.224351 | 18 |
| FOXP1 | 6.464623 | 0.404039 | 16 |
| NAV2 | 4.301849 | 0.268866 | 16 |
| GLI2 | 7.666491 | 0.511099 | 15 |
| LRMDA | 5.004471 | 0.333631 | 15 |
| BAIAP2 | 4.945349 | 0.32969 | 15 |
| SLX1B-SULT1A4 | 4.790424 | 0.319362 | 15 |
| SLX1A | 4.790424 | 0.319362 | 15 |
| LOC606724 | 4.790424 | 0.319362 | 15 |
| ZBTB20 | 4.784376 | 0.318958 | 15 |
| KNDC1 | 4.672532 | 0.311502 | 15 |
| KIRREL3 | 4.620311 | 0.308021 | 15 |
| RPS6KA2 | 8.189835 | 0.584988 | 14 |
| MIR548F5 | 7.255671 | 0.518262 | 14 |
| C7orf50 | 7.003642 | 0.50026 | 14 |
| PRKAG2 | 5.365647 | 0.38326 | 14 |
| IQSEC1 | 5.328487 | 0.380606 | 14 |
| CUX1 | 4.289627 | 0.306402 | 14 |
| MYT1L | 6.437381 | 0.495183 | 13 |
| MSI2 | 5.673086 | 0.436391 | 13 |
| CLYBL | 5.020663 | 0.386205 | 13 |
| GSE1 | 4.968646 | 0.382204 | 13 |
| KIF26B | 4.768748 | 0.366827 | 13 |
| RFX4 | 4.112628 | 0.316356 | 13 |
| CMIP | 5.445062 | 0.453755 | 12 |
| ZC3H3 | 4.716954 | 0.39308 | 12 |
| RASA3 | 4.708674 | 0.392389 | 12 |
| ADGRD1 | 4.495558 | 0.37463 | 12 |
| TNS3 | 4.396419 | 0.366368 | 12 |
| FBRSL1 | 4.377279 | 0.364773 | 12 |
| MAML3 | 4.352462 | 0.362705 | 12 |
| MEIS2 | 4.249655 | 0.354138 | 12 |
| GNA12 | 4.139511 | 0.344959 | 12 |
| RAD51B | 5.524138 | 0.502194 | 11 |
| COL4A1 | 4.950854 | 0.450078 | 11 |
| CTBP2 | 4.565877 | 0.41508 | 11 |
| ZC3H12D | 4.337687 | 0.394335 | 11 |
| VGLLA | 4.291892 | 0.390172 | 11 |
| CCDC140 | 4.286443 | 0.389677 | 11 |
| TBCD | 4.031543 | 0.366504 | 11 |
| AKAP13 | 5.403911 | 0.540391 | 10 |
| NBEA | 5.17908 | 0.517908 | 10 |
| ACOT7 | 4.447818 | 0.444782 | 10 |
| TSPAN4 | 4.277334 | 0.427733 | 10 |
| KLHL29 | 4.146967 | 0.414697 | 10 |
| SND1 | 7.456092 | 0.828455 | 9 |
| ATP11A | 6.698008 | 0.744223 | 9 |
| TRAPPC12 | 5.537784 | 0.615309 | 9 |
| AXIN2 | 4.177251 | 0.464139 | 9 |
| ADAMTS2 | 4.05797 | 0.450886 | 9 |
| MGMT | 4.00896 | 0.44544 | 9 |
| MSRA | 4.976348 | 0.622043 | 8 |
| DNMT3A | 4.668408 | 0.583551 | 8 |
| SYNJ2 | 4.434465 | 0.554308 | 8 |
| DLEU1 | 4.089529 | 0.511191 | 8 |
| PPP2R2B | 3.981533 | 0.497692 | 8 |
| FBXL18 | 4.770152 | 0.795025 | 6 |
| CRADD | 4.507778 | 0.751296 | 6 |
| SLC22A18AS | 4.258436 | 0.709739 | 6 |
| FMNL2 | 4.222057 | 0.703676 | 6 |
| TSNAX-DISC1 | 5.281229 | 1.056246 | 5 |
| RUNDC3A | 4.794213 | 0.958843 | 5 |
| DAGLB | 4.037646 | 1.345882 | 3 |

TABLE 98
Cancer Type LCH

| Gene site | imp_sum | imp_mean | n |
|---|---|---|---|
| PTPRN2 | 11.90058 | 0.145129 | 82 |
| PRDM16 | 6.340229 | 0.089299 | 71 |
| PCDHGA1 | 3.009323 | 0.051005 | 59 |
| PCDHGA2 | 3.009323 | 0.052795 | 57 |
| HDAC4 | 12.67247 | 0.342499 | 37 |
| PAX6 | 9.410904 | 0.268883 | 35 |
| RBFOX3 | 4.406468 | 0.125899 | 35 |
| DIP2C | 7.492757 | 0.234149 | 32 |
| SHANK2 | 3.588698 | 0.138027 | 26 |
| AGAP1 | 7.359122 | 0.294365 | 25 |
| PDGFRA | 5.737538 | 0.229502 | 25 |
| CAMTA1 | 4.250446 | 0.170018 | 25 |
| RPTOR | 10.60541 | 0.461105 | 23 |
| NCOR2 | 7.527478 | 0.327282 | 23 |
| INPP5A | 6.155063 | 0.267611 | 23 |
| NXN | 3.886534 | 0.16898 | 23 |
| PRKCZ | 3.531157 | 0.160507 | 22 |
| SKI | 7.320851 | 0.348612 | 21 |
| ZICA | 2.952765 | 0.140608 | 21 |
| FRMD4A | 3.211158 | 0.160558 | 20 |
| SDK1 | 2.99271 | 0.149636 | 20 |
| MAD1L1 | 10.71262 | 0.563822 | 19 |
| CASZ1 | 4.302664 | 0.226456 | 19 |
| SMG1P2 | 4.101114 | 0.215848 | 19 |
| BOLA2 | 4.101114 | 0.215848 | 19 |
| LOC613038 | 4.101114 | 0.215848 | 19 |
| ZNF423 | 3.863493 | 0.203342 | 19 |
| KCNQ1 | 3.067512 | 0.161448 | 19 |
| TBC1D16 | 5.600008 | 0.311112 | 18 |
| ANKRD11 | 4.708597 | 0.261589 | 18 |
| FOXK1 | 4.345205 | 0.2414 | 18 |
| SEPTIN9 | 3.964328 | 0.22024 | 18 |
| PAX6-AS1 | 3.90826 | 0.229898 | 17 |
| RCN1 | 3.90826 | 0.229898 | 17 |
| OPCML | 3.510236 | 0.206484 | 17 |
| FOXP1 | 5.172432 | 0.323277 | 16 |
| EBF3 | 3.530611 | 0.220663 | 16 |
| NAV2 | 3.133991 | 0.195874 | 16 |
| ZBTB20 | 4.881349 | 0.325423 | 15 |
| GLI2 | 3.960304 | 0.26402 | 15 |
| SLX1B-SULT1A4 | 3.591227 | 0.239415 | 15 |
| SLX1A | 3.591227 | 0.239415 | 15 |
| LOC606724 | 3.591227 | 0.239415 | 15 |
| KIRREL3 | 3.000317 | 0.200021 | 15 |
| BAIAP2 | 2.97861 | 0.198574 | 15 |
| RPS6KA2 | 7.52999 | 0.537856 | 14 |
| CUX1 | 6.183826 | 0.441702 | 14 |
| IQSEC1 | 5.523366 | 0.394526 | 14 |
| C7orf50 | 4.021076 | 0.28722 | 14 |
| ARHGEF10 | 3.337458 | 0.23839 | 14 |
| PRKAG2 | 2.977514 | 0.21268 | 14 |
| MYT1L | 4.479703 | 0.344593 | 13 |
| MSI2 | 3.719446 | 0.286111 | 13 |
| CMIP | 6.420494 | 0.535041 | 12 |
| FBRSL1 | 4.962752 | 0.413563 | 12 |
| GNA12 | 4.548846 | 0.379071 | 12 |
| ZC3H3 | 4.072548 | 0.339379 | 12 |
| TNS3 | 3.455477 | 0.287956 | 12 |
| RAD51B | 3.854406 | 0.350401 | 11 |
| TBCD | 3.40743 | 0.309766 | 11 |
| VGLLA | 3.205608 | 0.291419 | 11 |
| SLC38A10 | 3.191701 | 0.290155 | 11 |
| ZC3H12D | 3.102792 | 0.282072 | 11 |
| ACOT7 | 3.965729 | 0.396573 | 10 |
| OTX1 | 3.463251 | 0.346325 | 10 |
| ATP11A | 7.207192 | 0.800799 | 9 |
| SND1 | 7.086397 | 0.787377 | 9 |
| ADAMTS2 | 4.230769 | 0.470085 | 9 |
| CACNA2D4 | 3.479424 | 0.386603 | 9 |
| AXIN2 | 3.428441 | 0.380938 | 9 |
| MGMT | 3.317762 | 0.36864 | 9 |
| ASAP1 | 3.281916 | 0.364657 | 9 |
| TSPAN9 | 3.259625 | 0.362181 | 9 |
| LINC00311 | 4.744947 | 0.593118 | 8 |
| DLEU1 | 4.301357 | 0.53767 | 8 |
| DNMT3A | 3.273543 | 0.409193 | 8 |
| MSRA | 2.985396 | 0.373175 | 8 |
| MACROD1 | 2.949414 | 0.368677 | 8 |
| C19orf25 | 5.014216 | 0.716317 | 7 |
| NAV1 | 3.454065 | 0.493438 | 7 |
| VPS13D | 3.358144 | 0.479735 | 7 |
| GAK | 3.259103 | 0.465586 | 7 |
| MIR548H4 | 3.246832 | 0.463833 | 7 |
| CXXC5 | 3.232364 | 0.461766 | 7 |
| RXRA | 2.991782 | 0.427397 | 7 |
| ITPK1 | 2.944881 | 0.420697 | 7 |
| RADIL | 4.025201 | 0.670867 | 6 |
| SLC22A18AS | 3.415395 | 0.569233 | 6 |
| FMNL2 | 3.35009 | 0.558348 | 6 |
| FBXL18 | 3.110054 | 0.518342 | 6 |
| CRADD | 2.974569 | 0.495762 | 6 |
| RUNDC3A | 4.135282 | 0.827056 | 5 |
| ARHGEF7 | 3.716845 | 0.743369 | 5 |
| ARHGAP26 | 3.411236 | 0.682247 | 5 |
| NHSL1 | 4.167055 | 1.041764 | 4 |
| NDST1 | 3.6207 | 0.905175 | 4 |
| DAGLB | 4.221934 | 1.407311 | 3 |
| TBC1D7 | 3.805081 | 1.26836 | 3 |
| DICER1 | 3.103681 | 1.03456 | 3 |
| SLC25A10 | 3.006057 | 1.503029 | 2 |

TABLE 99
Cancer Type LGG_DIG_DIA

| Gene site | imp_sum | imp_mean | n |
|---|---|---|---|
| PTPRN2 | 14.23623 | 0.173613 | 82 |
| PRDM16 | 10.76981 | 0.151687 | 71 |
| PCDHGA1 | 4.428272 | 0.075055 | 59 |
| PCDHGA2 | 4.111886 | 0.072138 | 57 |
| PCDHGA3 | 4.111886 | 0.076146 | 54 |
| PCDHGB1 | 4.111886 | 0.077583 | 53 |
| PCDHGA4 | 4.111886 | 0.080625 | 51 |
| PCDHGB2 | 4.111886 | 0.083916 | 49 |
| PCDHGA5 | 4.111886 | 0.087487 | 47 |
| PCDHGB3 | 3.7955 | 0.088267 | 43 |
| PCDHGA6 | 3.7955 | 0.094888 | 40 |
| HDAC4 | 12.09384 | 0.32686 | 37 |
| PCDHGA7 | 3.7955 | 0.102581 | 37 |
| RBFOX3 | 4.315354 | 0.123296 | 35 |
| PAX6 | 4.097637 | 0.117075 | 35 |
| PCDHGB4 | 3.479114 | 0.099403 | 35 |
| PCDHGA8 | 3.479114 | 0.099403 | 35 |
| DIP2C | 9.29439 | 0.29045 | 32 |
| PCDHGB5 | 3.162728 | 0.098835 | 32 |
| SOX2-OT | 4.772139 | 0.164557 | 29 |
| PCDHGB6 | 3.162728 | 0.10906 | 29 |
| PCDHGA10 | 3.162728 | 0.112955 | 28 |
| GALNT9 | 5.318422 | 0.196979 | 27 |
| SHANK2 | 4.310182 | 0.165776 | 26 |
| ADARB2 | 3.611297 | 0.138896 | 26 |
| AGAP1 | 9.830515 | 0.393221 | 25 |
| CAMTA1 | 6.399763 | 0.255991 | 25 |
| PDGFRA | 4.316944 | 0.172678 | 25 |
| MEIS1 | 3.570653 | 0.148777 | 24 |
| SATB2 | 3.25786 | 0.135744 | 24 |
| PCDHGB7 | 3.162728 | 0.13178 | 24 |
| RPTOR | 10.27897 | 0.446912 | 23 |
| NCOR2 | 7.796333 | 0.338971 | 23 |
| INPP5A | 5.31175 | 0.230946 | 23 |
| HOXB3 | 4.171853 | 0.181385 | 23 |
| NXN | 3.25688 | 0.141603 | 23 |
| PCDHGA11 | 3.162728 | 0.13751 | 23 |
| SKI | 6.442682 | 0.306794 | 21 |
| FRMD4A | 5.439477 | 0.271974 | 20 |
| SDK1 | 3.382742 | 0.169137 | 20 |
| MAD1L1 | 8.43267 | 0.443825 | 19 |
| CASZ1 | 5.143108 | 0.27069 | 19 |
| KCNQ1 | 4.759959 | 0.250524 | 19 |
| ZNF423 | 4.636213 | 0.244011 | 19 |
| SMG1P2 | 4.465582 | 0.235031 | 19 |
| BOLA2 | 4.465582 | 0.235031 | 19 |
| LOC613038 | 4.465582 | 0.235031 | 19 |
| ANKRD11 | 5.788786 | 0.321599 | 18 |
| TBC1D16 | 4.406929 | 0.244829 | 18 |
| RBFOX1 | 3.568704 | 0.198261 | 18 |
| MCF2L | 3.335676 | 0.185315 | 18 |
| OPCML | 4.914005 | 0.289059 | 17 |
| PAX6-AS1 | 4.370298 | 0.257076 | 17 |
| RCN1 | 4.370298 | 0.257076 | 17 |
| FOXP1 | 5.151974 | 0.321998 | 16 |
| SORBS2 | 3.612279 | 0.225767 | 16 |
| GLI2 | 6.246745 | 0.41645 | 15 |
| BAIAP2 | 4.444424 | 0.296295 | 15 |
| ZBTB20 | 4.000898 | 0.266727 | 15 |
| KIRREL3 | 3.9588 | 0.26392 | 15 |
| RPS6KA2 | 5.124608 | 0.366043 | 14 |
| CUX1 | 4.211117 | 0.300794 | 14 |
| MIR548F5 | 3.791066 | 0.27079 | 14 |
| C7orf50 | 3.682449 | 0.263032 | 14 |
| IQSEC1 | 3.563053 | 0.254504 | 14 |
| PRKAG2 | 3.524436 | 0.251745 | 14 |
| MSI2 | 4.173561 | 0.321043 | 13 |
| CMIP | 4.027842 | 0.335653 | 12 |
| TNS3 | 3.867169 | 0.322264 | 12 |
| FBRSL1 | 3.797234 | 0.316436 | 12 |
| MIRLET7BHG | 3.723759 | 0.310313 | 12 |
| ZC3H3 | 3.464802 | 0.288733 | 12 |
| ADGRD1 | 3.416781 | 0.284732 | 12 |
| FGFR2 | 3.448292 | 0.313481 | 11 |
| ANAPC16 | 3.384766 | 0.307706 | 11 |
| SPON2 | 3.240691 | 0.294608 | 11 |
| ACOT7 | 4.742578 | 0.474258 | 10 |
| OBI1-AS1 | 3.735848 | 0.373585 | 10 |
| FMN1 | 3.643263 | 0.364326 | 10 |
| NBEA | 3.290281 | 0.329028 | 10 |
| GAS7 | 3.287849 | 0.328785 | 10 |
| RGS12 | 3.21931 | 0.321931 | 10 |
| SND1 | 6.119553 | 0.67995 | 9 |
| ATP11A | 4.62361 | 0.513734 | 9 |
| TRAPPC12 | 4.425617 | 0.491735 | 9 |
| ADAMTS2 | 4.14856 | 0.460951 | 9 |
| RUNX1 | 3.551438 | 0.394604 | 9 |
| DLEU1 | 4.021061 | 0.502633 | 8 |
| SYNJ2 | 3.405088 | 0.425636 | 8 |
| MSRA | 3.27781 | 0.409726 | 8 |
| RXRA | 3.946638 | 0.563805 | 7 |
| VPS13D | 3.880843 | 0.554406 | 7 |
| NAV1 | 3.73432 | 0.533474 | 7 |
| FBXL18 | 3.527527 | 0.587921 | 6 |
| FMNL2 | 3.275497 | 0.545916 | 6 |
| RUNDC3A | 4.650154 | 0.930031 | 5 |
| ARHGEF7 | 3.309919 | 0.661984 | 5 |
| TSNAX-DISC1 | 3.267592 | 0.653518 | 5 |
| KLHL25 | 3.181519 | 0.636304 | 5 |
| ZAR1 | 3.916304 | 1.958152 | 2 |

TABLE 100
Cancer Type LGG_MYB_A

| Gene site | imp_sum | imp_mean | n |
|---|---|---|---|
| PTPRN2 | 26.29143 | 0.320627 | 82 |
| PRDM16 | 21.21807 | 0.298846 | 71 |
| PCDHGA1 | 8.16692 | 0.138422 | 59 |
| PCDHGA2 | 7.850534 | 0.137729 | 57 |
| PCDHGA3 | 7.534148 | 0.139521 | 54 |
| PCDHGB1 | 7.534148 | 0.142154 | 53 |
| PCDHGA4 | 7.217762 | 0.141525 | 51 |
| PCDHGB2 | 6.80743 | 0.138927 | 49 |
| PCDHGA5 | 6.857864 | 0.145912 | 47 |
| PCDHGB3 | 6.446917 | 0.149928 | 43 |
| PCDHGA6 | 6.130531 | 0.153263 | 40 |
| HDAC4 | 15.14366 | 0.409288 | 37 |
| PCDHGA7 | 5.814145 | 0.157139 | 37 |
| PAX6 | 16.6925 | 0.476929 | 35 |
| RBFOX3 | 9.111279 | 0.260322 | 35 |
| PCDHGB4 | 6.130531 | 0.175158 | 35 |
| PCDHGA8 | 6.130531 | 0.175158 | 35 |
| DIP2C | 11.70908 | 0.365909 | 32 |
| PCDHGB5 | 6.130531 | 0.191579 | 32 |
| PCDHGA9 | 5.814145 | 0.187553 | 31 |
| SOX2-OT | 10.59281 | 0.365269 | 29 |
| PCDHGB6 | 5.434719 | 0.187404 | 29 |
| PCDHGA10 | 5.118333 | 0.182798 | 28 |
| SHANK2 | 8.876006 | 0.341385 | 26 |
| ADARB2 | 7.537938 | 0.289921 | 26 |
| AGAP1 | 8.40558 | 0.336223 | 25 |
| CAMTA1 | 7.763566 | 0.310543 | 25 |
| PDGFRA | 6.514455 | 0.260578 | 25 |
| SATB2 | 6.728159 | 0.28034 | 24 |
| PCDHGB7 | 5.118333 | 0.213264 | 24 |
| RPTOR | 10.82497 | 0.470651 | 23 |
| NCOR2 | 10.41423 | 0.452793 | 23 |
| INPP5A | 7.025501 | 0.305457 | 23 |
| HOXB3 | 6.240577 | 0.271329 | 23 |
| NXN | 5.796623 | 0.252027 | 23 |
| PCDHGA11 | 4.801947 | 0.20878 | 23 |
| PRKCZ | 7.662516 | 0.348296 | 22 |
| SKI | 11.08687 | 0.527946 | 21 |
| ABR | 6.446972 | 0.322349 | 20 |
| FRMD4A | 5.1939 | 0.259695 | 20 |
| SDK1 | 5.027435 | 0.251372 | 20 |
| ZNF423 | 11.04971 | 0.581564 | 19 |
| MAD1L1 | 10.99 | 0.578421 | 19 |
| CASZ1 | 8.386398 | 0.441389 | 19 |
| SMG1P2 | 5.578786 | 0.29362 | 19 |
| BOLA2 | 5.578786 | 0.29362 | 19 |
| LOC613038 | 5.578786 | 0.29362 | 19 |
| SEPTIN9 | 8.84043 | 0.491135 | 18 |
| FOXK1 | 6.569609 | 0.364978 | 18 |
| MCF2L | 5.792536 | 0.321808 | 18 |
| TBC1D16 | 5.737236 | 0.318735 | 18 |
| ANKRD11 | 5.543978 | 0.307999 | 18 |
| OPCML | 6.014814 | 0.353813 | 17 |
| PAX6-AS1 | 4.947244 | 0.291014 | 17 |
| RCN1 | 4.947244 | 0.291014 | 17 |
| NAV2 | 6.648902 | 0.415556 | 16 |
| FOXP1 | 6.374021 | 0.398376 | 16 |
| GLI2 | 8.757455 | 0.58383 | 15 |
| KIRREL3 | 6.571073 | 0.438072 | 15 |
| NFIX | 6.394432 | 0.426295 | 15 |
| ZBTB20 | 6.005432 | 0.400362 | 15 |
| EMX2OS | 5.739645 | 0.382643 | 15 |
| BAIAP2 | 4.842575 | 0.322838 | 15 |
| SLX1B-SULT1A4 | 4.676131 | 0.311742 | 15 |
| SLX1A | 4.676131 | 0.311742 | 15 |
| CUX1 | 7.265301 | 0.51895 | 14 |
| RPS6KA2 | 7.2188 | 0.515629 | 14 |
| PRKAG2 | 4.906524 | 0.350466 | 14 |
| MSI2 | 8.707651 | 0.669819 | 13 |
| MYT1L | 6.635139 | 0.510395 | 13 |
| RFX4 | 6.006326 | 0.462025 | 13 |
| GSE1 | 4.928383 | 0.379106 | 13 |
| CLYBL | 4.744826 | 0.364987 | 13 |
| ZC3H3 | 6.383408 | 0.531951 | 12 |
| CMIP | 6.246763 | 0.520564 | 12 |
| MIRLET7BHG | 5.445528 | 0.453794 | 12 |
| MEGF6 | 5.170835 | 0.430903 | 12 |
| CTNNA2 | 4.953259 | 0.412772 | 12 |
| TBX4 | 4.845798 | 0.403817 | 12 |
| SPON2 | 5.815477 | 0.52868 | 11 |
| RAD51B | 5.263935 | 0.47854 | 11 |
| ZC3H12D | 5.156671 | 0.468788 | 11 |
| SH3RF3 | 5.703608 | 0.570361 | 10 |
| AKAP13 | 5.229688 | 0.522969 | 10 |
| IGF1R | 4.676857 | 0.467686 | 10 |
| ATP11A | 6.235484 | 0.692832 | 9 |
| ASAP1 | 5.628994 | 0.625444 | 9 |
| RUNX1 | 5.502947 | 0.611439 | 9 |
| TSPAN9 | 5.099097 | 0.566566 | 9 |
| ADAMTS2 | 4.897346 | 0.54415 | 9 |
| SND1 | 4.870835 | 0.541204 | 9 |
| TRAPPC12 | 4.807277 | 0.534142 | 9 |
| NOTCH1 | 4.725715 | 0.525079 | 9 |
| LHX4 | 5.078995 | 0.634874 | 8 |
| MSRA | 4.831149 | 0.603894 | 8 |
| NAV1 | 5.405609 | 0.77223 | 7 |
| RUNDC3A | 4.967815 | 0.993563 | 5 |
| TSNAX-DISC1 | 4.966489 | 0.993298 | 5 |
| RBMS3 | 5.011413 | 1.252853 | 4 |
| GRIN2B | 4.981407 | 1.660469 | 3 |

TABLE 101
Cancer Type LGG_MYB_B

| Gene site | imp_sum | imp_mean | n |
|---|---|---|---|
| PTPRN2 | 9.894068 | 0.120659 | 82 |
| PRDM16 | 6.835973 | 0.096281 | 71 |
| PCDHGA1 | 2.924209 | 0.049563 | 59 |
| PCDHGA2 | 2.924209 | 0.051302 | 57 |
| PCDHGA3 | 2.291437 | 0.042434 | 54 |
| PCDHGB1 | 2.291437 | 0.043235 | 53 |
| PCDHGA4 | 2.291437 | 0.04493 | 51 |
| PCDHGB2 | 2.291437 | 0.046764 | 49 |
| PCDHGA5 | 2.291437 | 0.048754 | 47 |
| HDAC4 | 6.1271 | 0.165597 | 37 |
| PAX6 | 3.644378 | 0.104125 | 35 |
| RBFOX3 | 2.273223 | 0.064949 | 35 |
| DIP2C | 3.935759 | 0.122992 | 32 |
| SOX2-OT | 7.260823 | 0.250373 | 29 |
| SHANK2 | 2.749789 | 0.105761 | 26 |
| AGAP1 | 4.89778 | 0.195911 | 25 |
| CAMTA1 | 3.840148 | 0.153606 | 25 |
| PDGFRA | 2.344615 | 0.093785 | 25 |
| MEIS1 | 3.259669 | 0.13582 | 24 |
| SATB2 | 2.465852 | 0.102744 | 24 |
| RPTOR | 3.341045 | 0.145263 | 23 |
| NCOR2 | 2.605574 | 0.113286 | 23 |
| PRKCZ | 3.737433 | 0.169883 | 22 |
| SKI | 6.522588 | 0.310599 | 21 |
| FRMD4A | 4.133611 | 0.206681 | 20 |
| SDK1 | 2.531088 | 0.126554 | 20 |
| ABR | 2.127596 | 0.10638 | 20 |
| MAD1L1 | 6.182977 | 0.32542 | 19 |
| ZNF423 | 4.378512 | 0.230448 | 19 |
| SMG1P2 | 2.828645 | 0.148876 | 19 |
| BOLA2 | 2.828645 | 0.148876 | 19 |
| LOC613038 | 2.828645 | 0.148876 | 19 |
| CASZ1 | 2.304714 | 0.121301 | 19 |
| FOXK1 | 4.758755 | 0.264375 | 18 |
| RBFOX1 | 3.374229 | 0.187457 | 18 |
| TBC1D16 | 3.083552 | 0.171308 | 18 |
| SEPTIN9 | 2.679801 | 0.148878 | 18 |
| MCF2L | 2.166848 | 0.12038 | 18 |
| OPCML | 3.863382 | 0.227258 | 17 |
| NAV2 | 2.84974 | 0.178109 | 16 |
| FOXP1 | 2.480408 | 0.155026 | 16 |
| EBF3 | 2.3211 | 0.145069 | 16 |
| GLI2 | 3.825441 | 0.255029 | 15 |
| EMX2OS | 3.097589 | 0.206506 | 15 |
| ZBTB20 | 3.096569 | 0.206438 | 15 |
| KIRREL3 | 2.12156 | 0.141437 | 15 |
| CUX1 | 2.933436 | 0.209531 | 14 |
| RPS6KA2 | 2.791658 | 0.199404 | 14 |
| CACNA1H | 2.648296 | 0.189164 | 14 |
| TBX5 | 2.51764 | 0.179831 | 14 |
| PRKAG2 | 2.319059 | 0.165647 | 14 |
| MSI2 | 4.075431 | 0.313495 | 13 |
| RFX4 | 2.98633 | 0.229718 | 13 |
| MYT1L | 2.643675 | 0.20336 | 13 |
| TNS3 | 3.343622 | 0.278635 | 12 |
| CMIP | 3.160924 | 0.26341 | 12 |
| ISLR2 | 3.052967 | 0.254414 | 12 |
| ADGRD1 | 2.769872 | 0.230823 | 12 |
| FBRSL1 | 2.016728 | 0.168061 | 12 |
| CCDC140 | 4.614115 | 0.419465 | 11 |
| ZC3H12D | 3.119557 | 0.283596 | 11 |
| RAD51B | 2.623407 | 0.238492 | 11 |
| SH3RF3 | 2.873823 | 0.287382 | 10 |
| LBX1-AS1 | 2.521427 | 0.252143 | 10 |
| OTX1 | 2.448407 | 0.244841 | 10 |
| GRID1 | 2.340932 | 0.234093 | 10 |
| RGS12 | 2.322792 | 0.232279 | 10 |
| ANKS1B | 2.208493 | 0.220849 | 10 |
| MAML2 | 2.04004 | 0.204004 | 10 |
| PAX3 | 3.636353 | 0.404039 | 9 |
| ATP11A | 2.872912 | 0.319212 | 9 |
| RUNX1 | 2.672577 | 0.296953 | 9 |
| NOTCH1 | 2.525311 | 0.28059 | 9 |
| KCNH2 | 2.463535 | 0.273726 | 9 |
| SND1 | 2.355613 | 0.261735 | 9 |
| KCNMA1 | 2.183475 | 0.242608 | 9 |
| GRIK2 | 2.694068 | 0.336759 | 8 |
| MSRA | 2.68183 | 0.335229 | 8 |
| RGS20 | 2.265403 | 0.283175 | 8 |
| MACROD1 | 2.045585 | 0.255698 | 8 |
| ASPSCR1 | 2.018782 | 0.252348 | 8 |
| DUSP6 | 3.414944 | 0.487849 | 7 |
| NAV1 | 2.56527 | 0.366467 | 7 |
| LINC00461 | 2.430513 | 0.347216 | 7 |
| NRXN3 | 2.375256 | 0.339322 | 7 |
| RBMS1 | 2.336389 | 0.33377 | 7 |
| FHIT | 2.209925 | 0.315704 | 7 |
| VPS13D | 2.080121 | 0.29716 | 7 |
| COQ8A | 2.607277 | 0.434546 | 6 |
| FBXL18 | 2.406226 | 0.401038 | 6 |
| SLC22A18AS | 2.041973 | 0.340329 | 6 |
| RUNDC3A | 2.474362 | 0.494872 | 5 |
| ARHGEF7 | 2.035714 | 0.407143 | 5 |
| OSBPL3 | 2.712546 | 0.678136 | 4 |
| RBMS3 | 2.537584 | 0.634396 | 4 |
| GRIN2B | 3.514634 | 1.171545 | 3 |
| DAGLB | 2.513521 | 0.83784 | 3 |
| SLC6A9 | 2.240435 | 0.746812 | 3 |
| PRDM2 | 2.140595 | 0.713532 | 3 |
| SOX10 | 2.748606 | 1.374303 | 2 |

TABLE 102
Cancer Type LGG_MYB_C

| Gene site | imp_sum | imp_mean | n |
|---|---|---|---|
| PTPRN2 | 20.20583 | 0.246413 | 82 |
| PRDM16 | 17.28914 | 0.243509 | 71 |
| PCDHGA1 | 4.924756 | 0.08347 | 59 |
| PCDHGA2 | 4.924756 | 0.086399 | 57 |
| PCDHGA3 | 4.60837 | 0.08534 | 54 |
| PCDHGB1 | 4.60837 | 0.08695 | 53 |
| PCDHGA4 | 4.291984 | 0.084157 | 51 |
| PCDHGB2 | 3.975598 | 0.081135 | 49 |
| HDAC4 | 10.06805 | 0.272109 | 37 |
| PAX6 | 15.08031 | 0.430866 | 35 |
| RBFOX3 | 8.465599 | 0.241874 | 35 |
| DIP2C | 10.80977 | 0.337805 | 32 |
| SOX2-OT | 8.438282 | 0.290975 | 29 |
| GALNT9 | 4.570214 | 0.169267 | 27 |
| SHANK2 | 5.741485 | 0.220826 | 26 |
| ADARB2 | 3.994562 | 0.153637 | 26 |
| AGAP1 | 8.791625 | 0.351665 | 25 |
| CAMTA1 | 6.88132 | 0.275253 | 25 |
| PDGFRA | 5.659159 | 0.226366 | 25 |
| SATB2 | 7.35095 | 0.30629 | 24 |
| RPTOR | 11.96567 | 0.520246 | 23 |
| NCOR2 | 8.201648 | 0.356593 | 23 |
| HOXB3 | 4.853942 | 0.211041 | 23 |
| INPP5A | 4.841783 | 0.210512 | 23 |
| RIMBP2 | 4.131433 | 0.179628 | 23 |
| NXN | 3.984332 | 0.173232 | 23 |
| PRKCZ | 6.612622 | 0.300574 | 22 |
| SKI | 13.19454 | 0.628312 | 21 |
| SDK1 | 6.583704 | 0.329185 | 20 |
| ABR | 4.146009 | 0.2073 | 20 |
| MAD1L1 | 11.45751 | 0.603027 | 19 |
| ZNF423 | 9.218881 | 0.485204 | 19 |
| CASZ1 | 8.599236 | 0.452591 | 19 |
| SMG1P2 | 4.843875 | 0.254941 | 19 |
| BOLA2 | 4.843875 | 0.254941 | 19 |
| LOC613038 | 4.843875 | 0.254941 | 19 |
| FOXK1 | 7.433257 | 0.412959 | 18 |
| SEPTIN9 | 6.898671 | 0.383259 | 18 |
| MCF2L | 6.080352 | 0.337797 | 18 |
| RBFOX1 | 4.847449 | 0.269303 | 18 |
| TBC1D16 | 4.803718 | 0.266873 | 18 |
| ANKRD11 | 4.704091 | 0.261338 | 18 |
| OPCML | 6.136104 | 0.360947 | 17 |
| PAX6-AS1 | 5.627414 | 0.331024 | 17 |
| RCN1 | 5.627414 | 0.331024 | 17 |
| TBX15 | 4.66374 | 0.274338 | 17 |
| NAV2 | 5.587066 | 0.349192 | 16 |
| EBF3 | 5.346808 | 0.334175 | 16 |
| FOXP1 | 4.619708 | 0.288732 | 16 |
| GLI2 | 9.468685 | 0.631246 | 15 |
| ZBTB20 | 5.256564 | 0.350438 | 15 |
| BAIAP2 | 4.249964 | 0.283331 | 15 |
| RPS6KA2 | 6.945756 | 0.496125 | 14 |
| TBX5 | 4.767199 | 0.340514 | 14 |
| CUX1 | 4.567314 | 0.326237 | 14 |
| IQSEC1 | 4.544448 | 0.324603 | 14 |
| C7orf50 | 4.426138 | 0.316153 | 14 |
| MSI2 | 6.825236 | 0.525018 | 13 |
| RFX4 | 5.374636 | 0.413434 | 13 |
| MYT1L | 5.10985 | 0.393065 | 13 |
| GSE1 | 4.902216 | 0.377094 | 13 |
| KIF26B | 4.234824 | 0.325756 | 13 |
| ZC3H3 | 5.958219 | 0.496518 | 12 |
| CMIP | 4.941409 | 0.411784 | 12 |
| TNS3 | 4.795633 | 0.399636 | 12 |
| FBRSL1 | 4.35464 | 0.362887 | 12 |
| ADGRD1 | 3.98479 | 0.332066 | 12 |
| ZC3H12D | 6.127102 | 0.557009 | 11 |
| RAD51B | 5.338869 | 0.485352 | 11 |
| CACNA1C | 4.235148 | 0.385013 | 11 |
| CCDC140 | 4.231694 | 0.384699 | 11 |
| VGLLA | 4.106819 | 0.373347 | 11 |
| SPON2 | 4.059063 | 0.369006 | 11 |
| ACOT7 | 4.827365 | 0.482737 | 10 |
| SH3RF3 | 4.309594 | 0.430959 | 10 |
| ANKS1B | 4.241103 | 0.42411 | 10 |
| SND1 | 6.994693 | 0.777188 | 9 |
| CACNA2D4 | 5.266681 | 0.585187 | 9 |
| ATP11A | 4.720307 | 0.524479 | 9 |
| GPC6 | 4.65542 | 0.517269 | 9 |
| RUNX1 | 4.628724 | 0.514303 | 9 |
| TRAPPC12 | 4.612695 | 0.512522 | 9 |
| ADAMTS2 | 4.574137 | 0.508237 | 9 |
| SLC22A18 | 4.305448 | 0.478383 | 9 |
| AXIN2 | 4.123233 | 0.458137 | 9 |
| NOTCH1 | 3.941099 | 0.4379 | 9 |
| LHX4 | 5.258583 | 0.657323 | 8 |
| LINC00311 | 4.611648 | 0.576456 | 8 |
| DLEU1 | 4.375936 | 0.546992 | 8 |
| ASPSCR1 | 4.105064 | 0.513133 | 8 |
| MSRA | 4.098997 | 0.512375 | 8 |
| DUSP6 | 8.13263 | 1.161804 | 7 |
| NAV1 | 4.915243 | 0.702178 | 7 |
| LINC00461 | 4.07618 | 0.582311 | 7 |
| FBXL18 | 4.502532 | 0.750422 | 6 |
| FAM181A | 4.098243 | 0.683041 | 6 |
| RUNDC3A | 5.333783 | 1.066757 | 5 |
| TSNAX-DISC1 | 5.037322 | 1.007464 | 5 |
| RBMS3 | 4.399929 | 1.099982 | 4 |
| GRIN2B | 4.044385 | 1.348128 | 3 |

TABLE 103
Cancer Type LGG_MYB_D

| Gene site | imp_sum | imp_mean | n |
|---|---|---|---|
| PTPRN2 | 23.27595 | 0.283853 | 82 |
| PRDM16 | 16.21061 | 0.228318 | 71 |
| PCDHGA1 | 9.160539 | 0.155263 | 59 |
| PCDHGA2 | 9.160539 | 0.160711 | 57 |
| PCDHGA3 | 7.852367 | 0.145414 | 54 |
| PCDHGB1 | 7.852367 | 0.148158 | 53 |
| PCDHGA4 | 7.852367 | 0.153968 | 51 |
| PCDHGB2 | 7.405548 | 0.151134 | 49 |
| PCDHGA5 | 7.264056 | 0.154554 | 47 |
| PCDHGB3 | 5.979533 | 0.139059 | 43 |
| PCDHGA6 | 5.21626 | 0.130406 | 40 |
| HDAC4 | 16.02144 | 0.433012 | 37 |
| PCDHGA7 | 5.21626 | 0.14098 | 37 |
| PAX6 | 12.2992 | 0.351406 | 35 |
| RBFOX3 | 6.122396 | 0.174926 | 35 |
| PCDHGB4 | 5.532646 | 0.158076 | 35 |
| PCDHGA8 | 5.532646 | 0.158076 | 35 |
| DIP2C | 9.983397 | 0.311981 | 32 |
| PCDHGB5 | 5.349908 | 0.167185 | 32 |
| PCDHGA9 | 5.349908 | 0.172578 | 31 |
| SOX2-OT | 9.671774 | 0.333509 | 29 |
| PCDHGB6 | 4.458488 | 0.153741 | 29 |
| ADARB2 | 5.588489 | 0.214942 | 26 |
| AGAP1 | 9.213862 | 0.368554 | 25 |
| PDGFRA | 7.30522 | 0.292209 | 25 |
| CAMTA1 | 5.162567 | 0.206503 | 25 |
| MEIS1 | 6.02547 | 0.251061 | 24 |
| SATB2 | 5.621512 | 0.23423 | 24 |
| RPTOR | 9.213192 | 0.400574 | 23 |
| NCOR2 | 6.408949 | 0.27865 | 23 |
| HOXB3 | 6.227616 | 0.270766 | 23 |
| INPP5A | 5.694734 | 0.247597 | 23 |
| PRKCZ | 6.459749 | 0.293625 | 22 |
| SKI | 12.18697 | 0.580332 | 21 |
| FRMD4A | 6.85308 | 0.342654 | 20 |
| ABR | 4.623305 | 0.231165 | 20 |
| MAD1L1 | 10.44305 | 0.549634 | 19 |
| SMG1P2 | 6.689881 | 0.352099 | 19 |
| BOLA2 | 6.689881 | 0.352099 | 19 |
| LOC613038 | 6.689881 | 0.352099 | 19 |
| CASZ1 | 5.910579 | 0.311083 | 19 |
| ZNF423 | 5.371146 | 0.282692 | 19 |
| FOXK1 | 6.442305 | 0.357906 | 18 |
| TBC1D16 | 6.239467 | 0.346637 | 18 |
| SEPTIN9 | 5.949188 | 0.33051 | 18 |
| RBFOX1 | 4.629235 | 0.25718 | 18 |
| MCF2L | 4.384944 | 0.243608 | 18 |
| OPCML | 8.442759 | 0.496633 | 17 |
| TBX15 | 4.712791 | 0.277223 | 17 |
| NAV2 | 6.350364 | 0.396898 | 16 |
| SORBS2 | 5.402963 | 0.337685 | 16 |
| FOXP1 | 4.987706 | 0.311732 | 16 |
| GLI2 | 10.69003 | 0.712669 | 15 |
| EMX2OS | 6.133218 | 0.408881 | 15 |
| ZBTB20 | 5.331774 | 0.355452 | 15 |
| LRMDA | 4.22455 | 0.281637 | 15 |
| TBX5 | 7.168475 | 0.512034 | 14 |
| RPS6KA2 | 6.102015 | 0.435858 | 14 |
| IQSEC1 | 5.481145 | 0.39151 | 14 |
| CUX1 | 5.281736 | 0.377267 | 14 |
| C7orf50 | 4.578078 | 0.327006 | 14 |
| PRKAG2 | 4.47899 | 0.319928 | 14 |
| MSI2 | 6.722419 | 0.517109 | 13 |
| RFX4 | 6.635387 | 0.510414 | 13 |
| MYT1L | 6.108125 | 0.469856 | 13 |
| KIF26B | 4.407831 | 0.339064 | 13 |
| CMIP | 6.108514 | 0.509043 | 12 |
| MIRLET7BHG | 5.178592 | 0.431549 | 12 |
| TBX4 | 5.011236 | 0.417603 | 12 |
| ADGRD1 | 4.376792 | 0.364733 | 12 |
| CCDC140 | 5.725205 | 0.520473 | 11 |
| RAD51B | 4.883983 | 0.443998 | 11 |
| ZC3H12D | 4.397805 | 0.3998 | 11 |
| ANAPC16 | 4.3899 | 0.399082 | 11 |
| GLUD1P2 | 4.13606 | 0.376005 | 11 |
| TSPAN4 | 4.482039 | 0.448204 | 10 |
| ACOT7 | 4.480182 | 0.448018 | 10 |
| NR2F1-AS1 | 4.411228 | 0.441123 | 10 |
| AKAP13 | 4.391567 | 0.439157 | 10 |
| SH3RF3 | 4.192477 | 0.419248 | 10 |
| SND1 | 6.302178 | 0.700242 | 9 |
| ATP11A | 5.52456 | 0.61384 | 9 |
| NOTCH1 | 5.406527 | 0.600725 | 9 |
| ADAMTS2 | 5.093618 | 0.565958 | 9 |
| ASAP1 | 4.613364 | 0.512596 | 9 |
| PACS2 | 4.499113 | 0.499901 | 9 |
| RUNX1 | 4.160767 | 0.462307 | 9 |
| TRAPPC12 | 4.153276 | 0.461475 | 9 |
| KCNMA1 | 4.103531 | 0.455948 | 9 |
| LINC00311 | 4.754081 | 0.59426 | 8 |
| ESRRG | 4.166404 | 0.520801 | 8 |
| PPP2R2B | 4.13858 | 0.517322 | 8 |
| MSRA | 4.107945 | 0.513493 | 8 |
| DUSP6 | 6.069555 | 0.867079 | 7 |
| VPS13D | 4.62615 | 0.660879 | 7 |
| GAK | 4.356915 | 0.622416 | 7 |
| NAV1 | 4.354487 | 0.62207 | 7 |
| FAM181A | 4.252081 | 0.70868 | 6 |
| RUNDC3A | 4.698262 | 0.939652 | 5 |
| SOX10 | 4.990034 | 2.495017 | 2 |

TABLE 104
Cancer Type LIPN

| Gene site | imp_sum | imp_mean | n |
|---|---|---|---|
| PTPRN2 | 6.731022 | 0.082086 | 82 |
| PRDM16 | 9.056435 | 0.127555 | 71 |
| HDAC4 | 6.920459 | 0.187039 | 37 |
| RBFOX3 | 4.482568 | 0.128073 | 35 |
| PAX6 | 3.647653 | 0.104219 | 35 |
| DIP2C | 6.348889 | 0.198403 | 32 |
| SOX2-OT | 3.711222 | 0.127973 | 29 |
| ADARB2 | 6.182806 | 0.2378 | 26 |
| SHANK2 | 3.204426 | 0.123247 | 26 |
| CAMTA1 | 6.741431 | 0.269657 | 25 |
| AGAP1 | 4.874396 | 0.194976 | 25 |
| PDGFRA | 3.166753 | 0.12667 | 25 |
| SATB2 | 2.720432 | 0.113351 | 24 |
| RPTOR | 10.67932 | 0.464318 | 23 |
| INPP5A | 5.333496 | 0.231891 | 23 |
| NCOR2 | 4.784433 | 0.208019 | 23 |
| RIMBP2 | 3.878209 | 0.168618 | 23 |
| PRKCZ | 5.076408 | 0.230746 | 22 |
| SKI | 11.38324 | 0.542059 | 21 |
| ZIC4 | 2.675222 | 0.127392 | 21 |
| ABR | 3.659858 | 0.182993 | 20 |
| FRMD4A | 3.233023 | 0.161651 | 20 |
| MAD1L1 | 8.907459 | 0.468814 | 19 |
| ZNF423 | 6.517334 | 0.343018 | 19 |
| SMG1P2 | 6.286146 | 0.33085 | 19 |
| BOLA2 | 6.286146 | 0.33085 | 19 |
| LOC613038 | 6.286146 | 0.33085 | 19 |
| CASZ1 | 3.545162 | 0.186587 | 19 |
| KCNQ1 | 2.803672 | 0.147562 | 19 |
| ANKRD11 | 3.883679 | 0.21576 | 18 |
| FOXK1 | 3.581042 | 0.198947 | 18 |
| TBC1D16 | 3.291546 | 0.182864 | 18 |
| SEPTIN9 | 3.145068 | 0.174726 | 18 |
| OPCML | 3.807395 | 0.223964 | 17 |
| TBX15 | 3.227398 | 0.189847 | 17 |
| GLI2 | 6.244295 | 0.416286 | 15 |
| NFIX | 3.842107 | 0.25614 | 15 |
| SLX1B-SULT1A4 | 3.508078 | 0.233872 | 15 |
| SLX1A | 3.508078 | 0.233872 | 15 |
| LOC606724 | 3.508078 | 0.233872 | 15 |
| ZBTB20 | 3.393498 | 0.226233 | 15 |
| C7orf50 | 4.232753 | 0.302339 | 14 |
| PRKAG2 | 3.853803 | 0.275272 | 14 |
| MIR548F5 | 3.550057 | 0.253575 | 14 |
| CUX1 | 3.514123 | 0.251009 | 14 |
| GSE1 | 5.333509 | 0.41027 | 13 |
| MSI2 | 5.045792 | 0.388138 | 13 |
| CLYBL | 3.955888 | 0.304299 | 13 |
| MYT1L | 3.641557 | 0.28012 | 13 |
| KIF26B | 3.115991 | 0.239692 | 13 |
| MIR9-3HG | 2.847369 | 0.219028 | 13 |
| MAML3 | 4.351798 | 0.36265 | 12 |
| ZC3H3 | 4.308123 | 0.35901 | 12 |
| FBRSL1 | 3.596014 | 0.299668 | 12 |
| CMIP | 3.053446 | 0.254454 | 12 |
| MEIS2 | 3.037518 | 0.253126 | 12 |
| RASA3 | 2.849411 | 0.237451 | 12 |
| MIRLET7BHG | 2.720116 | 0.226676 | 12 |
| ZC3H12D | 5.705381 | 0.518671 | 11 |
| CACNA1C | 3.106977 | 0.282452 | 11 |
| TBCD | 2.993291 | 0.272117 | 11 |
| ACOT7 | 4.5126 | 0.45126 | 10 |
| NR2F1-AS1 | 3.941043 | 0.394104 | 10 |
| LMF1 | 2.876585 | 0.287659 | 10 |
| RGS12 | 2.712554 | 0.271255 | 10 |
| ATP11A | 5.393156 | 0.59924 | 9 |
| ADAMTS2 | 5.08888 | 0.565431 | 9 |
| TRAPPC12 | 3.099343 | 0.344371 | 9 |
| SND1 | 3.000188 | 0.333354 | 9 |
| KAZN | 2.994854 | 0.332762 | 9 |
| SLC22A18 | 2.898108 | 0.322012 | 9 |
| SPECC1 | 2.848229 | 0.31647 | 9 |
| BAHCC1 | 4.507579 | 0.563447 | 8 |
| MSRA | 3.594303 | 0.449288 | 8 |
| LINC00311 | 3.134488 | 0.391811 | 8 |
| RORA | 2.807937 | 0.350992 | 8 |
| PPP2R2B | 2.79953 | 0.349941 | 8 |
| MCC | 2.725199 | 0.34065 | 8 |
| GAK | 4.535148 | 0.647878 | 7 |
| RXRA | 3.758968 | 0.536995 | 7 |
| DUSP6 | 3.5019 | 0.500271 | 7 |
| ITPK1 | 2.882647 | 0.411807 | 7 |
| COQ8A | 3.96694 | 0.661157 | 6 |
| CRADD | 3.5242 | 0.587367 | 6 |
| FBXL18 | 3.099236 | 0.516539 | 6 |
| PRR5L | 4.743315 | 0.948663 | 5 |
| ARHGEF7 | 4.358366 | 0.871673 | 5 |
| RUNDC3A | 4.230101 | 0.84602 | 5 |
| TSNAX-DISC1 | 3.971266 | 0.794253 | 5 |
| TK1 | 3.759883 | 0.751977 | 5 |
| BCAR1 | 2.967733 | 0.593547 | 5 |
| AP2A2 | 2.928493 | 0.585699 | 5 |
| TTLL10 | 2.856842 | 0.571368 | 5 |
| TOLLIP | 2.67497 | 0.534994 | 5 |
| RBMS3 | 3.938709 | 0.984677 | 4 |
| SLC25A22 | 3.14499 | 1.04833 | 3 |
| ANKLE2 | 4.355455 | 2.177728 | 2 |
| SLC25A10 | 3.758294 | 1.879147 | 2 |
| CHTF18 | 2.700933 | 1.350466 | 2 |
| ACMSD | 2.670176 | 2.670176 | 1 |

TABLE 105
Cancer Type MB_G34_I

| Gene site | imp_sum | imp_mean | n |
|---|---|---|---|
| PTPRN2 | 15.21477 | 0.185546 | 82 |
| PRDM16 | 13.99515 | 0.197115 | 71 |
| HDAC4 | 15.05659 | 0.406935 | 37 |
| PAX6 | 10.99121 | 0.314035 | 35 |
| RBFOX3 | 9.720497 | 0.277728 | 35 |
| DIP2C | 5.267308 | 0.164603 | 32 |
| GALNT9 | 11.235 | 0.416111 | 27 |
| SHANK2 | 6.139225 | 0.236124 | 26 |
| ADARB2 | 4.713313 | 0.181281 | 26 |
| CAMTA1 | 8.61843 | 0.344737 | 25 |
| AGAP1 | 8.576106 | 0.343044 | 25 |
| PDGFRA | 3.561496 | 0.14246 | 25 |
| MEIS1 | 3.752097 | 0.156337 | 24 |
| RPTOR | 9.10743 | 0.395975 | 23 |
| RIMBP2 | 8.129395 | 0.353452 | 23 |
| INPP5A | 7.378585 | 0.320808 | 23 |
| NCOR2 | 7.302389 | 0.317495 | 23 |
| NXN | 6.254104 | 0.271918 | 23 |
| PRKCZ | 6.210744 | 0.282307 | 22 |
| SKI | 6.826888 | 0.32509 | 21 |
| ABR | 6.348683 | 0.317434 | 20 |
| MAD1L1 | 15.24947 | 0.802603 | 19 |
| CASZ1 | 7.148909 | 0.376258 | 19 |
| SMG1P2 | 6.024295 | 0.317068 | 19 |
| BOLA2 | 6.024295 | 0.317068 | 19 |
| LOC613038 | 6.024295 | 0.317068 | 19 |
| ZNF423 | 5.916425 | 0.311391 | 19 |
| KCNQ1 | 4.662981 | 0.24542 | 19 |
| CFAP46 | 3.287552 | 0.173029 | 19 |
| RBFOX1 | 5.193119 | 0.288507 | 18 |
| SEPTIN9 | 4.630468 | 0.257248 | 18 |
| FOXK1 | 4.379068 | 0.243282 | 18 |
| ANKRD11 | 4.039479 | 0.224415 | 18 |
| SIM1 | 5.337274 | 0.313957 | 17 |
| PAX6-AS1 | 5.125289 | 0.301488 | 17 |
| RCN1 | 5.125289 | 0.301488 | 17 |
| OPCML | 4.841857 | 0.284815 | 17 |
| TBX15 | 4.156233 | 0.244484 | 17 |
| HBG2 | 3.582301 | 0.210724 | 17 |
| FOXP1 | 7.656811 | 0.478551 | 16 |
| NAV2 | 5.590731 | 0.349421 | 16 |
| KNDC1 | 5.127187 | 0.341812 | 15 |
| ZBTB20 | 4.614327 | 0.307622 | 15 |
| NFIX | 4.566382 | 0.304425 | 15 |
| GLI2 | 4.154642 | 0.276976 | 15 |
| BAIAP2 | 4.089022 | 0.272601 | 15 |
| C7orf50 | 5.987317 | 0.427665 | 14 |
| IQSEC1 | 5.521955 | 0.394425 | 14 |
| CUX1 | 4.926357 | 0.351883 | 14 |
| PRKAG2 | 4.728344 | 0.337739 | 14 |
| RPS6KA2 | 4.723242 | 0.337374 | 14 |
| MOB2 | 3.873649 | 0.276689 | 14 |
| ARHGEF10 | 3.870515 | 0.276465 | 14 |
| MSI2 | 6.361069 | 0.489313 | 13 |
| MYT1L | 4.843261 | 0.372559 | 13 |
| RFX4 | 4.65499 | 0.358076 | 13 |
| CLYBL | 3.8267 | 0.294362 | 13 |
| FBRSL1 | 5.87314 | 0.489428 | 12 |
| ZC3H3 | 3.999881 | 0.333323 | 12 |
| CSMD1 | 3.899739 | 0.324978 | 12 |
| CMIP | 3.871864 | 0.322655 | 12 |
| LRBA | 3.42567 | 0.285473 | 12 |
| ADGRD1 | 3.385211 | 0.282101 | 12 |
| COL4A1 | 4.603563 | 0.418506 | 11 |
| TBCD | 3.949157 | 0.359014 | 11 |
| RAD51B | 3.597217 | 0.32702 | 11 |
| AUTS2 | 4.614624 | 0.461462 | 10 |
| AKAP13 | 4.399463 | 0.439946 | 10 |
| SNTG2 | 4.025889 | 0.402589 | 10 |
| STK32C | 3.914647 | 0.391465 | 10 |
| CHST11 | 3.564208 | 0.356421 | 10 |
| NBEA | 3.471319 | 0.347132 | 10 |
| LMF1 | 3.252013 | 0.325201 | 10 |
| AXIN2 | 5.679917 | 0.631102 | 9 |
| ADAMTS2 | 5.592358 | 0.621373 | 9 |
| SND1 | 5.569503 | 0.618834 | 9 |
| ATP11A | 4.782212 | 0.531357 | 9 |
| GPC6 | 4.612468 | 0.512496 | 9 |
| CACNA2D4 | 4.219973 | 0.468886 | 9 |
| TSPAN9 | 4.196219 | 0.466247 | 9 |
| VRK2 | 9.809346 | 1.226168 | 8 |
| PPP2R2B | 4.7627 | 0.595338 | 8 |
| DNMT3A | 4.54865 | 0.568581 | 8 |
| MSRA | 4.300761 | 0.537595 | 8 |
| TRAPPC9 | 3.895066 | 0.486883 | 8 |
| ASPSCR1 | 3.587117 | 0.44839 | 8 |
| AFF3 | 3.463264 | 0.432908 | 8 |
| PLEC | 3.469843 | 0.495692 | 7 |
| PITPNC1 | 3.27975 | 0.468536 | 7 |
| TRAK1 | 3.699044 | 0.616507 | 6 |
| CRADD | 3.603323 | 0.600554 | 6 |
| KDM4B | 3.299808 | 0.549968 | 6 |
| ARHGEF7 | 4.059958 | 0.811992 | 5 |
| TSNAX-DISC1 | 4.032988 | 0.806598 | 5 |
| SNX29 | 3.323028 | 0.664606 | 5 |
| TK1 | 3.266153 | 0.653231 | 5 |
| EXT1 | 3.723467 | 0.930867 | 4 |
| SOGA1 | 3.214915 | 1.071638 | 3 |
| CHTF18 | 4.254009 | 2.127004 | 2 |
| ANKLE2 | 4.207152 | 2.103576 | 2 |

TABLE 106
Cancer Type MB_G34_II

| Gene site | imp_sum | imp_mean | n |
|---|---|---|---|
| PTPRN2 | 12.74639 | 0.155444 | 82 |
| PRDM16 | 13.53703 | 0.190662 | 71 |
| PCDHGA1 | 5.680155 | 0.096274 | 59 |
| PCDHGA2 | 6.101345 | 0.107041 | 57 |
| PCDHGA3 | 5.346211 | 0.099004 | 54 |
| PCDHGB1 | 5.346211 | 0.100872 | 53 |
| PCDHGA4 | 5.662597 | 0.111031 | 51 |
| PCDHGB2 | 5.662597 | 0.115563 | 49 |
| PCDHGA5 | 5.662597 | 0.120481 | 47 |
| PCDHGB3 | 5.346211 | 0.12433 | 43 |
| PCDHGA6 | 5.029825 | 0.125746 | 40 |
| HDAC4 | 13.47601 | 0.364216 | 37 |
| PCDHGA7 | 5.029825 | 0.135941 | 37 |
| RBFOX3 | 5.762697 | 0.164648 | 35 |
| PCDHGB4 | 4.397053 | 0.12563 | 35 |
| PCDHGA8 | 4.397053 | 0.12563 | 35 |
| DIP2C | 5.296077 | 0.165502 | 32 |
| PCDHGB5 | 4.397053 | 0.137408 | 32 |
| PCDHGA9 | 3.849052 | 0.124163 | 31 |
| SOX2-OT | 4.564477 | 0.157396 | 29 |
| PCDHGB6 | 3.849052 | 0.132726 | 29 |
| PCDHGA10 | 3.849052 | 0.137466 | 28 |
| GALNT9 | 12.32559 | 0.456503 | 27 |
| ADARB2 | 5.603404 | 0.215516 | 26 |
| SHANK2 | 5.402806 | 0.2078 | 26 |
| AGAP1 | 7.424954 | 0.296998 | 25 |
| CAMTA1 | 6.513135 | 0.260525 | 25 |
| MEIS1 | 4.4845 | 0.186854 | 24 |
| PCDHGB7 | 3.849052 | 0.160377 | 24 |
| RPTOR | 8.737766 | 0.379903 | 23 |
| INPP5A | 6.413009 | 0.278826 | 23 |
| RIMBP2 | 4.94583 | 0.215036 | 23 |
| NCOR2 | 4.636315 | 0.201579 | 23 |
| NXN | 4.272086 | 0.185743 | 23 |
| PCDHGA11 | 3.532666 | 0.153594 | 23 |
| PRKCZ | 7.474125 | 0.339733 | 22 |
| SKI | 7.30758 | 0.34798 | 21 |
| SDK1 | 4.802333 | 0.240117 | 20 |
| FRMD4A | 4.44969 | 0.222485 | 20 |
| MAD1L1 | 14.57738 | 0.767231 | 19 |
| CASZ1 | 6.899549 | 0.363134 | 19 |
| ZNF423 | 5.180383 | 0.272652 | 19 |
| SMG1P2 | 4.077975 | 0.21463 | 19 |
| BOLA2 | 4.077975 | 0.21463 | 19 |
| LOC613038 | 4.077975 | 0.21463 | 19 |
| ANKRD11 | 5.335731 | 0.29643 | 18 |
| RBFOX1 | 4.681435 | 0.26008 | 18 |
| MCF2L | 4.295341 | 0.23863 | 18 |
| FOXK1 | 4.236444 | 0.235358 | 18 |
| SEPTIN9 | 3.476701 | 0.19315 | 18 |
| SIM1 | 6.314996 | 0.37147 | 17 |
| TBX15 | 4.392645 | 0.258391 | 17 |
| OPCML | 3.71019 | 0.218246 | 17 |
| FOXP1 | 7.802048 | 0.487628 | 16 |
| NAV2 | 3.845894 | 0.240368 | 16 |
| KNDC1 | 6.151625 | 0.410108 | 15 |
| GLI2 | 5.423438 | 0.361563 | 15 |
| ZBTB20 | 5.123853 | 0.34159 | 15 |
| EMX2OS | 4.663506 | 0.3109 | 15 |
| KIRREL3 | 3.868391 | 0.257893 | 15 |
| BAIAP2 | 3.340001 | 0.222667 | 15 |
| NFATC1 | 3.316835 | 0.221122 | 15 |
| NFIX | 3.292725 | 0.219515 | 15 |
| IQSEC1 | 5.181107 | 0.370079 | 14 |
| C7orf50 | 4.968043 | 0.35486 | 14 |
| CUX1 | 4.661009 | 0.332929 | 14 |
| MOB2 | 4.283801 | 0.305986 | 14 |
| CACNA1H | 3.670581 | 0.262184 | 14 |
| GNG7 | 3.388734 | 0.242052 | 14 |
| MSI2 | 5.854141 | 0.450319 | 13 |
| MYT1L | 5.022727 | 0.386364 | 13 |
| GSE1 | 4.289678 | 0.329975 | 13 |
| FBRSL1 | 5.542824 | 0.461902 | 12 |
| ZC3H3 | 5.160154 | 0.430013 | 12 |
| CSMD1 | 3.343871 | 0.278656 | 12 |
| GNA12 | 3.269859 | 0.272488 | 12 |
| AKAP13 | 4.584297 | 0.45843 | 10 |
| LBX1-AS1 | 3.278201 | 0.32782 | 10 |
| ATP11A | 5.039492 | 0.559944 | 9 |
| ADAMTS2 | 4.637422 | 0.515269 | 9 |
| GPC6 | 4.451665 | 0.494629 | 9 |
| AXIN2 | 4.177111 | 0.464123 | 9 |
| SND1 | 4.06486 | 0.451651 | 9 |
| SSBP3 | 3.706025 | 0.411781 | 9 |
| PDE6B | 3.491528 | 0.387948 | 9 |
| KAZN | 3.397258 | 0.377473 | 9 |
| CACNA2D4 | 3.344224 | 0.37158 | 9 |
| ASAP1 | 3.281443 | 0.364605 | 9 |
| PPP2R2B | 4.157437 | 0.51968 | 8 |
| TRAPPC9 | 4.044266 | 0.505533 | 8 |
| MSRA | 3.725977 | 0.465747 | 8 |
| GAK | 3.32362 | 0.474803 | 7 |
| PITPNC1 | 3.300358 | 0.47148 | 7 |
| COLEC11 | 3.730471 | 0.621745 | 6 |
| ARHGEF7 | 3.733163 | 0.746633 | 5 |
| TSNAX-DISC1 | 3.660898 | 0.73218 | 5 |
| CPEB1-AS1 | 3.41389 | 0.682778 | 5 |
| EML1 | 3.313764 | 0.828441 | 4 |
| LOC339874 | 3.749811 | 1.249937 | 3 |
| CHTF18 | 4.105874 | 2.052937 | 2 |

TABLE 107
Cancer Type MB_G34_III

| Gene site | imp_sum | imp_mean | n |
|---|---|---|---|
| PTPRN2 | 14.7975 | 0.180457 | 82 |
| PRDM16 | 17.7935 | 0.250613 | 71 |
| PCDHGA4 | 3.301688 | 0.064739 | 51 |
| PCDHGB2 | 3.301688 | 0.067381 | 49 |
| HDAC4 | 15.89626 | 0.429629 | 37 |
| RBFOX3 | 9.015163 | 0.257576 | 35 |
| PAX6 | 6.048704 | 0.17282 | 35 |
| DIP2C | 7.277516 | 0.227422 | 32 |
| PCDHGB5 | 3.618074 | 0.113065 | 32 |
| PCDHGA9 | 3.217874 | 0.103802 | 31 |
| GALNT9 | 13.00801 | 0.481778 | 27 |
| SHANK2 | 3.631955 | 0.139691 | 26 |
| ADARB2 | 3.273835 | 0.125917 | 26 |
| AGAP1 | 10.3121 | 0.412484 | 25 |
| CAMTA1 | 7.452654 | 0.298106 | 25 |
| PDGFRA | 4.596988 | 0.18388 | 25 |
| SATB2 | 3.175686 | 0.13232 | 24 |
| RPTOR | 7.891204 | 0.343096 | 23 |
| NCOR2 | 6.955156 | 0.302398 | 23 |
| INPP5A | 6.462027 | 0.280958 | 23 |
| RIMBP2 | 6.059287 | 0.263447 | 23 |
| NXN | 5.423888 | 0.235821 | 23 |
| PRKCZ | 4.474655 | 0.203393 | 22 |
| SKI | 5.782114 | 0.275339 | 21 |
| ABR | 6.255236 | 0.312762 | 20 |
| SDK1 | 4.515301 | 0.225765 | 20 |
| MAD1L1 | 15.11224 | 0.795381 | 19 |
| ZNF423 | 5.857209 | 0.308274 | 19 |
| SMG1P2 | 5.796451 | 0.305076 | 19 |
| BOLA2 | 5.796451 | 0.305076 | 19 |
| LOC613038 | 5.796451 | 0.305076 | 19 |
| CASZ1 | 5.064561 | 0.266556 | 19 |
| FOXK1 | 4.875026 | 0.270835 | 18 |
| ANKRD11 | 4.659964 | 0.258887 | 18 |
| TBC1D16 | 3.530374 | 0.196132 | 18 |
| HBG2 | 4.828729 | 0.284043 | 17 |
| OPCML | 4.282999 | 0.251941 | 17 |
| TBX15 | 3.693365 | 0.217257 | 17 |
| FOXP1 | 7.819508 | 0.488719 | 16 |
| NAV2 | 4.755238 | 0.297202 | 16 |
| KNDC1 | 6.627559 | 0.441837 | 15 |
| KIRREL3 | 5.070696 | 0.338046 | 15 |
| BAIAP2 | 4.656342 | 0.310423 | 15 |
| ZBTB20 | 4.388692 | 0.292579 | 15 |
| C7orf50 | 5.919713 | 0.422837 | 14 |
| RPS6KA2 | 5.695952 | 0.406854 | 14 |
| MOB2 | 4.067668 | 0.290548 | 14 |
| PRKAG2 | 4.057194 | 0.2898 | 14 |
| IQSEC1 | 3.935264 | 0.28109 | 14 |
| CUX1 | 3.910719 | 0.279337 | 14 |
| ARHGEF10 | 3.843161 | 0.274512 | 14 |
| MIR548F5 | 3.551018 | 0.253644 | 14 |
| GNG7 | 3.269011 | 0.233501 | 14 |
| MSI2 | 7.8038 | 0.600292 | 13 |
| GSE1 | 5.661925 | 0.435533 | 13 |
| MYT1L | 4.991771 | 0.383982 | 13 |
| RFX4 | 3.282977 | 0.252537 | 13 |
| FBRSL1 | 5.460206 | 0.455017 | 12 |
| MAML3 | 4.796059 | 0.399672 | 12 |
| ZC3H3 | 4.548573 | 0.379048 | 12 |
| CMIP | 4.470874 | 0.372573 | 12 |
| ADGRD1 | 4.190215 | 0.349185 | 12 |
| TNS3 | 3.750401 | 0.312533 | 12 |
| RAD51B | 4.047182 | 0.367926 | 11 |
| ANAPC16 | 3.40214 | 0.309285 | 11 |
| TBCD | 3.146873 | 0.286079 | 11 |
| AKAP13 | 3.858257 | 0.385826 | 10 |
| LBX1-AS1 | 3.738787 | 0.373879 | 10 |
| AUTS2 | 3.589948 | 0.358995 | 10 |
| SPPL2B | 3.508733 | 0.350873 | 10 |
| FMN1 | 3.484234 | 0.348423 | 10 |
| STK32C | 3.35421 | 0.335421 | 10 |
| AXIN2 | 5.46599 | 0.607332 | 9 |
| ATP11A | 4.793503 | 0.532611 | 9 |
| SND1 | 4.675186 | 0.519465 | 9 |
| ADAMTS2 | 4.119619 | 0.457735 | 9 |
| ASAP1 | 4.117795 | 0.457533 | 9 |
| GPC6 | 4.069688 | 0.452188 | 9 |
| TSPAN9 | 3.990656 | 0.443406 | 9 |
| CACNA2D4 | 3.902544 | 0.433616 | 9 |
| SSBP3 | 3.601051 | 0.400117 | 9 |
| VRK2 | 7.800481 | 0.97506 | 8 |
| PPP2R2B | 4.310545 | 0.538818 | 8 |
| DNMT3A | 3.937105 | 0.492138 | 8 |
| TRAPPC9 | 3.643122 | 0.45539 | 8 |
| DLEU1 | 3.586537 | 0.448317 | 8 |
| ASPSCR1 | 3.52984 | 0.44123 | 8 |
| MSRA | 3.365206 | 0.420651 | 8 |
| GAK | 4.133953 | 0.590565 | 7 |
| PITPNC1 | 4.01956 | 0.574223 | 7 |
| TRAK1 | 4.188055 | 0.698009 | 6 |
| CRADD | 3.633965 | 0.605661 | 6 |
| MYO16 | 3.490851 | 0.581809 | 6 |
| TSNAX-DISC1 | 4.541564 | 0.908313 | 5 |
| CPEB1-AS1 | 3.981913 | 0.796383 | 5 |
| ARHGEF7 | 3.487939 | 0.697588 | 5 |
| CASP8 | 3.234689 | 0.646938 | 5 |
| LOC339874 | 3.535577 | 1.178526 | 3 |
| CHTF18 | 4.356605 | 2.178303 | 2 |
| ANKLE2 | 3.982797 | 1.991399 | 2 |

TABLE 108
Cancer Type MB_G34_IV

| Gene site | imp_sum | imp_mean | n |
|---|---|---|---|
| PTPRN2 | 10.83321 | 0.132112 | 82 |
| PRDM16 | 11.50299 | 0.162014 | 71 |
| PCDHGA1 | 4.072054 | 0.069018 | 59 |
| PCDHGA2 | 3.755668 | 0.065889 | 57 |
| PCDHGA3 | 3.755668 | 0.069549 | 54 |
| PCDHGB1 | 3.755668 | 0.070862 | 53 |
| PCDHGA4 | 3.755668 | 0.073641 | 51 |
| PCDHGB2 | 3.755668 | 0.076646 | 49 |
| PCDHGA5 | 3.755668 | 0.079908 | 47 |
| PCDHGB3 | 3.755668 | 0.087341 | 43 |
| HDAC4 | 16.18352 | 0.437393 | 37 |
| PCDHGA7 | 3.755668 | 0.101505 | 37 |
| RBFOX3 | 10.2518 | 0.292908 | 35 |
| PAX6 | 7.480697 | 0.213734 | 35 |
| PCDHGB4 | 3.755668 | 0.107305 | 35 |
| PCDHGA8 | 3.755668 | 0.107305 | 35 |
| DIP2C | 6.618094 | 0.206815 | 32 |
| PCDHGB5 | 3.755668 | 0.117365 | 32 |
| SOX2-OT | 10.14846 | 0.349947 | 29 |
| GALNT9 | 12.59928 | 0.46664 | 27 |
| ADARB2 | 6.984609 | 0.268639 | 26 |
| SHANK2 | 3.576848 | 0.137571 | 26 |
| CAMTA1 | 10.48882 | 0.419553 | 25 |
| AGAP1 | 8.930669 | 0.357227 | 25 |
| SATB2 | 4.666845 | 0.194452 | 24 |
| MEIS1 | 4.566273 | 0.190261 | 24 |
| RPTOR | 9.535014 | 0.414566 | 23 |
| NCOR2 | 7.285519 | 0.316762 | 23 |
| NXN | 6.055428 | 0.263279 | 23 |
| RIMBP2 | 5.965647 | 0.259376 | 23 |
| INPP5A | 5.795189 | 0.251965 | 23 |
| PRKCZ | 9.59318 | 0.436054 | 22 |
| SKI | 8.127488 | 0.387023 | 21 |
| FRMD4A | 5.105498 | 0.255275 | 20 |
| ABR | 4.470979 | 0.223549 | 20 |
| SDK1 | 3.740007 | 0.187 | 20 |
| MAD1L1 | 14.70789 | 0.774099 | 19 |
| SMG1P2 | 6.317952 | 0.332524 | 19 |
| BOLA2 | 6.317952 | 0.332524 | 19 |
| LOC613038 | 6.317952 | 0.332524 | 19 |
| CASZ1 | 5.713871 | 0.30073 | 19 |
| ZNF423 | 4.570964 | 0.240577 | 19 |
| KCNQ1 | 4.169022 | 0.219422 | 19 |
| RBFOX1 | 5.531657 | 0.307314 | 18 |
| ANKRD11 | 4.37895 | 0.243275 | 18 |
| TBC1D16 | 4.136146 | 0.229786 | 18 |
| FOXK1 | 3.841966 | 0.213443 | 18 |
| PAX6-AS1 | 5.58225 | 0.328368 | 17 |
| RCN1 | 5.58225 | 0.328368 | 17 |
| OPCML | 4.51488 | 0.265581 | 17 |
| FOXP1 | 7.148465 | 0.446779 | 16 |
| NAV2 | 4.558608 | 0.284913 | 16 |
| SORBS2 | 3.795118 | 0.237195 | 16 |
| NFIX | 5.333722 | 0.355581 | 15 |
| ZBTB20 | 5.109232 | 0.340615 | 15 |
| KNDC1 | 5.067394 | 0.337826 | 15 |
| GLI2 | 4.87772 | 0.325181 | 15 |
| BAIAP2 | 4.480791 | 0.298719 | 15 |
| IQSEC1 | 6.483397 | 0.4631 | 14 |
| CUX1 | 5.545862 | 0.396133 | 14 |
| PRKAG2 | 5.327675 | 0.380548 | 14 |
| C7orf50 | 4.800099 | 0.342864 | 14 |
| ARHGEF10 | 4.360194 | 0.311442 | 14 |
| MOB2 | 3.909447 | 0.279246 | 14 |
| MSI2 | 6.564374 | 0.504952 | 13 |
| MYT1L | 5.843539 | 0.449503 | 13 |
| GSE1 | 4.535568 | 0.34889 | 13 |
| RFX4 | 3.880353 | 0.298489 | 13 |
| CLYBL | 3.800938 | 0.29238 | 13 |
| ZC3H3 | 6.596127 | 0.549677 | 12 |
| FBRSL1 | 4.890676 | 0.407556 | 12 |
| CMIP | 4.778508 | 0.398209 | 12 |
| MAML3 | 4.161716 | 0.34681 | 12 |
| RAD51B | 4.162748 | 0.378432 | 11 |
| SLC38A10 | 4.026507 | 0.366046 | 11 |
| AKAP13 | 5.211785 | 0.521178 | 10 |
| AUTS2 | 4.624032 | 0.462403 | 10 |
| TSPAN4 | 3.669455 | 0.366946 | 10 |
| ATP11A | 5.709846 | 0.634427 | 9 |
| AXIN2 | 5.384306 | 0.598256 | 9 |
| SND1 | 5.220556 | 0.580062 | 9 |
| ADAMTS2 | 5.121794 | 0.569088 | 9 |
| TSPAN9 | 4.387251 | 0.487472 | 9 |
| ASAP1 | 4.383918 | 0.487102 | 9 |
| CACNA2D4 | 4.234207 | 0.470467 | 9 |
| GPC6 | 3.728289 | 0.414254 | 9 |
| VRK2 | 11.87504 | 1.484379 | 8 |
| PPP2R2B | 5.757154 | 0.719644 | 8 |
| POU6F2 | 4.305534 | 0.538192 | 8 |
| DNMT3A | 3.872041 | 0.484005 | 8 |
| DGKG | 5.205547 | 0.74365 | 7 |
| TRAK1 | 4.530712 | 0.755119 | 6 |
| CRADD | 4.031996 | 0.671999 | 6 |
| FBXL18 | 3.823593 | 0.637265 | 6 |
| PBX1 | 3.588716 | 0.598119 | 6 |
| DNAJC17 | 3.582465 | 0.597078 | 6 |
| TSNAX-DISC1 | 4.381651 | 0.87633 | 5 |
| CPEB1-AS1 | 3.876459 | 0.775292 | 5 |
| GSG1 | 3.838918 | 0.95973 | 4 |
| CHTF18 | 4.578998 | 2.289499 | 2 |

TABLE 109
Cancer Type MB_G34_V

| Gene site | imp_sum | imp_mean | n |
|---|---|---|---|
| PTPRN2 | 15.02368 | 0.183216 | 82 |
| PRDM16 | 13.41886 | 0.188998 | 71 |
| PCDHGA1 | 3.065898 | 0.051964 | 59 |
| PCDHGA2 | 3.065898 | 0.053788 | 57 |
| PCDHGA3 | 3.065898 | 0.056776 | 54 |
| PCDHGB1 | 3.065898 | 0.057847 | 53 |
| PCDHGA4 | 3.16386 | 0.062036 | 51 |
| PCDHGB2 | 3.16386 | 0.064569 | 49 |
| PCDHGA5 | 3.16386 | 0.067316 | 47 |
| HDAC4 | 17.31966 | 0.468099 | 37 |
| PAX6 | 8.428562 | 0.240816 | 35 |
| RBFOX3 | 3.922926 | 0.112084 | 35 |
| DIP2C | 2.991318 | 0.093479 | 32 |
| SOX2-OT | 5.144005 | 0.177379 | 29 |
| GALNT9 | 10.38172 | 0.384508 | 27 |
| SHANK2 | 4.511083 | 0.173503 | 26 |
| ADARB2 | 3.52234 | 0.135475 | 26 |
| CAMTA1 | 8.519389 | 0.340776 | 25 |
| AGAP1 | 6.689657 | 0.267586 | 25 |
| PDGFRA | 4.069607 | 0.162784 | 25 |
| RPTOR | 8.105897 | 0.35243 | 23 |
| NCOR2 | 6.317118 | 0.274657 | 23 |
| RIMBP2 | 6.002695 | 0.260987 | 23 |
| INPP5A | 5.458839 | 0.237341 | 23 |
| NXN | 4.695211 | 0.20414 | 23 |
| PRKCZ | 4.592679 | 0.208758 | 22 |
| SKI | 6.257065 | 0.297955 | 21 |
| ZIC4 | 3.985685 | 0.189795 | 21 |
| ABR | 4.831867 | 0.241593 | 20 |
| SDK1 | 4.369185 | 0.218459 | 20 |
| MAD1L1 | 15.70623 | 0.826644 | 19 |
| CASZ1 | 6.481234 | 0.341118 | 19 |
| ZNF423 | 5.926592 | 0.311926 | 19 |
| SMG1P2 | 5.729856 | 0.301571 | 19 |
| BOLA2 | 5.729856 | 0.301571 | 19 |
| LOC613038 | 5.729856 | 0.301571 | 19 |
| ANKRD11 | 4.661094 | 0.25895 | 18 |
| FOXK1 | 4.579725 | 0.254429 | 18 |
| SEPTIN9 | 3.983606 | 0.221311 | 18 |
| RBFOX1 | 3.736773 | 0.207599 | 18 |
| SIM1 | 6.169379 | 0.362905 | 17 |
| OPCML | 6.068681 | 0.356981 | 17 |
| TBX15 | 3.817539 | 0.224561 | 17 |
| PAX6-AS1 | 3.360435 | 0.197673 | 17 |
| RCN1 | 3.360435 | 0.197673 | 17 |
| FOXP1 | 7.540532 | 0.471283 | 16 |
| NAV2 | 3.306268 | 0.206642 | 16 |
| GLI2 | 4.726612 | 0.315107 | 15 |
| KIRREL3 | 4.323392 | 0.288226 | 15 |
| KNDC1 | 4.300115 | 0.286674 | 15 |
| ZBTB20 | 3.68549 | 0.245699 | 15 |
| BAIAP2 | 3.120851 | 0.208057 | 15 |
| C7orf50 | 5.481035 | 0.391503 | 14 |
| IQSEC1 | 4.496178 | 0.321156 | 14 |
| PRKAG2 | 4.202065 | 0.300148 | 14 |
| MIR548F5 | 3.680712 | 0.262908 | 14 |
| ARHGEF10 | 3.628172 | 0.259155 | 14 |
| CACNA1H | 3.292159 | 0.235154 | 14 |
| RPS6KA2 | 2.986116 | 0.213294 | 14 |
| CUX1 | 2.968351 | 0.212025 | 14 |
| MSI2 | 6.420698 | 0.4939 | 13 |
| MYT1L | 5.041558 | 0.387812 | 13 |
| KIF26B | 3.1165 | 0.239731 | 13 |
| FBRSL1 | 5.282675 | 0.440223 | 12 |
| CMIP | 3.938958 | 0.328246 | 12 |
| GNA12 | 3.670793 | 0.305899 | 12 |
| ADGRD1 | 3.100876 | 0.258406 | 12 |
| RAD51B | 3.753865 | 0.34126 | 11 |
| TBCD | 3.148106 | 0.286191 | 11 |
| AUTS2 | 5.178221 | 0.517822 | 10 |
| LMF1 | 3.745211 | 0.374521 | 10 |
| KCNIP4 | 3.594265 | 0.359426 | 10 |
| AKAP13 | 3.474133 | 0.347413 | 10 |
| STK32C | 3.223752 | 0.322375 | 10 |
| SNTG2 | 3.181238 | 0.318124 | 10 |
| SND1 | 5.78745 | 0.64305 | 9 |
| ATP11A | 5.549079 | 0.616564 | 9 |
| ADAMTS2 | 5.070177 | 0.563353 | 9 |
| AXIN2 | 4.408033 | 0.489781 | 9 |
| CACNA2D4 | 3.86314 | 0.429238 | 9 |
| GPC6 | 3.508593 | 0.389844 | 9 |
| TRAPPC12 | 3.361639 | 0.373515 | 9 |
| PACS2 | 3.019137 | 0.33546 | 9 |
| APBA2 | 2.968133 | 0.329793 | 9 |
| VRK2 | 6.038017 | 0.754752 | 8 |
| PPP2R2B | 4.733325 | 0.591666 | 8 |
| MSRA | 3.190686 | 0.398836 | 8 |
| LHX4 | 3.165907 | 0.395738 | 8 |
| CACHD1 | 3.077802 | 0.384725 | 8 |
| PITPNC1 | 4.553902 | 0.650557 | 7 |
| TRAK1 | 3.987901 | 0.66465 | 6 |
| FBXL18 | 3.290669 | 0.548445 | 6 |
| TSNAX-DISC1 | 4.152699 | 0.83054 | 5 |
| ARHGEF7 | 4.077908 | 0.815582 | 5 |
| RUNDC3A | 3.27271 | 0.654542 | 5 |
| NPHP4 | 3.018238 | 0.603648 | 5 |
| EXT1 | 3.188407 | 0.797102 | 4 |
| TUBA1C | 3.059964 | 0.764991 | 4 |
| SLC25A22 | 3.133245 | 1.044415 | 3 |
| ANKLE2 | 4.199293 | 2.099646 | 2 |

TABLE 110
Cancer Type MB_G34_VI

| Gene site | imp_sum | imp_mean | n |
|---|---|---|---|
| PTPRN2 | 10.17979 | 0.124144 | 82 |
| PRDM16 | 11.67227 | 0.164398 | 71 |
| PCDHGA1 | 3.480246 | 0.058987 | 59 |
| PCDHGA2 | 3.480246 | 0.061057 | 57 |
| PCDHGA3 | 3.16386 | 0.05859 | 54 |
| PCDHGB1 | 3.16386 | 0.059695 | 53 |
| PCDHGA4 | 3.16386 | 0.062036 | 51 |
| PCDHGB2 | 3.16386 | 0.064569 | 49 |
| PCDHGB3 | 3.16386 | 0.073578 | 43 |
| HDAC4 | 9.744729 | 0.263371 | 37 |
| PAX6 | 8.568253 | 0.244807 | 35 |
| RBFOX3 | 8.19285 | 0.234081 | 35 |
| DIP2C | 6.787527 | 0.21211 | 32 |
| SOX2-OT | 4.234859 | 0.14603 | 29 |
| GALNT9 | 5.760336 | 0.213346 | 27 |
| SHANK2 | 3.358318 | 0.129166 | 26 |
| CAMTA1 | 9.053347 | 0.362134 | 25 |
| AGAP1 | 7.179943 | 0.287198 | 25 |
| PDGFRA | 3.471099 | 0.138844 | 25 |
| RPTOR | 8.284353 | 0.360189 | 23 |
| NXN | 5.924414 | 0.257583 | 23 |
| NCOR2 | 5.889471 | 0.256064 | 23 |
| INPP5A | 5.523952 | 0.240172 | 23 |
| PRKCZ | 5.805273 | 0.263876 | 22 |
| SKI | 8.221779 | 0.391513 | 21 |
| SIM2 | 3.126904 | 0.1489 | 21 |
| FRMD4A | 5.072868 | 0.253643 | 20 |
| ABR | 4.938759 | 0.246938 | 20 |
| SDK1 | 3.616258 | 0.180813 | 20 |
| MAD1L1 | 15.08777 | 0.794093 | 19 |
| CASZ1 | 7.558691 | 0.397826 | 19 |
| SMG1P2 | 5.981934 | 0.314839 | 19 |
| BOLA2 | 5.981934 | 0.314839 | 19 |
| LOC613038 | 5.981934 | 0.314839 | 19 |
| ZNF423 | 3.774906 | 0.198679 | 19 |
| ANKRD11 | 5.977816 | 0.332101 | 18 |
| FOXK1 | 5.126775 | 0.284821 | 18 |
| RBFOX1 | 4.580482 | 0.254471 | 18 |
| TBC1D16 | 4.244049 | 0.235781 | 18 |
| SEPTIN9 | 3.720862 | 0.206715 | 18 |
| HOXA3 | 3.192502 | 0.177361 | 18 |
| SIM1 | 4.398925 | 0.25876 | 17 |
| TBX15 | 4.300947 | 0.252997 | 17 |
| OPCML | 4.070115 | 0.239419 | 17 |
| FOXP1 | 6.653114 | 0.41582 | 16 |
| NAV2 | 3.306215 | 0.206638 | 16 |
| KNDC1 | 4.03037 | 0.268691 | 15 |
| BAIAP2 | 3.990254 | 0.266017 | 15 |
| GLI2 | 3.975502 | 0.265033 | 15 |
| NFIX | 3.914943 | 0.260996 | 15 |
| COL23A1 | 3.42571 | 0.228381 | 15 |
| ZBTB20 | 3.248796 | 0.216586 | 15 |
| RPS6KA2 | 5.475875 | 0.391134 | 14 |
| ARHGEF10 | 5.037701 | 0.359836 | 14 |
| CUX1 | 4.752663 | 0.339476 | 14 |
| IQSEC1 | 4.448833 | 0.317774 | 14 |
| CACNA1H | 4.134716 | 0.295337 | 14 |
| PRKAG2 | 3.83548 | 0.273963 | 14 |
| C7orf50 | 3.718669 | 0.265619 | 14 |
| MSI2 | 5.875307 | 0.451947 | 13 |
| MYT1L | 4.451341 | 0.342411 | 13 |
| RFX4 | 3.148192 | 0.242169 | 13 |
| FBRSL1 | 4.537368 | 0.378114 | 12 |
| ZC3H3 | 4.41386 | 0.367822 | 12 |
| CMIP | 3.487553 | 0.290629 | 12 |
| GNA12 | 3.230051 | 0.269171 | 12 |
| CSMD1 | 3.219359 | 0.26828 | 12 |
| RAD51B | 3.769786 | 0.342708 | 11 |
| ANAPC16 | 3.663236 | 0.333021 | 11 |
| AUTS2 | 5.381906 | 0.538191 | 10 |
| FMN1 | 3.894166 | 0.389417 | 10 |
| AKAP13 | 3.674493 | 0.367449 | 10 |
| SPPL2B | 3.110089 | 0.311009 | 10 |
| ADAMTS2 | 5.97969 | 0.66441 | 9 |
| AXIN2 | 4.644633 | 0.51607 | 9 |
| CACNA2D4 | 4.153062 | 0.461451 | 9 |
| TSPAN9 | 4.120196 | 0.4578 | 9 |
| ATP11A | 3.821801 | 0.424645 | 9 |
| SND1 | 3.648233 | 0.405359 | 9 |
| GPC6 | 3.634651 | 0.40385 | 9 |
| ASAP1 | 3.191981 | 0.354665 | 9 |
| SSBP3 | 3.112073 | 0.345786 | 9 |
| VRK2 | 7.861226 | 0.982653 | 8 |
| PPP2R2B | 4.859435 | 0.607429 | 8 |
| CACHD1 | 3.485521 | 0.43569 | 8 |
| DLEU1 | 3.438064 | 0.429758 | 8 |
| SYNJ2 | 3.288412 | 0.411051 | 8 |
| PITPNC1 | 4.366461 | 0.62378 | 7 |
| MIR124-2HG | 3.521223 | 0.503032 | 7 |
| NAV1 | 3.352132 | 0.478876 | 7 |
| TRAK1 | 4.023501 | 0.670584 | 6 |
| FBXL18 | 3.697156 | 0.616193 | 6 |
| MYO16 | 3.325326 | 0.554221 | 6 |
| KDM4B | 3.154782 | 0.525797 | 6 |
| TSNAX-DISC1 | 4.513548 | 0.90271 | 5 |
| ARHGEF7 | 3.418039 | 0.683608 | 5 |
| PRR5L | 3.178152 | 0.63563 | 5 |
| DAGLB | 3.126133 | 1.042044 | 3 |
| ANKLE2 | 4.27943 | 2.139715 | 2 |
| CHTF18 | 3.98205 | 1.991025 | 2 |

TABLE 111
Cancer Type MB_G34_VII

| Gene site | imp_sum | imp_mean | n |
|---|---|---|---|
| PTPRN2 | 17.04639 | 0.207883 | 82 |
| PRDM16 | 11.53801 | 0.162507 | 71 |
| PCDHGA4 | 3.418749 | 0.067034 | 51 |
| PCDHGB2 | 3.418749 | 0.06977 | 49 |
| PCDHGA5 | 3.418749 | 0.072739 | 47 |
| PCDHGB3 | 3.418749 | 0.079506 | 43 |
| PCDHGA6 | 3.304608 | 0.082615 | 40 |
| HDAC4 | 10.74833 | 0.290495 | 37 |
| PAX6 | 12.88611 | 0.368175 | 35 |
| RBFOX3 | 7.249014 | 0.207115 | 35 |
| DIP2C | 4.86296 | 0.151968 | 32 |
| SOX2-OT | 4.555504 | 0.157086 | 29 |
| GALNT9 | 8.297959 | 0.307332 | 27 |
| SHANK2 | 6.660721 | 0.256182 | 26 |
| CAMTA1 | 8.372982 | 0.334919 | 25 |
| AGAP1 | 7.769507 | 0.31078 | 25 |
| SATB2 | 3.540531 | 0.147522 | 24 |
| RPTOR | 8.809254 | 0.383011 | 23 |
| NCOR2 | 6.919265 | 0.300838 | 23 |
| NXN | 5.018761 | 0.218207 | 23 |
| INPP5A | 4.405626 | 0.191549 | 23 |
| RIMBP2 | 3.938363 | 0.171233 | 23 |
| PRKCZ | 6.917698 | 0.314441 | 22 |
| SKI | 5.83892 | 0.278044 | 21 |
| ABR | 5.347094 | 0.267355 | 20 |
| FRMD4A | 4.905347 | 0.245267 | 20 |
| SDK1 | 4.260924 | 0.213046 | 20 |
| MAD1L1 | 16.30223 | 0.858012 | 19 |
| CASZ1 | 7.001381 | 0.368494 | 19 |
| SMG1P2 | 6.849276 | 0.360488 | 19 |
| BOLA2 | 6.849276 | 0.360488 | 19 |
| LOC613038 | 6.849276 | 0.360488 | 19 |
| ZNF423 | 4.929504 | 0.259448 | 19 |
| KCNQ1 | 3.717288 | 0.195647 | 19 |
| ANKRD11 | 6.106655 | 0.339259 | 18 |
| TBC1D16 | 4.832975 | 0.268499 | 18 |
| SEPTIN9 | 4.576042 | 0.254225 | 18 |
| FOXK1 | 4.219129 | 0.234396 | 18 |
| SIM1 | 5.678352 | 0.334021 | 17 |
| PAX6-AS1 | 4.920365 | 0.289433 | 17 |
| RCN1 | 4.920365 | 0.289433 | 17 |
| OPCML | 4.643683 | 0.273158 | 17 |
| FOXP1 | 4.504852 | 0.281553 | 16 |
| NAV2 | 4.067416 | 0.254213 | 16 |
| BAIAP2 | 4.327026 | 0.288468 | 15 |
| KNDC1 | 4.062649 | 0.270843 | 15 |
| GLI2 | 3.871486 | 0.258099 | 15 |
| NFIX | 3.67403 | 0.244935 | 15 |
| ZBTB20 | 3.399125 | 0.226608 | 15 |
| RPS6KA2 | 6.006307 | 0.429022 | 14 |
| MIR548F5 | 5.164099 | 0.368864 | 14 |
| C7orf50 | 4.769793 | 0.340699 | 14 |
| CUX1 | 4.451564 | 0.317969 | 14 |
| PRKAG2 | 4.423848 | 0.315989 | 14 |
| ARHGEF10 | 3.474581 | 0.248184 | 14 |
| MOB2 | 3.466234 | 0.247588 | 14 |
| MSI2 | 6.747519 | 0.51904 | 13 |
| MYT1L | 5.256997 | 0.404384 | 13 |
| GSE1 | 3.864862 | 0.297297 | 13 |
| RFX4 | 3.106126 | 0.238933 | 13 |
| FBRSL1 | 6.470299 | 0.539192 | 12 |
| ZC3H3 | 4.847501 | 0.403958 | 12 |
| CMIP | 4.417143 | 0.368095 | 12 |
| GNA12 | 3.368387 | 0.280699 | 12 |
| ADGRD1 | 3.31883 | 0.276569 | 12 |
| COL4A1 | 3.846087 | 0.349644 | 11 |
| TBCD | 3.438012 | 0.312547 | 11 |
| SLC38A10 | 3.411534 | 0.310139 | 11 |
| AUTS2 | 5.079352 | 0.507935 | 10 |
| AKAP13 | 4.669508 | 0.466951 | 10 |
| CHST11 | 3.239795 | 0.323979 | 10 |
| FMN1 | 3.198852 | 0.319885 | 10 |
| ADAMTS2 | 6.019738 | 0.66886 | 9 |
| ASAP1 | 5.521091 | 0.613455 | 9 |
| SND1 | 4.862382 | 0.540265 | 9 |
| ATP11A | 4.324377 | 0.480486 | 9 |
| CACNA2D4 | 4.292604 | 0.476956 | 9 |
| AXIN2 | 4.107988 | 0.456443 | 9 |
| TRAPPC12 | 3.656299 | 0.406255 | 9 |
| TSPAN9 | 3.573777 | 0.397086 | 9 |
| GPC6 | 3.34619 | 0.371799 | 9 |
| VRK2 | 9.410478 | 1.17631 | 8 |
| PPP2R2B | 5.123059 | 0.640382 | 8 |
| AFF3 | 3.560936 | 0.445117 | 8 |
| DNMT3A | 3.505303 | 0.438163 | 8 |
| MSRA | 3.282092 | 0.410261 | 8 |
| MACROD1 | 3.237537 | 0.404692 | 8 |
| GAK | 5.338333 | 0.762619 | 7 |
| PITPNC1 | 4.266097 | 0.609442 | 7 |
| KDM4B | 3.779773 | 0.629962 | 6 |
| TRAK1 | 3.520526 | 0.586754 | 6 |
| FBXL18 | 3.426544 | 0.571091 | 6 |
| COLEC11 | 3.399725 | 0.566621 | 6 |
| MYO16 | 3.249272 | 0.541545 | 6 |
| TSNAX-DISC1 | 4.644008 | 0.928802 | 5 |
| VAV2 | 3.821501 | 0.7643 | 5 |
| ARHGEF7 | 3.681206 | 0.736241 | 5 |
| EXT1 | 3.487271 | 0.871818 | 4 |
| ANKLE2 | 4.23297 | 2.116485 | 2 |
| CHTF18 | 4.140574 | 2.070287 | 2 |

TABLE 112
Cancer Type MB_G34_VIII

| Gene site | imp_sum | imp_mean | n |
|---|---|---|---|
| PTPRN2 | 12.41194 | 0.151365 | 82 |
| PRDM16 | 9.171053 | 0.12917 | 71 |
| PCDHGA5 | 2.847474 | 0.060585 | 47 |
| HDAC4 | 19.15223 | 0.517628 | 37 |
| RBFOX3 | 7.021825 | 0.200624 | 35 |
| PAX6 | 5.771277 | 0.164894 | 35 |
| DIP2C | 7.083844 | 0.22137 | 32 |
| GALNT9 | 8.220999 | 0.304481 | 27 |
| SHANK2 | 5.171992 | 0.198923 | 26 |
| ADARB2 | 3.869727 | 0.148836 | 26 |
| AGAP1 | 7.03262 | 0.281305 | 25 |
| CAMTA1 | 6.648568 | 0.265943 | 25 |
| PDGFRA | 3.818061 | 0.152722 | 25 |
| RPTOR | 8.99687 | 0.391168 | 23 |
| NCOR2 | 5.77417 | 0.251051 | 23 |
| INPP5A | 5.710913 | 0.248301 | 23 |
| NXN | 4.916837 | 0.213776 | 23 |
| RIMBP2 | 3.734723 | 0.162379 | 23 |
| PRKCZ | 4.604762 | 0.209307 | 22 |
| SKI | 8.27076 | 0.393846 | 21 |
| ABR | 3.627221 | 0.181361 | 20 |
| FRMD4A | 3.288809 | 0.16444 | 20 |
| MAD1L1 | 14.58326 | 0.76754 | 19 |
| SMG1P2 | 6.073956 | 0.319682 | 19 |
| BOLA2 | 6.073956 | 0.319682 | 19 |
| LOC613038 | 6.073956 | 0.319682 | 19 |
| ZNF423 | 5.20503 | 0.273949 | 19 |
| KCNQ1 | 4.682545 | 0.24645 | 19 |
| CASZ1 | 4.483706 | 0.235985 | 19 |
| SEPTIN9 | 6.234626 | 0.346368 | 18 |
| ANKRD11 | 5.754369 | 0.319687 | 18 |
| TBC1D16 | 2.862671 | 0.159037 | 18 |
| PAX6-AS1 | 4.611682 | 0.271275 | 17 |
| RCN1 | 4.611682 | 0.271275 | 17 |
| OPCML | 4.231436 | 0.248908 | 17 |
| FOXP1 | 5.111416 | 0.319464 | 16 |
| NAV2 | 3.395159 | 0.212197 | 16 |
| GLI2 | 3.746676 | 0.249778 | 15 |
| BAIAP2 | 3.302877 | 0.220192 | 15 |
| RPS6KA2 | 5.857572 | 0.418398 | 14 |
| C7orf50 | 5.496564 | 0.392612 | 14 |
| CACNA1H | 5.012177 | 0.358013 | 14 |
| CUX1 | 4.071116 | 0.290794 | 14 |
| IQSEC1 | 3.653357 | 0.260954 | 14 |
| ARHGEF10 | 3.255632 | 0.232545 | 14 |
| MIR548F5 | 3.212982 | 0.229499 | 14 |
| PPP2R2A | 3.103164 | 0.221655 | 14 |
| PRKAG2 | 2.953235 | 0.210945 | 14 |
| MSI2 | 5.642549 | 0.434042 | 13 |
| GSE1 | 4.189249 | 0.32225 | 13 |
| MYT1L | 3.556903 | 0.273608 | 13 |
| FBRSL1 | 5.232895 | 0.436075 | 12 |
| ZC3H3 | 4.260363 | 0.35503 | 12 |
| TNS3 | 3.420782 | 0.285065 | 12 |
| CMIP | 3.288465 | 0.274039 | 12 |
| RASA3 | 3.00796 | 0.250663 | 12 |
| ADGRD1 | 2.850136 | 0.237511 | 12 |
| LMF1 | 3.80437 | 0.380437 | 10 |
| AUTS2 | 3.525084 | 0.352508 | 10 |
| KCNIP4 | 3.505412 | 0.350541 | 10 |
| AKAP13 | 3.444648 | 0.344465 | 10 |
| SPPL2B | 2.931918 | 0.293192 | 10 |
| NBEA | 2.856603 | 0.28566 | 10 |
| ADAMTS2 | 5.84082 | 0.64898 | 9 |
| ATP11A | 5.816007 | 0.646223 | 9 |
| SND1 | 4.531475 | 0.503497 | 9 |
| ASAP1 | 4.478279 | 0.497587 | 9 |
| TSPAN9 | 3.791592 | 0.421288 | 9 |
| TRAPPC12 | 3.668458 | 0.407606 | 9 |
| AXIN2 | 3.446436 | 0.382937 | 9 |
| CACNA2D4 | 3.32849 | 0.369832 | 9 |
| MGMT | 3.227272 | 0.358586 | 9 |
| GPC6 | 3.028942 | 0.336549 | 9 |
| KCNMA1 | 2.827183 | 0.314131 | 9 |
| VRK2 | 6.931173 | 0.866397 | 8 |
| PPP2R2B | 4.915064 | 0.614383 | 8 |
| MSRA | 3.678484 | 0.459811 | 8 |
| DNMT3A | 3.518789 | 0.439849 | 8 |
| DLEU1 | 2.818785 | 0.352348 | 8 |
| GAK | 3.810517 | 0.54436 | 7 |
| PLEC | 2.924521 | 0.417789 | 7 |
| COLEC11 | 3.272893 | 0.545482 | 6 |
| FBXL18 | 2.993867 | 0.498978 | 6 |
| TRAK1 | 2.924649 | 0.487442 | 6 |
| TSNAX-DISC1 | 5.124489 | 1.024898 | 5 |
| EXPH5 | 3.453852 | 0.69077 | 5 |
| ARHGEF7 | 3.007099 | 0.60142 | 5 |
| NPHP4 | 2.860235 | 0.572047 | 5 |
| KIAA1522 | 3.621688 | 0.905422 | 4 |
| SLC25A22 | 3.098151 | 1.032717 | 3 |
| DAGLB | 2.998599 | 0.999533 | 3 |
| RASGRP3 | 2.837226 | 0.945742 | 3 |
| ANKLE2 | 4.310693 | 2.155347 | 2 |
| CHTF18 | 3.302048 | 1.651024 | 2 |
| UHRF1 | 3.16184 | 1.58092 | 2 |
| KIF21B | 2.987182 | 1.493591 | 2 |
| SLC25A10 | 2.855353 | 1.427677 | 2 |
| KCNV2 | 2.984463 | 2.984463 | 1 |
| DDT | 2.922807 | 2.922807 | 1 |
| ARL6IP6 | 2.877777 | 2.877777 | 1 |

TABLE 113
Cancer Type MB_MYO

| Gene site | imp_sum | imp_mean | n |
|---|---|---|---|
| PTPRN2 | 3.785764 | 0.046168 | 82 |
| PRDM16 | 8.662869 | 0.122012 | 71 |
| PCDHGA1 | 2.905979 | 0.049254 | 59 |
| PCDHGA2 | 2.589593 | 0.045431 | 57 |
| PCDHGA3 | 2.273207 | 0.042096 | 54 |
| PCDHGB1 | 2.273207 | 0.042891 | 53 |
| PCDHGA4 | 2.273207 | 0.044573 | 51 |
| PCDHGB2 | 2.273207 | 0.046392 | 49 |
| PCDHGA5 | 2.273207 | 0.048366 | 47 |
| PCDHGB3 | 1.956821 | 0.045507 | 43 |
| HDAC4 | 8.08646 | 0.218553 | 37 |
| PAX6 | 3.196964 | 0.091342 | 35 |
| DIP2C | 2.964181 | 0.092631 | 32 |
| SOX2-OT | 3.704058 | 0.127726 | 29 |
| AGAP1 | 4.754946 | 0.190198 | 25 |
| CAMTA1 | 3.193667 | 0.127747 | 25 |
| MEIS1 | 3.63319 | 0.151383 | 24 |
| SATB2 | 1.996545 | 0.083189 | 24 |
| RPTOR | 6.711731 | 0.291814 | 23 |
| RIMBP2 | 4.09283 | 0.177949 | 23 |
| NCOR2 | 3.267564 | 0.142068 | 23 |
| NXN | 3.259735 | 0.141728 | 23 |
| INPP5A | 2.909853 | 0.126515 | 23 |
| PRKCZ | 2.154902 | 0.09795 | 22 |
| SKI | 4.584725 | 0.21832 | 21 |
| MAD1L1 | 8.264018 | 0.434948 | 19 |
| CASZ1 | 4.00511 | 0.210795 | 19 |
| SMG1P2 | 3.599582 | 0.189452 | 19 |
| BOLA2 | 3.599582 | 0.189452 | 19 |
| LOC613038 | 3.599582 | 0.189452 | 19 |
| ZNF423 | 2.44059 | 0.128452 | 19 |
| FOXK1 | 2.97292 | 0.165162 | 18 |
| TBC1D16 | 2.75853 | 0.153252 | 18 |
| SEPTIN9 | 2.343916 | 0.130218 | 18 |
| TBX15 | 3.458112 | 0.203418 | 17 |
| HBG2 | 2.126484 | 0.125087 | 17 |
| FOXP1 | 5.347217 | 0.334201 | 16 |
| NAV2 | 2.471203 | 0.15445 | 16 |
| EBF3 | 1.916364 | 0.119773 | 16 |
| KNDC1 | 3.930209 | 0.262014 | 15 |
| BAIAP2 | 3.588691 | 0.239246 | 15 |
| ZBTB20 | 3.235695 | 0.215713 | 15 |
| SYCP2L | 5.723577 | 0.408827 | 14 |
| IQSEC1 | 3.736916 | 0.266923 | 14 |
| CUX1 | 3.402324 | 0.243023 | 14 |
| C7orf50 | 3.341656 | 0.23869 | 14 |
| PRKAG2 | 2.335498 | 0.166821 | 14 |
| CACNA1H | 2.27144 | 0.162246 | 14 |
| ARHGEF10 | 2.023279 | 0.14452 | 14 |
| RPS6KA2 | 1.898316 | 0.135594 | 14 |
| MYT1L | 3.01092 | 0.231609 | 13 |
| GSE1 | 2.81954 | 0.216888 | 13 |
| RFX4 | 2.068167 | 0.15909 | 13 |
| MEGF6 | 2.437108 | 0.203092 | 12 |
| FBRSL1 | 2.331273 | 0.194273 | 12 |
| GNA12 | 2.069569 | 0.172464 | 12 |
| TFAP2B | 3.312113 | 0.331211 | 10 |
| AKAP13 | 3.253774 | 0.325377 | 10 |
| NBEA | 2.197763 | 0.219776 | 10 |
| FMN1 | 2.093129 | 0.209313 | 10 |
| SND1 | 4.095694 | 0.455077 | 9 |
| TSPAN9 | 3.126332 | 0.34737 | 9 |
| CACNA2D4 | 3.069865 | 0.341096 | 9 |
| ADAMTS2 | 2.8411 | 0.315678 | 9 |
| ATP11A | 2.667221 | 0.296358 | 9 |
| AXIN2 | 2.122505 | 0.235834 | 9 |
| DNMT3A | 2.986323 | 0.37329 | 8 |
| PPP2R2B | 2.506865 | 0.313358 | 8 |
| RORA | 2.125144 | 0.265643 | 8 |
| LINC00311 | 2.025461 | 0.253183 | 8 |
| ASPSCR1 | 2.025297 | 0.253162 | 8 |
| SMAD3 | 1.887128 | 0.235891 | 8 |
| RXRA | 2.000038 | 0.28572 | 7 |
| EBF2 | 1.964235 | 0.280605 | 7 |
| ARHGAP18 | 3.172124 | 0.528687 | 6 |
| MYO16 | 2.570597 | 0.428433 | 6 |
| COLEC11 | 2.317683 | 0.386281 | 6 |
| MIR548G | 2.237624 | 0.372937 | 6 |
| CRADD | 2.050473 | 0.341746 | 6 |
| CCDC177 | 1.921631 | 0.320272 | 6 |
| TSNAX-DISC1 | 2.117145 | 0.423429 | 5 |
| VAV2 | 1.991836 | 0.398367 | 5 |
| SHOX2 | 1.910358 | 0.382072 | 5 |
| CPE | 2.202064 | 0.550516 | 4 |
| IGSF21 | 1.982063 | 0.495516 | 4 |
| LOC339874 | 2.815089 | 0.938363 | 3 |
| WNT16 | 2.546151 | 0.848717 | 3 |
| DICER1 | 2.539719 | 0.846573 | 3 |
| CHID1 | 2.469217 | 0.823072 | 3 |
| SLC1A7 | 2.178243 | 0.726081 | 3 |
| BFSP2 | 1.97466 | 0.65822 | 3 |
| ANKLE2 | 3.431389 | 1.715695 | 2 |
| CHTF18 | 2.845109 | 1.422554 | 2 |
| UTRN | 2.535066 | 1.267533 | 2 |
| DISC1 | 1.968634 | 0.984317 | 2 |
| KIF21B | 1.874384 | 0.937192 | 2 |
| ARL6IP6 | 2.61283 | 2.61283 | 1 |
| DDT | 2.59893 | 2.59893 | 1 |
| DNAJC27 | 2.220019 | 2.220019 | 1 |
| DLG4 | 1.974717 | 1.974717 | 1 |

TABLE 114
Cancer Type MB_SHH_AD

| Gene site | imp_sum | imp_mean | n |
|---|---|---|---|
| PTPRN2 | 15.1265 | 0.18447 | 82 |
| PTPRN2 | 17.35912 | 0.211697 | 82 |
| PTPRN2 | 12.58685 | 0.153498 | 82 |
| PTPRN2 | 12.13645 | 0.148005 | 82 |
| PRDM16 | 7.907722 | 0.111376 | 71 |
| PRDM16 | 11.0177 | 0.155179 | 71 |
| PRDM16 | 8.809374 | 0.124076 | 71 |
| PRDM16 | 7.679804 | 0.108166 | 71 |
| PCDHGA1 | 7.892189 | 0.133766 | 59 |
| PCDHGA1 | 7.831596 | 0.132739 | 59 |
| PCDHGA1 | 8.916148 | 0.151121 | 59 |
| PCDHGA2 | 7.904277 | 0.138672 | 57 |
| PCDHGA2 | 7.831596 | 0.137396 | 57 |
| PCDHGA2 | 8.916148 | 0.156424 | 57 |
| PCDHGA3 | 7.587891 | 0.140517 | 54 |
| PCDHGA3 | 7.51521 | 0.139171 | 54 |
| PCDHGA3 | 8.916148 | 0.165114 | 54 |
| PCDHGB1 | 7.587891 | 0.143168 | 53 |
| PCDHGB1 | 7.51521 | 0.141796 | 53 |
| PCDHGB1 | 8.916148 | 0.168229 | 53 |
| PCDHGA4 | 7.587891 | 0.148782 | 51 |
| PCDHGA4 | 7.51521 | 0.147357 | 51 |
| PCDHGA4 | 8.916148 | 0.174826 | 51 |
| PCDHGB2 | 7.503957 | 0.153142 | 49 |
| PCDHGB2 | 6.882438 | 0.140458 | 49 |
| PCDHGB2 | 8.283376 | 0.169048 | 49 |
| PCDHGA5 | 6.543723 | 0.139228 | 47 |
| PCDHGA5 | 5.867063 | 0.124831 | 47 |
| PCDHGA5 | 7.370543 | 0.15682 | 47 |
| PCDHGB3 | 6.227337 | 0.144822 | 43 |
| PCDHGB3 | 5.452341 | 0.126799 | 43 |
| PCDHGB3 | 6.251393 | 0.145381 | 43 |
| PCDHGA6 | 6.543723 | 0.163593 | 40 |
| PCDHGA6 | 5.321472 | 0.133037 | 40 |
| PCDHGA6 | 5.935007 | 0.148375 | 40 |
| HDAC4 | 11.44288 | 0.309267 | 37 |
| PCDHGA7 | 5.49864 | 0.148612 | 37 |
| HDAC4 | 9.878771 | 0.266994 | 37 |
| PCDHGA7 | 4.899938 | 0.132431 | 37 |
| HDAC4 | 7.008804 | 0.189427 | 37 |
| HDAC4 | 9.624697 | 0.260127 | 37 |
| PCDHGA7 | 5.302235 | 0.143304 | 37 |
| RBFOX3 | 8.400886 | 0.240025 | 35 |
| PAX6 | 5.800011 | 0.165715 | 35 |
| PCDHGB4 | 5.182254 | 0.148064 | 35 |
| PCDHGA8 | 5.182254 | 0.148064 | 35 |
| RBFOX3 | 8.114223 | 0.231835 | 35 |
| PAX6 | 6.09272 | 0.174078 | 35 |
| PCDHGB4 | 4.583552 | 0.130959 | 35 |
| PCDHGA8 | 4.583552 | 0.130959 | 35 |
| RBFOX3 | 9.113563 | 0.260388 | 35 |
| PAX6 | 3.406611 | 0.097332 | 35 |
| RBFOX3 | 6.680933 | 0.190884 | 35 |
| PCDHGB4 | 5.618621 | 0.160532 | 35 |
| PCDHGA8 | 5.618621 | 0.160532 | 35 |
| DIP2C | 8.48953 | 0.265298 | 32 |
| PCDHGB5 | 4.95066 | 0.154708 | 32 |
| DIP2C | 10.05901 | 0.314344 | 32 |
| PCDHGB5 | 4.509287 | 0.140915 | 32 |
| DIP2C | 6.27013 | 0.195942 | 32 |
| DIP2C | 9.408016 | 0.294001 | 32 |
| PCDHGB5 | 4.717386 | 0.147418 | 32 |
| PCDHGA9 | 4.634274 | 0.149493 | 31 |
| PCDHGA9 | 4.509287 | 0.145461 | 31 |
| PCDHGA9 | 4.717386 | 0.152174 | 31 |
| SOX2-OT | 6.737024 | 0.232311 | 29 |
| PCDHGB6 | 3.660059 | 0.126209 | 29 |
| SOX2-OT | 8.048747 | 0.277543 | 29 |
| SOX2-OT | 5.334916 | 0.183963 | 29 |
| SOX2-OT | 9.085177 | 0.313282 | 29 |
| PCDHGB6 | 3.662255 | 0.126285 | 29 |
| PCDHGA10 | 3.660059 | 0.130716 | 28 |
| PCDHGA10 | 3.662255 | 0.130795 | 28 |
| GALNT9 | 2.999202 | 0.111082 | 27 |
| PCDHA2 | 4.903154 | 0.181598 | 27 |
| PCDHA1 | 4.903154 | 0.181598 | 27 |
| SHANK2 | 4.211899 | 0.161996 | 26 |
| ADARB2 | 3.815923 | 0.146766 | 26 |
| ADARB2 | 6.355375 | 0.244438 | 26 |
| SHANK2 | 5.581315 | 0.214666 | 26 |
| ADARB2 | 4.42342 | 0.170132 | 26 |
| SHANK2 | 4.141465 | 0.159287 | 26 |
| ADARB2 | 4.612131 | 0.17739 | 26 |
| SHANK2 | 3.884978 | 0.149422 | 26 |
| CAMTA1 | 7.940562 | 0.317622 | 25 |
| AGAP1 | 7.763085 | 0.310523 | 25 |
| PDGFRA | 3.817616 | 0.152705 | 25 |
| AGAP1 | 8.738619 | 0.349545 | 25 |
| CAMTA1 | 8.134202 | 0.325368 | 25 |
| PDGFRA | 5.017886 | 0.200715 | 25 |
| CAMTA1 | 7.419743 | 0.29679 | 25 |
| AGAP1 | 6.302105 | 0.252084 | 25 |
| PDGFRA | 3.972671 | 0.158907 | 25 |
| CAMTA1 | 6.810666 | 0.272427 | 25 |
| AGAP1 | 5.913963 | 0.236559 | 25 |
| PDGFRA | 4.733582 | 0.189343 | 25 |
| SATB2 | 3.738509 | 0.155771 | 24 |
| MEIS1 | 6.011862 | 0.250494 | 24 |
| SATB2 | 5.746239 | 0.239427 | 24 |
| SATB2 | 4.43271 | 0.184696 | 24 |
| RPTOR | 11.98578 | 0.521121 | 23 |
| NCOR2 | 6.236985 | 0.271173 | 23 |
| RIMBP2 | 5.323145 | 0.231441 | 23 |
| NXN | 4.909253 | 0.213446 | 23 |
| INPP5A | 4.781912 | 0.207909 | 23 |
| RPTOR | 11.83216 | 0.514442 | 23 |
| INPP5A | 7.120684 | 0.309595 | 23 |
| NCOR2 | 6.749041 | 0.293437 | 23 |
| RIMBP2 | 6.364259 | 0.276707 | 23 |
| NXN | 6.050887 | 0.263082 | 23 |
| RPTOR | 6.854974 | 0.298042 | 23 |
| NCOR2 | 6.23076 | 0.270903 | 23 |
| INPP5A | 5.522711 | 0.240118 | 23 |
| NXN | 5.108222 | 0.222097 | 23 |
| RIMBP2 | 4.095477 | 0.178064 | 23 |
| RPTOR | 10.69073 | 0.464814 | 23 |
| RIMBP2 | 8.17955 | 0.355633 | 23 |
| NCOR2 | 5.678988 | 0.246913 | 23 |
| PCDHA3 | 4.270382 | 0.185669 | 23 |
| PRKCZ | 5.399293 | 0.245422 | 22 |
| PRKCZ | 6.940502 | 0.315477 | 22 |
| PRKCZ | 3.781779 | 0.171899 | 22 |
| PRKCZ | 5.777631 | 0.26262 | 22 |
| SKI | 8.213644 | 0.391126 | 21 |
| ZIC4 | 4.004628 | 0.190697 | 21 |
| SKI | 8.808682 | 0.419461 | 21 |
| ZIC4 | 5.049453 | 0.24045 | 21 |
| SIM2 | 4.200894 | 0.200043 | 21 |
| SKI | 6.37787 | 0.303708 | 21 |
| ZIC4 | 5.926099 | 0.282195 | 21 |
| SKI | 6.428761 | 0.306131 | 21 |
| PCDHA4 | 3.953996 | 0.188286 | 21 |
| ZIC4 | 3.611484 | 0.171975 | 21 |
| ABR | 3.90796 | 0.195398 | 20 |
| SDK1 | 6.719232 | 0.335962 | 20 |
| ABR | 4.43783 | 0.221892 | 20 |
| FRMD4A | 4.326176 | 0.216309 | 20 |
| ABR | 3.132036 | 0.156602 | 20 |
| ABR | 5.060822 | 0.253041 | 20 |
| FRMD4A | 4.066681 | 0.203334 | 20 |
| SMG1P2 | 8.884298 | 0.467595 | 19 |
| BOLA2 | 8.884298 | 0.467595 | 19 |
| LOC613038 | 8.884298 | 0.467595 | 19 |
| ZNF423 | 7.177879 | 0.377783 | 19 |
| MAD1L1 | 6.614525 | 0.348133 | 19 |
| KCNQ1 | 4.692295 | 0.246963 | 19 |
| CASZ1 | 3.789958 | 0.199471 | 19 |
| SMG1P2 | 8.900718 | 0.468459 | 19 |
| BOLA2 | 8.900718 | 0.468459 | 19 |
| LOC613038 | 8.900718 | 0.468459 | 19 |
| MAD1L1 | 7.943356 | 0.418071 | 19 |
| ZNF423 | 6.41927 | 0.337856 | 19 |
| CASZ1 | 4.631459 | 0.243761 | 19 |
| KCNQ1 | 4.348355 | 0.228861 | 19 |
| SMG1P2 | 7.982796 | 0.420147 | 19 |
| BOLA2 | 7.982796 | 0.420147 | 19 |
| LOC613038 | 7.982796 | 0.420147 | 19 |
| MAD1L1 | 5.93073 | 0.312144 | 19 |
| ZNF423 | 5.242571 | 0.275925 | 19 |
| CASZ1 | 4.876325 | 0.256649 | 19 |
| CFAP46 | 3.280592 | 0.172663 | 19 |
| MAD1L1 | 9.665857 | 0.508729 | 19 |
| SMG1P2 | 8.480735 | 0.446354 | 19 |
| BOLA2 | 8.480735 | 0.446354 | 19 |
| LOC613038 | 8.480735 | 0.446354 | 19 |
| ZNF423 | 7.52162 | 0.395875 | 19 |
| CASZ1 | 5.039069 | 0.265214 | 19 |
| FOXK1 | 5.681706 | 0.31565 | 18 |
| TBC1D16 | 4.757733 | 0.264319 | 18 |
| MCF2L | 3.771779 | 0.209543 | 18 |
| ANKRD11 | 6.6446 | 0.369144 | 18 |
| FOXK1 | 5.729092 | 0.318283 | 18 |
| TBC1D16 | 5.363412 | 0.297967 | 18 |
| MCF2L | 4.485611 | 0.249201 | 18 |
| FOXK1 | 3.633137 | 0.201841 | 18 |
| SEPTIN9 | 3.042159 | 0.169009 | 18 |
| ANKRD11 | 4.928495 | 0.273805 | 18 |
| TBC1D16 | 4.497394 | 0.249855 | 18 |
| FOXK1 | 3.924434 | 0.218024 | 18 |
| OPCML | 7.221906 | 0.424818 | 17 |
| TBX15 | 3.633948 | 0.213762 | 17 |
| OPCML | 6.749132 | 0.397008 | 17 |
| SIM1 | 4.667199 | 0.274541 | 17 |
| TBX15 | 5.971427 | 0.35126 | 17 |
| OPCML | 5.473333 | 0.321961 | 17 |
| TBX15 | 5.575745 | 0.327985 | 17 |
| OPCML | 5.455402 | 0.320906 | 17 |
| SIM1 | 3.704432 | 0.217908 | 17 |
| EBF3 | 5.790181 | 0.361886 | 16 |
| FOXP1 | 4.298654 | 0.268666 | 16 |
| NAV2 | 3.50322 | 0.218951 | 16 |
| EBF3 | 5.106376 | 0.319148 | 16 |
| NAV2 | 4.965713 | 0.310357 | 16 |
| FOXP1 | 4.89795 | 0.306122 | 16 |
| NAV2 | 3.925816 | 0.245363 | 16 |
| EBF3 | 4.010135 | 0.250633 | 16 |
| GLI2 | 7.440531 | 0.496035 | 15 |
| ZBTB20 | 4.040587 | 0.269372 | 15 |
| SLX1B-SULT1A4 | 3.79633 | 0.253089 | 15 |
| SLX1A | 3.79633 | 0.253089 | 15 |
| LOC606724 | 3.79633 | 0.253089 | 15 |
| GLI2 | 7.602239 | 0.506816 | 15 |
| BAIAP2 | 4.846091 | 0.323073 | 15 |
| SLX1B-SULT1A4 | 4.431234 | 0.295416 | 15 |
| SLX1A | 4.431234 | 0.295416 | 15 |
| LOC606724 | 4.431234 | 0.295416 | 15 |
| NFIX | 4.404545 | 0.293636 | 15 |
| ZBTB20 | 3.903113 | 0.260208 | 15 |
| GLI2 | 6.532372 | 0.435491 | 15 |
| ZBTB20 | 3.220659 | 0.214711 | 15 |
| BAIAP2 | 3.082184 | 0.205479 | 15 |
| GLI2 | 3.915004 | 0.261 | 15 |
| DLX6-AS1 | 3.904856 | 0.260324 | 15 |
| PRKAG2 | 5.408447 | 0.386318 | 14 |
| IQSEC1 | 5.405558 | 0.386111 | 14 |
| CUX1 | 5.352775 | 0.382341 | 14 |
| RPS6KA2 | 5.138169 | 0.367012 | 14 |
| C7orf50 | 4.980817 | 0.355773 | 14 |
| RPS6KA2 | 5.705567 | 0.40754 | 14 |
| PRKAG2 | 5.346347 | 0.381882 | 14 |
| C7orf50 | 4.971 | 0.355071 | 14 |
| IQSEC1 | 4.690514 | 0.335037 | 14 |
| CUX1 | 4.036515 | 0.288323 | 14 |
| ARHGEF10 | 3.838387 | 0.274171 | 14 |
| RPS6KA2 | 4.231365 | 0.30224 | 14 |
| CUX1 | 4.051786 | 0.289413 | 14 |
| PPP2R2A | 4.002789 | 0.285914 | 14 |
| MIR548F5 | 3.630739 | 0.259338 | 14 |
| PRKAG2 | 3.54061 | 0.252901 | 14 |
| ARHGEF10 | 3.300672 | 0.235762 | 14 |
| CACNA1H | 3.191626 | 0.227973 | 14 |
| C7orf50 | 2.963868 | 0.211705 | 14 |
| GNG7 | 2.94343 | 0.210245 | 14 |
| CUX1 | 5.722125 | 0.408723 | 14 |
| RPS6KA2 | 4.713006 | 0.336643 | 14 |
| TBX5 | 3.899536 | 0.278538 | 14 |
| C7orf50 | 3.651625 | 0.26083 | 14 |
| MSI2 | 6.083076 | 0.467929 | 13 |
| CLYBL | 4.973501 | 0.382577 | 13 |
| MYT1L | 4.916223 | 0.378171 | 13 |
| MSI2 | 6.966227 | 0.535864 | 13 |
| CLYBL | 5.077306 | 0.390562 | 13 |
| GSE1 | 4.599659 | 0.35382 | 13 |
| MSI2 | 4.272438 | 0.328649 | 13 |
| MYT1L | 3.438404 | 0.264493 | 13 |
| GSE1 | 3.425092 | 0.263469 | 13 |
| RFX4 | 3.082134 | 0.237087 | 13 |
| MSI2 | 5.990683 | 0.460822 | 13 |
| CLYBL | 4.587194 | 0.352861 | 13 |
| MYT1L | 4.512123 | 0.347086 | 13 |
| MEIS2 | 4.900008 | 0.408334 | 12 |
| ADGRD1 | 4.681714 | 0.390143 | 12 |
| CMIP | 4.430408 | 0.369201 | 12 |
| TNS3 | 4.377581 | 0.364798 | 12 |
| ZC3H3 | 4.046952 | 0.337246 | 12 |
| MAML3 | 3.846496 | 0.320541 | 12 |
| LRBA | 3.637413 | 0.303118 | 12 |
| FBRSL1 | 3.636163 | 0.303014 | 12 |
| FBRSL1 | 5.48669 | 0.457224 | 12 |
| ZC3H3 | 4.948896 | 0.412408 | 12 |
| MAML3 | 4.671648 | 0.389304 | 12 |
| CMIP | 4.629361 | 0.38578 | 12 |
| RASA3 | 4.196058 | 0.349671 | 12 |
| ADGRD1 | 4.121606 | 0.343467 | 12 |
| MIRLET7BHG | 3.85566 | 0.321305 | 12 |
| LRBA | 5.184367 | 0.432031 | 12 |
| ADGRD1 | 3.957863 | 0.329822 | 12 |
| TBX4 | 3.821608 | 0.318467 | 12 |
| MIRLET7BHG | 3.206211 | 0.267184 | 12 |
| MEIS2 | 2.957049 | 0.246421 | 12 |
| ZC3H3 | 4.634894 | 0.386241 | 12 |
| FBRSL1 | 4.454571 | 0.371214 | 12 |
| RASA3 | 4.441187 | 0.370099 | 12 |
| ADGRD1 | 4.350455 | 0.362538 | 12 |
| CMIP | 3.988099 | 0.332342 | 12 |
| TBX4 | 3.801473 | 0.316789 | 12 |
| LRBA | 3.722755 | 0.31023 | 12 |
| MAML3 | 3.668841 | 0.305737 | 12 |
| TNS3 | 3.624613 | 0.302051 | 12 |
| VGLL4 | 4.623824 | 0.420348 | 11 |
| CCDC140 | 4.304976 | 0.391361 | 11 |
| RAD51B | 3.648926 | 0.331721 | 11 |
| TBCD | 3.622455 | 0.329314 | 11 |
| VGLL4 | 5.236927 | 0.476084 | 11 |
| CCDC140 | 4.820168 | 0.438197 | 11 |
| ZC3H12D | 3.196704 | 0.290609 | 11 |
| CCDC140 | 4.61614 | 0.419649 | 11 |
| RAD51B | 3.946997 | 0.358818 | 11 |
| ZC3H12D | 3.675656 | 0.334151 | 11 |
| TSPAN4 | 4.461114 | 0.446111 | 10 |
| KLHL29 | 4.385021 | 0.438502 | 10 |
| AKAP13 | 4.079004 | 0.4079 | 10 |
| TSPAN4 | 4.902196 | 0.49022 | 10 |
| ACOT7 | 4.816818 | 0.481682 | 10 |
| NR2F1-AS1 | 4.147053 | 0.414705 | 10 |
| SKOR1 | 4.068187 | 0.406819 | 10 |
| ACOT7 | 4.47878 | 0.447878 | 10 |
| NR2F1-AS1 | 3.503822 | 0.350382 | 10 |
| TSPAN4 | 3.394916 | 0.339492 | 10 |
| GRID1 | 3.282706 | 0.328271 | 10 |
| AKAP13 | 3.113864 | 0.311386 | 10 |
| RGS12 | 3.022987 | 0.302299 | 10 |
| SKOR1 | 4.887111 | 0.488711 | 10 |
| ACOT7 | 4.533972 | 0.453397 | 10 |
| LBX1-AS1 | 4.171722 | 0.417172 | 10 |
| SH3RF3 | 3.5777 | 0.35777 | 10 |
| SND1 | 5.70304 | 0.633671 | 9 |
| ATP11A | 5.622162 | 0.624685 | 9 |
| TRAPPC12 | 4.436276 | 0.49292 | 9 |
| TSPAN9 | 4.162421 | 0.462491 | 9 |
| ADAMTS2 | 3.952429 | 0.439159 | 9 |
| SND1 | 6.390561 | 0.710062 | 9 |
| ATP11A | 5.643567 | 0.627063 | 9 |
| ADAMTS2 | 4.303716 | 0.478191 | 9 |
| ASAP1 | 4.066582 | 0.451842 | 9 |
| TRAPPC12 | 3.825479 | 0.425053 | 9 |
| TSPAN9 | 4.932572 | 0.548064 | 9 |
| SND1 | 4.695963 | 0.521774 | 9 |
| ATP11A | 4.336107 | 0.48179 | 9 |
| ADAMTS2 | 3.89938 | 0.433264 | 9 |
| PAX3 | 3.546297 | 0.394033 | 9 |
| PACS2 | 3.341665 | 0.371296 | 9 |
| RUNX1 | 3.203476 | 0.355942 | 9 |
| AXIN2 | 3.123528 | 0.347059 | 9 |
| ADAMTS2 | 5.603878 | 0.622653 | 9 |
| ATP11A | 5.593948 | 0.62155 | 9 |
| SND1 | 5.04309 | 0.560343 | 9 |
| SLC22A18 | 3.945131 | 0.438348 | 9 |
| TXNRD1 | 3.837119 | 0.426347 | 9 |
| KCNH2 | 3.78563 | 0.420626 | 9 |
| TSPAN9 | 3.637798 | 0.4042 | 9 |
| APBA2 | 3.61274 | 0.401416 | 9 |
| SYNJ2 | 4.734921 | 0.591865 | 8 |
| LINC00311 | 4.473012 | 0.559127 | 8 |
| PPP2R2B | 4.083048 | 0.510381 | 8 |
| MCC | 3.52537 | 0.440671 | 8 |
| DLEU1 | 3.520617 | 0.440077 | 8 |
| MSRA | 4.278226 | 0.534778 | 8 |
| DNMT3A | 4.024289 | 0.503036 | 8 |
| NR2E1 | 4.112219 | 0.514027 | 8 |
| SYNJ2 | 3.515851 | 0.439481 | 8 |
| DLEU1 | 3.334536 | 0.416817 | 8 |
| LINC00311 | 3.12969 | 0.391211 | 8 |
| MSRA | 3.019324 | 0.377415 | 8 |
| SYNJ2 | 4.360336 | 0.545042 | 8 |
| TENM2 | 3.872294 | 0.484037 | 8 |
| PPP2R2B | 3.630106 | 0.453763 | 8 |
| NAV1 | 3.829699 | 0.5471 | 7 |
| GAK | 3.817429 | 0.545347 | 7 |
| GAK | 4.006282 | 0.572326 | 7 |
| NAV1 | 3.778695 | 0.539814 | 7 |
| EBF2 | 3.898516 | 0.556931 | 7 |
| NAV1 | 3.151697 | 0.450242 | 7 |
| NAV1 | 4.116692 | 0.588099 | 7 |
| FBXL18 | 3.818437 | 0.636406 | 6 |
| CRADD | 3.713185 | 0.618864 | 6 |
| COQ8A | 4.501953 | 0.750325 | 6 |
| COQ8A | 4.638227 | 0.773038 | 6 |
| CRADD | 3.676599 | 0.612767 | 6 |
| FBXL18 | 3.413187 | 0.568865 | 6 |
| IRF6 | 3.056409 | 0.509402 | 6 |
| COQ8A | 4.801492 | 0.800249 | 6 |
| FBXL18 | 3.744823 | 0.624137 | 6 |
| TK1 | 4.81045 | 0.96209 | 5 |
| ARHGEF7 | 4.225031 | 0.845006 | 5 |
| TSNAX-DISC1 | 3.942396 | 0.788479 | 5 |
| TK1 | 5.723311 | 1.144662 | 5 |
| AP2A2 | 5.165172 | 1.033034 | 5 |
| ARHGEF7 | 5.051048 | 1.01021 | 5 |
| TSNAX-DISC1 | 4.917045 | 0.983409 | 5 |
| PRR5L | 3.826285 | 0.765257 | 5 |
| TK1 | 5.058368 | 1.011674 | 5 |
| TSNAX-DISC1 | 4.717782 | 0.943556 | 5 |
| RUNDC3A | 4.234243 | 0.846849 | 5 |
| AP2A2 | 3.591004 | 0.718201 | 5 |
| MRC2 | 3.551757 | 0.710351 | 5 |
| ARHGAP27P1 | 3.505253 | 0.701051 | 5 |
| PLEKHM1P1 | 3.505253 | 0.701051 | 5 |
| ARHGEF7 | 3.352543 | 0.670509 | 5 |
| BTBD9 | 3.303687 | 0.660737 | 5 |
| TK1 | 5.499776 | 1.099955 | 5 |
| TSNAX-DISC1 | 4.941693 | 0.988339 | 5 |
| AP2A2 | 4.107508 | 0.821502 | 5 |
| RUNDC3A | 3.708473 | 0.741695 | 5 |
| TUBA1C | 3.897376 | 0.974344 | 4 |
| DAGLB | 3.951956 | 1.317319 | 3 |
| SLC25A22 | 3.541157 | 1.180386 | 3 |
| CHID1 | 3.035271 | 1.011757 | 3 |
| SLC25A22 | 3.689941 | 1.22998 | 3 |
| ANKLE2 | 5.964983 | 2.982492 | 2 |
| ANKLE2 | 6.397189 | 3.198595 | 2 |
| DISC1 | 3.796866 | 1.898433 | 2 |
| SLC25A10 | 3.781775 | 1.890887 | 2 |
| ANKLE2 | 6.209738 | 3.104869 | 2 |
| DDX31 | 3.308125 | 1.654063 | 2 |
| DISC1 | 3.234475 | 1.617238 | 2 |
| SLC25A10 | 3.131187 | 1.565593 | 2 |
| CYTH1 | 3.061654 | 1.530827 | 2 |
| ANKLE2 | 6.031201 | 3.0156 | 2 |
| SLC25A10 | 3.800057 | 1.900028 | 2 |

TABLE 115
Cancer Type MB_SHH_IDH

| Gene site | imp_sum | imp_mean | n |
|---|---|---|---|
| PTPRN2 | 4.186386 | 0.051053 | 82 |
| PRDM16 | 2.531088 | 0.035649 | 71 |
| PCDHGA1 | 6.521723 | 0.110538 | 59 |
| PCDHGA2 | 6.521723 | 0.114416 | 57 |
| PCDHGA3 | 6.521723 | 0.120773 | 54 |
| PCDHGB1 | 6.521723 | 0.123051 | 53 |
| PCDHGA4 | 6.521723 | 0.127877 | 51 |
| PCDHGB2 | 6.205337 | 0.12664 | 49 |
| PCDHGA5 | 5.572565 | 0.118565 | 47 |
| PCDHGB3 | 5.256179 | 0.122237 | 43 |
| PCDHGA6 | 5.256179 | 0.131404 | 40 |
| PCDHGA7 | 4.623407 | 0.124957 | 37 |
| HDAC4 | 3.15463 | 0.08526 | 37 |
| PCDHGB4 | 4.307021 | 0.123058 | 35 |
| PCDHGA8 | 4.307021 | 0.123058 | 35 |
| RBFOX3 | 3.185196 | 0.091006 | 35 |
| DIP2C | 4.089401 | 0.127794 | 32 |
| PCDHGB5 | 3.990635 | 0.124707 | 32 |
| PCDHGA9 | 3.990635 | 0.12873 | 31 |
| SOX2-OT | 8.014506 | 0.276362 | 29 |
| PCDHGB6 | 3.674249 | 0.126698 | 29 |
| PCDHGA10 | 3.357863 | 0.119924 | 28 |
| AGAP1 | 3.776256 | 0.15105 | 25 |
| CAMTA1 | 3.045261 | 0.12181 | 25 |
| PCDHGB7 | 3.041477 | 0.126728 | 24 |
| RIMBP2 | 3.827594 | 0.166417 | 23 |
| PCDHGA11 | 3.041477 | 0.132238 | 23 |
| NCOR2 | 2.477374 | 0.107712 | 23 |
| PRKCZ | 2.170949 | 0.098679 | 22 |
| SKI | 2.502695 | 0.119176 | 21 |
| SIM2 | 1.927917 | 0.091806 | 21 |
| ABR | 1.811715 | 0.090586 | 20 |
| MAD1L1 | 4.648104 | 0.244637 | 19 |
| SMG1P2 | 3.141926 | 0.165365 | 19 |
| BOLA2 | 3.141926 | 0.165365 | 19 |
| LOC613038 | 3.141926 | 0.165365 | 19 |
| CASZ1 | 1.844257 | 0.097066 | 19 |
| FOXK1 | 2.800405 | 0.155578 | 18 |
| TBC1D16 | 1.770802 | 0.098378 | 18 |
| HBG2 | 4.870262 | 0.286486 | 17 |
| SIM1 | 2.993498 | 0.176088 | 17 |
| OPCML | 1.755075 | 0.10324 | 17 |
| TBX15 | 1.66968 | 0.098216 | 17 |
| FOXP1 | 1.670958 | 0.104435 | 16 |
| EBF3 | 1.572011 | 0.098251 | 16 |
| GLI2 | 3.276761 | 0.218451 | 15 |
| ZBTB20 | 1.562454 | 0.104164 | 15 |
| PRKAG2 | 3.090339 | 0.220739 | 14 |
| PCDHGA12 | 2.725091 | 0.194649 | 14 |
| CUX1 | 2.351194 | 0.167942 | 14 |
| IQSEC1 | 1.946442 | 0.139032 | 14 |
| SYCP2L | 1.889476 | 0.134963 | 14 |
| SPTBN4 | 1.707594 | 0.131353 | 13 |
| CTNNA2 | 2.642407 | 0.220201 | 12 |
| TBX4 | 2.423594 | 0.201966 | 12 |
| ISLR2 | 2.327659 | 0.193972 | 12 |
| FBRSL1 | 1.630753 | 0.135896 | 12 |
| PCDHGC3 | 2.408705 | 0.218973 | 11 |
| NR2F1-AS1 | 2.429421 | 0.242942 | 10 |
| SLC22A18 | 3.285046 | 0.365005 | 9 |
| TXNRD1 | 2.762601 | 0.306956 | 9 |
| ADAMTS2 | 2.498552 | 0.277617 | 9 |
| SND1 | 2.072379 | 0.230264 | 9 |
| TRAPPC12 | 1.727633 | 0.191959 | 9 |
| RUNX1 | 1.620398 | 0.180044 | 9 |
| LHX4 | 3.362207 | 0.420276 | 8 |
| DLX5 | 3.307152 | 0.413394 | 8 |
| NR2E1 | 2.426585 | 0.303323 | 8 |
| SYNJ2 | 1.978768 | 0.247346 | 8 |
| DNMT3A | 1.844033 | 0.230504 | 8 |
| NXPH1 | 1.677876 | 0.209734 | 8 |
| AFF3 | 1.665786 | 0.208223 | 8 |
| TRIM6-TRIM34 | 2.409658 | 0.344237 | 7 |
| DUSP6 | 2.367342 | 0.338192 | 7 |
| EBF2 | 1.834614 | 0.262088 | 7 |
| TRIM34 | 2.409658 | 0.40161 | 6 |
| FBXL18 | 1.900496 | 0.316749 | 6 |
| EPHA10 | 1.866265 | 0.311044 | 6 |
| SRCIN1 | 1.838764 | 0.306461 | 6 |
| RUNDC3A | 2.635708 | 0.527142 | 5 |
| ARHGEF7 | 2.408727 | 0.481745 | 5 |
| GNAO1 | 1.918317 | 0.383663 | 5 |
| ATP2B4 | 1.669945 | 0.333989 | 5 |
| TSNAX-DISC1 | 1.66602 | 0.333204 | 5 |
| TK1 | 1.580119 | 0.316024 | 5 |
| TUBA1C | 2.900214 | 0.725053 | 4 |
| MLC1 | 1.992379 | 0.498095 | 4 |
| PPM1H | 1.623709 | 0.405927 | 4 |
| SLC25A22 | 2.547072 | 0.849024 | 3 |
| DICER1 | 2.188384 | 0.729461 | 3 |
| SRRM3 | 1.94638 | 0.648793 | 3 |
| IGFBPL1 | 1.873898 | 0.624633 | 3 |
| LIN28A | 1.680143 | 0.560048 | 3 |
| DERL3 | 1.619892 | 0.539964 | 3 |
| ANKLE2 | 5.371886 | 2.685943 | 2 |
| REXO1 | 1.950061 | 0.97503 | 2 |
| DDX31 | 1.909347 | 0.954674 | 2 |
| SLC25A10 | 1.732353 | 0.866176 | 2 |
| TBC1D9 | 1.858811 | 1.858811 | 1 |
| TNRC18P1 | 1.858811 | 1.858811 | 1 |

TABLE 116
Cancer Type MB_WNT

| Gene site | imp_sum | imp_mean | n |
|---|---|---|---|
| PTPRN2 | 10.8371 | 0.13216 | 82 |
| PRDM16 | 7.265933 | 0.102337 | 71 |
| HDAC4 | 17.01119 | 0.459762 | 37 |
| RBFOX3 | 9.054346 | 0.258696 | 35 |
| PAX6 | 7.817762 | 0.223365 | 35 |
| DIP2C | 6.105956 | 0.190811 | 32 |
| SOX2-OT | 3.383323 | 0.116666 | 29 |
| GALNT9 | 4.666088 | 0.172818 | 27 |
| SHANK2 | 4.975523 | 0.191366 | 26 |
| ADARB2 | 3.712105 | 0.142773 | 26 |
| CAMTA1 | 10.199 | 0.40796 | 25 |
| AGAP1 | 7.697982 | 0.307919 | 25 |
| PDGFRA | 3.015656 | 0.120626 | 25 |
| NCOR2 | 6.786393 | 0.295061 | 23 |
| NXN | 6.120921 | 0.266127 | 23 |
| RPTOR | 5.335037 | 0.231958 | 23 |
| RIMBP2 | 4.418345 | 0.192102 | 23 |
| INPP5A | 4.096703 | 0.178118 | 23 |
| PRKCZ | 6.825763 | 0.310262 | 22 |
| SKI | 6.771276 | 0.322442 | 21 |
| ABR | 4.717846 | 0.235892 | 20 |
| FRMD4A | 3.249455 | 0.162473 | 20 |
| MAD1L1 | 14.32428 | 0.75391 | 19 |
| SMG1P2 | 6.724541 | 0.353923 | 19 |
| BOLA2 | 6.724541 | 0.353923 | 19 |
| LOC613038 | 6.724541 | 0.353923 | 19 |
| CASZ1 | 4.353618 | 0.229138 | 19 |
| ZNF423 | 4.227003 | 0.222474 | 19 |
| KCNQ1 | 3.560444 | 0.187392 | 19 |
| ANKRD11 | 5.201042 | 0.288947 | 18 |
| FOXK1 | 5.148867 | 0.286048 | 18 |
| TBC1D16 | 4.107056 | 0.22817 | 18 |
| SEPTIN9 | 3.389096 | 0.188283 | 18 |
| OPCML | 6.012083 | 0.353652 | 17 |
| PAX6-AS1 | 3.072803 | 0.180753 | 17 |
| RCN1 | 3.072803 | 0.180753 | 17 |
| NAV2 | 5.489458 | 0.343091 | 16 |
| BAIAP2 | 5.041965 | 0.336131 | 15 |
| GLI2 | 4.504027 | 0.300268 | 15 |
| NFIX | 3.66554 | 0.244369 | 15 |
| KNDC1 | 3.550985 | 0.236732 | 15 |
| ZBTB20 | 3.330934 | 0.222062 | 15 |
| KIRREL3 | 2.97936 | 0.198624 | 15 |
| SLX1B-SULT1A4 | 2.966254 | 0.19775 | 15 |
| SLX1A | 2.966254 | 0.19775 | 15 |
| CUX1 | 6.497046 | 0.464075 | 14 |
| IQSEC1 | 5.309558 | 0.379254 | 14 |
| PRKAG2 | 4.103524 | 0.293109 | 14 |
| RPS6KA2 | 3.719359 | 0.265668 | 14 |
| CACNA1H | 3.524163 | 0.251726 | 14 |
| C7orf50 | 3.282155 | 0.23444 | 14 |
| MOB2 | 3.113394 | 0.222385 | 14 |
| MIR548F5 | 3.068117 | 0.219151 | 14 |
| GNG7 | 2.981215 | 0.212944 | 14 |
| MYT1L | 5.53196 | 0.425535 | 13 |
| MSI2 | 5.384966 | 0.414228 | 13 |
| CLYBL | 3.963235 | 0.304864 | 13 |
| RFX4 | 3.398564 | 0.261428 | 13 |
| FBRSL1 | 4.406138 | 0.367178 | 12 |
| ADGRD1 | 3.655516 | 0.304626 | 12 |
| MEGF6 | 3.627383 | 0.302282 | 12 |
| ZC3H3 | 3.613021 | 0.301085 | 12 |
| CMIP | 3.606883 | 0.300574 | 12 |
| CTNNA2 | 3.234056 | 0.269505 | 12 |
| CTBP2 | 3.962087 | 0.36019 | 11 |
| COL4A1 | 3.499449 | 0.318132 | 11 |
| VGLL4 | 3.209159 | 0.291742 | 11 |
| FMN1 | 4.202709 | 0.420271 | 10 |
| AKAP13 | 3.692004 | 0.3692 | 10 |
| AXIN2 | 6.344218 | 0.704913 | 9 |
| TSPAN9 | 6.202349 | 0.68915 | 9 |
| ATP11A | 5.78398 | 0.642664 | 9 |
| ADAMTS2 | 5.710575 | 0.634508 | 9 |
| SND1 | 5.235502 | 0.581722 | 9 |
| GPC6 | 3.336133 | 0.370681 | 9 |
| SLC22A18 | 3.32686 | 0.369651 | 9 |
| VRK2 | 6.942704 | 0.867838 | 8 |
| PPP2R2B | 4.533826 | 0.566728 | 8 |
| RORA | 4.217902 | 0.527238 | 8 |
| ASPSCR1 | 3.717924 | 0.46474 | 8 |
| DLEU1 | 3.459904 | 0.432488 | 8 |
| LINC00311 | 3.311936 | 0.413992 | 8 |
| DNMT3A | 3.10049 | 0.387561 | 8 |
| MSRA | 3.05823 | 0.382279 | 8 |
| GAK | 4.58643 | 0.655204 | 7 |
| AGO2 | 3.723265 | 0.531895 | 7 |
| PLEC | 3.578589 | 0.511227 | 7 |
| PCCA | 3.024493 | 0.43207 | 7 |
| PITPNC1 | 3.007431 | 0.429633 | 7 |
| CRADD | 4.274558 | 0.712426 | 6 |
| ROR1 | 3.09436 | 0.515727 | 6 |
| FBXL18 | 3.034703 | 0.505784 | 6 |
| COLEC11 | 3.00026 | 0.500043 | 6 |
| TSNAX-DISC1 | 3.3902 | 0.67804 | 5 |
| NPHP4 | 2.99828 | 0.599656 | 5 |
| EXT1 | 2.976673 | 0.744168 | 4 |
| SLC25A22 | 3.201603 | 1.067201 | 3 |
| ANKLE2 | 4.340864 | 2.170432 | 2 |
| CHTF18 | 4.334141 | 2.16707 | 2 |
| KIF21B | 3.020143 | 1.510072 | 2 |

TABLE 117
Cancer Type MELN

| Gene site | imp_sum | imp_mean | n |
|---|---|---|---|
| PTPRN2 | 20.07972 | 0.244875 | 82 |
| PRDM16 | 11.87507 | 0.167254 | 71 |
| PCDHGA1 | 3.96148 | 0.067144 | 59 |
| PCDHGA2 | 3.96148 | 0.0695 | 57 |
| PCDHGA3 | 3.960003 | 0.073333 | 54 |
| PCDHGB1 | 3.960003 | 0.074717 | 53 |
| PCDHGA4 | 3.960003 | 0.077647 | 51 |
| PCDHGB2 | 3.960003 | 0.080816 | 49 |
| HDAC4 | 18.18092 | 0.491376 | 37 |
| RBFOX3 | 5.033948 | 0.143827 | 35 |
| PAX6 | 4.40364 | 0.125818 | 35 |
| DIP2C | 10.80042 | 0.337513 | 32 |
| SHANK2 | 5.242768 | 0.201645 | 26 |
| AGAP1 | 12.02566 | 0.481026 | 25 |
| CAMTA1 | 5.565815 | 0.222633 | 25 |
| PDGFRA | 4.404613 | 0.176185 | 25 |
| MEIS1 | 4.675042 | 0.194793 | 24 |
| RPTOR | 10.88275 | 0.473163 | 23 |
| NCOR2 | 6.702184 | 0.291399 | 23 |
| INPP5A | 5.909184 | 0.256921 | 23 |
| PRKCZ | 4.100656 | 0.186393 | 22 |
| SKI | 10.42127 | 0.496251 | 21 |
| FRMD4A | 6.386336 | 0.319317 | 20 |
| SDK1 | 5.100932 | 0.255047 | 20 |
| ABR | 4.102454 | 0.205123 | 20 |
| MAD1L1 | 11.59755 | 0.610397 | 19 |
| CASZ1 | 5.539392 | 0.291547 | 19 |
| KCNQ1 | 5.170629 | 0.272138 | 19 |
| SMG1P2 | 4.905835 | 0.258202 | 19 |
| BOLA2 | 4.905835 | 0.258202 | 19 |
| LOC613038 | 4.905835 | 0.258202 | 19 |
| TBC1D16 | 8.824067 | 0.490226 | 18 |
| ANKRD11 | 5.752647 | 0.319591 | 18 |
| SEPTIN9 | 5.209593 | 0.289422 | 18 |
| FOXK1 | 5.117212 | 0.28429 | 18 |
| OPCML | 4.359006 | 0.256412 | 17 |
| FOXP1 | 5.82112 | 0.36382 | 16 |
| EBF3 | 5.292018 | 0.330751 | 16 |
| GLI2 | 7.458051 | 0.497203 | 15 |
| ZBTB20 | 4.374324 | 0.291622 | 15 |
| KIRREL3 | 4.342944 | 0.28953 | 15 |
| RPS6KA2 | 6.474401 | 0.462457 | 14 |
| CUX1 | 6.042582 | 0.431613 | 14 |
| IQSEC1 | 5.9396 | 0.424257 | 14 |
| C7orf50 | 5.879431 | 0.419959 | 14 |
| PRKAG2 | 5.215217 | 0.372516 | 14 |
| ARHGEF10 | 4.90525 | 0.350375 | 14 |
| GNG7 | 4.302019 | 0.307287 | 14 |
| MSI2 | 6.601134 | 0.50778 | 13 |
| MYT1L | 4.80067 | 0.369282 | 13 |
| GSE1 | 4.797274 | 0.369021 | 13 |
| RFX4 | 4.172827 | 0.320987 | 13 |
| CMIP | 7.044486 | 0.58704 | 12 |
| FBRSL1 | 5.539667 | 0.461639 | 12 |
| TNS3 | 5.362109 | 0.446842 | 12 |
| GNA12 | 3.84182 | 0.320152 | 12 |
| MAML3 | 3.836794 | 0.319733 | 12 |
| ZC3H3 | 3.806348 | 0.317196 | 12 |
| COL4A1 | 3.977189 | 0.361563 | 11 |
| RAD51B | 3.939323 | 0.35812 | 11 |
| TSPAN4 | 5.621388 | 0.562139 | 10 |
| RGS12 | 4.168971 | 0.416897 | 10 |
| ANKS1B | 3.869659 | 0.386966 | 10 |
| ACOT7 | 3.84659 | 0.384659 | 10 |
| FMN1 | 3.754881 | 0.375488 | 10 |
| ATP11A | 7.987864 | 0.88754 | 9 |
| SND1 | 7.076724 | 0.786303 | 9 |
| ADAMTS2 | 5.238921 | 0.582102 | 9 |
| TSPAN9 | 4.794222 | 0.532691 | 9 |
| AXIN2 | 4.740056 | 0.526673 | 9 |
| TRAPPC12 | 4.546979 | 0.50522 | 9 |
| PAX3 | 3.868641 | 0.429849 | 9 |
| NOTCH1 | 3.794656 | 0.421628 | 9 |
| SYNJ2 | 5.876355 | 0.734544 | 8 |
| DLEU1 | 4.325624 | 0.540703 | 8 |
| MSRA | 4.226066 | 0.528258 | 8 |
| SMAD3 | 4.156583 | 0.519573 | 8 |
| AFF3 | 4.068188 | 0.508523 | 8 |
| LHX4 | 3.799541 | 0.474943 | 8 |
| MACROD1 | 3.773525 | 0.471691 | 8 |
| C19orf25 | 5.557351 | 0.793907 | 7 |
| ITPK1 | 4.294166 | 0.613452 | 7 |
| VPS13D | 3.978662 | 0.56838 | 7 |
| GAK | 3.899819 | 0.557117 | 7 |
| MIR548H4 | 3.870347 | 0.552907 | 7 |
| NAV1 | 3.868259 | 0.552608 | 7 |
| RXRA | 3.867873 | 0.552553 | 7 |
| FBXL18 | 5.400368 | 0.900061 | 6 |
| FMNL2 | 4.109786 | 0.684964 | 6 |
| SLC22A18AS | 4.041922 | 0.673654 | 6 |
| RADIL | 3.89196 | 0.64866 | 6 |
| KDM4B | 3.77629 | 0.629382 | 6 |
| TSNAX-DISC1 | 5.541611 | 1.108322 | 5 |
| RUNDC3A | 5.352348 | 1.07047 | 5 |
| ARHGEF7 | 4.019536 | 0.803907 | 5 |
| BCAR1 | 3.752209 | 0.750442 | 5 |
| DAGLB | 3.877602 | 1.292534 | 3 |
| TBC1D7 | 3.795514 | 1.265171 | 3 |
| SOX10 | 4.35304 | 2.17652 | 2 |
| SLC25A10 | 3.769522 | 1.884761 | 2 |

TABLE 118
Cancer Type MET_MEL

| Gene site | imp_sum | imp_mean | n |
|---|---|---|---|
| PTPRN2 | 23.28815 | 0.284002 | 82 |
| PRDM16 | 14.10422 | 0.198651 | 71 |
| PCDHGA1 | 5.198538 | 0.088111 | 59 |
| PCDHGA2 | 4.775169 | 0.083775 | 57 |
| PCDHGA3 | 4.775169 | 0.088429 | 54 |
| PCDHGB1 | 4.775169 | 0.090098 | 53 |
| PCDHGA4 | 4.458783 | 0.087427 | 51 |
| PCDHGB2 | 4.458783 | 0.090996 | 49 |
| PCDHGA5 | 4.775169 | 0.101599 | 47 |
| PCDHGB3 | 4.799988 | 0.111628 | 43 |
| PCDHGA6 | 4.483602 | 0.11209 | 40 |
| HDAC4 | 15.6732 | 0.4236 | 37 |
| PCDHGA7 | 4.799988 | 0.129729 | 37 |
| PAX6 | 7.001312 | 0.200037 | 35 |
| RBFOX3 | 6.523178 | 0.186377 | 35 |
| PCDHGB4 | 4.799988 | 0.137143 | 35 |
| PCDHGA8 | 4.799988 | 0.137143 | 35 |
| DIP2C | 8.736887 | 0.273028 | 32 |
| PCDHGB5 | 4.799988 | 0.15 | 32 |
| PCDHGA9 | 4.799988 | 0.154838 | 31 |
| SOX2-OT | 6.186026 | 0.213311 | 29 |
| PCDHGB6 | 4.799988 | 0.165517 | 29 |
| PCDHGA10 | 4.799988 | 0.171428 | 28 |
| GALNT9 | 4.480326 | 0.165938 | 27 |
| AGAP1 | 11.55531 | 0.462212 | 25 |
| PDGFRA | 5.857961 | 0.234318 | 25 |
| MEIS1 | 4.887093 | 0.203629 | 24 |
| PCDHGB7 | 4.483602 | 0.186817 | 24 |
| RPTOR | 10.90653 | 0.474197 | 23 |
| NCOR2 | 7.582035 | 0.329654 | 23 |
| INPP5A | 5.808428 | 0.25254 | 23 |
| NXN | 5.799721 | 0.252162 | 23 |
| RIMBP2 | 5.085832 | 0.221123 | 23 |
| PCDHGA11 | 4.483602 | 0.194939 | 23 |
| SKI | 8.010844 | 0.381469 | 21 |
| FRMD4A | 4.993953 | 0.249698 | 20 |
| ABR | 4.685585 | 0.234279 | 20 |
| MAD1L1 | 10.65961 | 0.561032 | 19 |
| ZNF423 | 5.576102 | 0.293479 | 19 |
| CASZ1 | 4.063253 | 0.213855 | 19 |
| FOXK1 | 7.808541 | 0.433808 | 18 |
| TBC1D16 | 5.840426 | 0.324468 | 18 |
| ANKRD11 | 5.655526 | 0.314196 | 18 |
| HOXA3 | 5.018438 | 0.278802 | 18 |
| RBFOX1 | 3.797883 | 0.210994 | 18 |
| TBX15 | 4.119351 | 0.242315 | 17 |
| OPCML | 3.844648 | 0.226156 | 17 |
| SORBS2 | 4.419792 | 0.276237 | 16 |
| NFIX | 4.959722 | 0.330648 | 15 |
| GLI2 | 4.953296 | 0.33022 | 15 |
| BAIAP2 | 4.818579 | 0.321239 | 15 |
| LRMDA | 4.401163 | 0.293411 | 15 |
| ZBTB20 | 4.342012 | 0.289467 | 15 |
| KIRREL3 | 3.914596 | 0.260973 | 15 |
| ARHGEF10 | 6.140654 | 0.438618 | 14 |
| CUX1 | 5.918096 | 0.422721 | 14 |
| MIR548F5 | 5.793953 | 0.413854 | 14 |
| PRKAG2 | 5.082395 | 0.363028 | 14 |
| IQSEC1 | 4.546697 | 0.324764 | 14 |
| C7orf50 | 3.84999 | 0.274999 | 14 |
| MSI2 | 5.84468 | 0.449591 | 13 |
| RFX4 | 4.729256 | 0.363789 | 13 |
| MYT1L | 4.557003 | 0.350539 | 13 |
| CMIP | 6.193215 | 0.516101 | 12 |
| FBRSL1 | 4.591671 | 0.382639 | 12 |
| ZC3H3 | 4.200662 | 0.350055 | 12 |
| LRBA | 4.18372 | 0.348643 | 12 |
| MIRLET7BHG | 4.086926 | 0.340577 | 12 |
| TNS3 | 3.906238 | 0.32552 | 12 |
| TBX4 | 3.896038 | 0.32467 | 12 |
| GNA12 | 3.760847 | 0.313404 | 12 |
| ADGRD1 | 3.737897 | 0.311491 | 12 |
| CCDC140 | 4.946652 | 0.449696 | 11 |
| COL4A1 | 4.646674 | 0.422425 | 11 |
| RAD51B | 3.97844 | 0.361676 | 11 |
| SPON2 | 3.963238 | 0.360294 | 11 |
| AKAP13 | 4.293365 | 0.429336 | 10 |
| IGF1R | 3.950148 | 0.395015 | 10 |
| ATP11A | 6.829316 | 0.758813 | 9 |
| NOTCH1 | 4.594711 | 0.510523 | 9 |
| TRAPPC12 | 4.392991 | 0.48811 | 9 |
| SND1 | 4.228188 | 0.469799 | 9 |
| ASAP1 | 4.089509 | 0.45439 | 9 |
| AXIN2 | 4.088872 | 0.454319 | 9 |
| SMAD3 | 4.429079 | 0.553635 | 8 |
| RGS20 | 4.200273 | 0.525034 | 8 |
| VRK2 | 4.133411 | 0.516676 | 8 |
| DLEU1 | 4.086511 | 0.510814 | 8 |
| MSRA | 3.881242 | 0.485155 | 8 |
| ASPSCR1 | 3.834464 | 0.479308 | 8 |
| NAV1 | 5.274058 | 0.753437 | 7 |
| MIR548H4 | 4.091968 | 0.584567 | 7 |
| GAK | 4.045485 | 0.577926 | 7 |
| ITPK1 | 3.91298 | 0.558997 | 7 |
| ANK2 | 4.362606 | 0.727101 | 6 |
| SLC22A18AS | 4.105502 | 0.68425 | 6 |
| RUNDC3A | 5.207004 | 1.041401 | 5 |
| TSNAX-DISC1 | 4.928417 | 0.985683 | 5 |
| TBC1D7 | 5.407551 | 1.802517 | 3 |
| SOX10 | 3.859623 | 1.929812 | 2 |

TABLE 119
Cancer Type MMNST

| Gene site | imp_sum | imp_mean | n |
|---|---|---|---|
| PRDM16 | 6.47284 | 0.091167 | 71 |
| PCDHGA1 | 4.946677 | 0.083842 | 59 |
| PCDHGA2 | 4.512407 | 0.079165 | 57 |
| PCDHGA3 | 4.424657 | 0.081938 | 54 |
| PCDHGB1 | 4.424657 | 0.083484 | 53 |
| PCDHGA4 | 4.424657 | 0.086758 | 51 |
| PCDHGB2 | 4.424657 | 0.090299 | 49 |
| PCDHGA5 | 4.424657 | 0.094142 | 47 |
| PCDHGB3 | 4.108271 | 0.095541 | 43 |
| PCDHGA6 | 4.424657 | 0.110616 | 40 |
| HDAC4 | 8.717707 | 0.235614 | 37 |
| PCDHGA7 | 4.741043 | 0.128136 | 37 |
| PAX6 | 8.339197 | 0.238263 | 35 |
| PCDHGB4 | 4.741043 | 0.135458 | 35 |
| PCDHGA8 | 4.741043 | 0.135458 | 35 |
| RBFOX3 | 3.738019 | 0.106801 | 35 |
| DIP2C | 5.333114 | 0.16666 | 32 |
| PCDHGB5 | 4.108271 | 0.128383 | 32 |
| PCDHGA9 | 4.108271 | 0.132525 | 31 |
| PCDHGB6 | 4.108271 | 0.141665 | 29 |
| SOX2-OT | 4.06689 | 0.140238 | 29 |
| PCDHGA10 | 3.665331 | 0.130905 | 28 |
| AGAP1 | 6.318014 | 0.252721 | 25 |
| CAMTA1 | 5.243006 | 0.20972 | 25 |
| PDGFRA | 3.660136 | 0.146405 | 25 |
| PCDHGB7 | 3.665331 | 0.152722 | 24 |
| RPTOR | 6.879654 | 0.299115 | 23 |
| NCOR2 | 3.752568 | 0.163155 | 23 |
| PCDHGA11 | 3.348945 | 0.145606 | 23 |
| INPP5A | 3.273184 | 0.142312 | 23 |
| NXN | 3.203231 | 0.139271 | 23 |
| PRKCZ | 3.058926 | 0.139042 | 22 |
| SKI | 5.061311 | 0.241015 | 21 |
| SIM2 | 2.404562 | 0.114503 | 21 |
| SDK1 | 3.56718 | 0.178359 | 20 |
| ABR | 2.758593 | 0.13793 | 20 |
| FRMD4A | 2.733413 | 0.136671 | 20 |
| MAD1L1 | 5.8859 | 0.309784 | 19 |
| ZNF423 | 3.740023 | 0.196843 | 19 |
| SMG1P2 | 3.218867 | 0.169414 | 19 |
| BOLA2 | 3.218867 | 0.169414 | 19 |
| LOC613038 | 3.218867 | 0.169414 | 19 |
| CASZ1 | 3.080883 | 0.162152 | 19 |
| FOXK1 | 6.262441 | 0.347913 | 18 |
| TBC1D16 | 4.226576 | 0.23481 | 18 |
| ANKRD11 | 3.09493 | 0.171941 | 18 |
| SEPTIN9 | 2.591572 | 0.143976 | 18 |
| PAX6-AS1 | 4.46816 | 0.262833 | 17 |
| RCN1 | 4.46816 | 0.262833 | 17 |
| FOXP1 | 3.819536 | 0.238721 | 16 |
| SORBS2 | 2.963446 | 0.185215 | 16 |
| KIRREL3 | 3.418558 | 0.227904 | 15 |
| GLI2 | 2.992747 | 0.199516 | 15 |
| NFIX | 2.916915 | 0.194461 | 15 |
| SLX1B-SULT1A4 | 2.708597 | 0.180573 | 15 |
| SLX1A | 2.708597 | 0.180573 | 15 |
| LOC606724 | 2.708597 | 0.180573 | 15 |
| CUX1 | 4.698023 | 0.335573 | 14 |
| CACNA1H | 3.842483 | 0.274463 | 14 |
| PRKAG2 | 3.418302 | 0.244164 | 14 |
| RPS6KA2 | 3.335163 | 0.238226 | 14 |
| IQSEC1 | 3.07831 | 0.219879 | 14 |
| MIR548F5 | 2.78253 | 0.198752 | 14 |
| PCDHGA12 | 2.585121 | 0.184652 | 14 |
| C7orf50 | 2.36413 | 0.168866 | 14 |
| RFX4 | 2.46895 | 0.189919 | 13 |
| CMIP | 5.48478 | 0.457065 | 12 |
| LRBA | 3.462573 | 0.288548 | 12 |
| RASA3 | 2.827938 | 0.235661 | 12 |
| ADGRD1 | 2.730173 | 0.227514 | 12 |
| TNS3 | 2.419795 | 0.20165 | 12 |
| RAD51B | 3.190738 | 0.290067 | 11 |
| SORCS2 | 2.80278 | 0.254798 | 11 |
| RGS12 | 3.619502 | 0.36195 | 10 |
| ACOT7 | 3.153595 | 0.31536 | 10 |
| KLHL29 | 2.635382 | 0.263538 | 10 |
| SH3RF3 | 2.47046 | 0.247046 | 10 |
| FMN1 | 2.381283 | 0.238128 | 10 |
| ADAMTS2 | 3.842903 | 0.426989 | 9 |
| AXIN2 | 3.621175 | 0.402353 | 9 |
| SND1 | 2.303007 | 0.25589 | 9 |
| SMAD3 | 4.347245 | 0.543406 | 8 |
| DNMT3A | 3.593892 | 0.449237 | 8 |
| DLEU1 | 2.484178 | 0.310522 | 8 |
| MACROD1 | 2.316054 | 0.289507 | 8 |
| ITPKB | 2.876351 | 0.410907 | 7 |
| LINC00461 | 2.545239 | 0.363606 | 7 |
| CCDC177 | 3.109625 | 0.518271 | 6 |
| PBX1 | 2.471809 | 0.411968 | 6 |
| MIR100HG | 2.463133 | 0.410522 | 6 |
| SLC22A18AS | 2.347513 | 0.391252 | 6 |
| FBXL18 | 2.345463 | 0.39091 | 6 |
| RUNDC3A | 4.46828 | 0.893656 | 5 |
| CYREN | 3.126123 | 0.625225 | 5 |
| TSNAX-DISC1 | 3.086616 | 0.617323 | 5 |
| KLHL25 | 2.601482 | 0.520296 | 5 |
| TBC1D7 | 2.550573 | 0.850191 | 3 |
| RTEL1- | 2.916835 | 1.458418 | 2 |
| TNFRSF6B | | | |
| RTEL1 | 2.916835 | 1.458418 | 2 |

TABLE 120
Cancer Type MNG_ben-1

| Gene site | imp_sum | imp_mean | n |
|---|---|---|---|
| PTPRN2 | 13.82051 | 0.168543 | 82 |
| PRDM16 | 11.89894 | 0.167591 | 71 |
| PCDHGA1 | 6.849261 | 0.116089 | 59 |
| PCDHGA2 | 6.849261 | 0.120162 | 57 |
| PCDHGA3 | 6.532875 | 0.120979 | 54 |
| PCDHGB1 | 6.532875 | 0.123262 | 53 |
| PCDHGA4 | 6.849261 | 0.134299 | 51 |
| PCDHGB2 | 6.849261 | 0.139781 | 49 |
| PCDHGA5 | 6.849261 | 0.145729 | 47 |
| PCDHGB3 | 6.574277 | 0.15289 | 43 |
| PCDHGA6 | 6.574277 | 0.164357 | 40 |
| HDAC4 | 18.90875 | 0.511047 | 37 |
| PCDHGA7 | 6.257891 | 0.169132 | 37 |
| RBFOX3 | 7.710426 | 0.220298 | 35 |
| PCDHGB4 | 6.257891 | 0.178797 | 35 |
| PCDHGA8 | 6.257891 | 0.178797 | 35 |
| PAX6 | 5.857744 | 0.167364 | 35 |
| DIP2C | 10.83243 | 0.338514 | 32 |
| PCDHGB5 | 5.625119 | 0.175785 | 32 |
| PCDHGA9 | 5.625119 | 0.181455 | 31 |
| PCDHGB6 | 4.808758 | 0.165819 | 29 |
| SOX2-OT | 4.578854 | 0.157892 | 29 |
| PCDHGA10 | 4.808758 | 0.171741 | 28 |
| GALNT9 | 4.679084 | 0.173299 | 27 |
| SHANK2 | 6.49194 | 0.24969 | 26 |
| AGAP1 | 13.00458 | 0.520183 | 25 |
| CAMTA1 | 7.461963 | 0.298479 | 25 |
| PDGFRA | 5.74881 | 0.229952 | 25 |
| PCDHGB7 | 4.422271 | 0.184261 | 24 |
| RPTOR | 12.87515 | 0.559789 | 23 |
| NXN | 8.33912 | 0.36257 | 23 |
| NCOR2 | 7.104845 | 0.308906 | 23 |
| RIMBP2 | 6.980383 | 0.303495 | 23 |
| INPP5A | 6.449253 | 0.280402 | 23 |
| SKI | 11.38974 | 0.542368 | 21 |
| FRMD4A | 6.895792 | 0.34479 | 20 |
| ABR | 5.14037 | 0.257019 | 20 |
| SDK1 | 4.958414 | 0.247921 | 20 |
| MAD1L1 | 13.22295 | 0.695945 | 19 |
| CASZ1 | 6.12576 | 0.322408 | 19 |
| SMG1P2 | 5.844299 | 0.307595 | 19 |
| BOLA2 | 5.844299 | 0.307595 | 19 |
| LOC613038 | 5.844299 | 0.307595 | 19 |
| KCNQ1 | 5.469755 | 0.287882 | 19 |
| ZNF423 | 5.039602 | 0.265242 | 19 |
| FOXK1 | 10.05902 | 0.558835 | 18 |
| TBC1D16 | 7.904142 | 0.439119 | 18 |
| MCF2L | 6.214789 | 0.345266 | 18 |
| SEPTIN9 | 6.02498 | 0.334721 | 18 |
| ANKRD11 | 4.350671 | 0.241704 | 18 |
| FOXP1 | 7.817105 | 0.488569 | 16 |
| NAV2 | 6.435163 | 0.402198 | 16 |
| ZBTB20 | 6.143446 | 0.409563 | 15 |
| GLI2 | 5.663911 | 0.377594 | 15 |
| KIRREL3 | 5.414844 | 0.36099 | 15 |
| BAIAP2 | 5.169657 | 0.344644 | 15 |
| NFIX | 4.969003 | 0.331267 | 15 |
| SLX1B-SULT1A4 | 4.72077 | 0.314718 | 15 |
| SLX1A | 4.72077 | 0.314718 | 15 |
| LOC606724 | 4.72077 | 0.314718 | 15 |
| KNDC1 | 4.688957 | 0.312597 | 15 |
| LRMDA | 4.292951 | 0.286197 | 15 |
| RPS6KA2 | 8.370342 | 0.597882 | 14 |
| CUX1 | 6.066803 | 0.433343 | 14 |
| IQSEC1 | 5.85587 | 0.418276 | 14 |
| MIR548F5 | 5.695434 | 0.406817 | 14 |
| C7orf50 | 5.470546 | 0.390753 | 14 |
| PRKAG2 | 4.775703 | 0.341122 | 14 |
| ARHGEF10 | 4.659786 | 0.332842 | 14 |
| MSI2 | 6.755835 | 0.51968 | 13 |
| MYT1L | 5.168853 | 0.397604 | 13 |
| CMIP | 7.54371 | 0.628643 | 12 |
| ZC3H3 | 5.654797 | 0.471233 | 12 |
| FBRSL1 | 5.433467 | 0.452789 | 12 |
| MIRLET7BHG | 5.316198 | 0.443017 | 12 |
| TNS3 | 4.843598 | 0.403633 | 12 |
| GNA12 | 4.74899 | 0.395749 | 12 |
| CTBP2 | 4.902419 | 0.445674 | 11 |
| TSPAN4 | 5.826729 | 0.582673 | 10 |
| ACOT7 | 4.817172 | 0.481717 | 10 |
| AKAP13 | 4.554964 | 0.455496 | 10 |
| ATP11A | 8.56874 | 0.952082 | 9 |
| SND1 | 8.150821 | 0.905647 | 9 |
| ADAMTS2 | 6.501277 | 0.722364 | 9 |
| NOTCH1 | 4.88438 | 0.542709 | 9 |
| AXIN2 | 4.332555 | 0.481395 | 9 |
| DNMT3A | 6.086909 | 0.760864 | 8 |
| LINC00311 | 5.472052 | 0.684007 | 8 |
| MSRA | 4.427701 | 0.553463 | 8 |
| C19orf25 | 5.998215 | 0.856888 | 7 |
| MIR548H4 | 5.819089 | 0.831298 | 7 |
| VPS13D | 5.39522 | 0.770746 | 7 |
| NAV1 | 5.274197 | 0.753457 | 7 |
| STRA6 | 5.817815 | 0.969636 | 6 |
| FMNL2 | 5.378446 | 0.896408 | 6 |
| FBXL18 | 4.926141 | 0.821024 | 6 |
| RUNDC3A | 4.808672 | 0.961734 | 5 |
| ARHGEF7 | 4.74985 | 0.94997 | 5 |
| TSNAX-DISC1 | 4.324226 | 0.864845 | 5 |
| USP20 | 4.814654 | 1.604885 | 3 |

TABLE 121
Cancer Type MNG_ben-2

| Gene site | imp_sum | imp_mean | n |
|---|---|---|---|
| PTPRN2 | 13.45409 | 0.164074 | 82 |
| PRDM16 | 12.3714 | 0.174245 | 71 |
| PCDHGA1 | 5.613835 | 0.09515 | 59 |
| PCDHGA2 | 5.613835 | 0.098488 | 57 |
| PCDHGA3 | 5.575012 | 0.103241 | 54 |
| PCDHGB1 | 5.575012 | 0.105189 | 53 |
| PCDHGA4 | 5.575012 | 0.109314 | 51 |
| PCDHGB2 | 5.575012 | 0.113776 | 49 |
| PCDHGA5 | 5.575012 | 0.118617 | 47 |
| PCDHGB3 | 4.900676 | 0.113969 | 43 |
| PCDHGA6 | 4.267904 | 0.106698 | 40 |
| HDAC4 | 20.05845 | 0.54212 | 37 |
| PCDHGA7 | 4.267904 | 0.115349 | 37 |
| PAX6 | 7.562683 | 0.216077 | 35 |
| RBFOX3 | 7.013312 | 0.20038 | 35 |
| PCDHGB4 | 4.267904 | 0.12194 | 35 |
| PCDHGA8 | 4.267904 | 0.12194 | 35 |
| DIP2C | 11.17988 | 0.349371 | 32 |
| PCDHGB5 | 4.267904 | 0.133372 | 32 |
| PCDHGA9 | 4.267904 | 0.137674 | 31 |
| SHANK2 | 6.742333 | 0.259321 | 26 |
| ADARB2 | 4.171369 | 0.160437 | 26 |
| AGAP1 | 13.829 | 0.55316 | 25 |
| CAMTA1 | 6.527083 | 0.261083 | 25 |
| PDGFRA | 5.479023 | 0.219161 | 25 |
| RPTOR | 12.86316 | 0.559268 | 23 |
| NXN | 8.208397 | 0.356887 | 23 |
| NCOR2 | 7.86704 | 0.342045 | 23 |
| INPP5A | 6.254527 | 0.271936 | 23 |
| RIMBP2 | 5.449726 | 0.236945 | 23 |
| PRKCZ | 6.528564 | 0.296753 | 22 |
| SKI | 11.00161 | 0.523886 | 21 |
| FRMD4A | 6.074896 | 0.303745 | 20 |
| ABR | 4.863719 | 0.243186 | 20 |
| SDK1 | 4.582411 | 0.229121 | 20 |
| MAD1L1 | 12.37047 | 0.651078 | 19 |
| CASZ1 | 6.339035 | 0.333633 | 19 |
| ZNF423 | 5.561251 | 0.292697 | 19 |
| KCNQ1 | 5.297414 | 0.278811 | 19 |
| SMG1P2 | 5.2427 | 0.275932 | 19 |
| BOLA2 | 5.2427 | 0.275932 | 19 |
| LOC613038 | 5.2427 | 0.275932 | 19 |
| FOXK1 | 7.706177 | 0.428121 | 18 |
| TBC1D16 | 6.940259 | 0.38557 | 18 |
| SEPTIN9 | 6.654283 | 0.369682 | 18 |
| ANKRD11 | 4.890269 | 0.271682 | 18 |
| MCF2L | 4.862958 | 0.270164 | 18 |
| FOXP1 | 6.013375 | 0.375836 | 16 |
| NAV2 | 5.478894 | 0.342431 | 16 |
| EBF3 | 4.702232 | 0.29389 | 16 |
| NFIX | 5.97872 | 0.398581 | 15 |
| SLX1B- | 5.381892 | 0.358793 | 15 |
| SULT1A4 | | | |
| SLX1A | 5.381892 | 0.358793 | 15 |
| LOC606724 | 5.381892 | 0.358793 | 15 |
| KIRREL3 | 4.943827 | 0.329588 | 15 |
| ZBTB20 | 4.615239 | 0.307683 | 15 |
| BAIAP2 | 4.598236 | 0.306549 | 15 |
| RPS6KA2 | 9.649029 | 0.689216 | 14 |
| IQSEC1 | 6.291758 | 0.449411 | 14 |
| C7orf50 | 6.014972 | 0.429641 | 14 |
| PRKAG2 | 5.576157 | 0.398297 | 14 |
| MIR548F5 | 4.577077 | 0.326934 | 14 |
| CUX1 | 4.429173 | 0.316369 | 14 |
| ARHGEF10 | 4.400306 | 0.314308 | 14 |
| GSE1 | 7.665565 | 0.589659 | 13 |
| MSI2 | 5.419438 | 0.41688 | 13 |
| MYT1L | 4.303207 | 0.331016 | 13 |
| CMIP | 7.426731 | 0.618894 | 12 |
| ZC3H3 | 6.74163 | 0.561802 | 12 |
| GNA12 | 5.848317 | 0.48736 | 12 |
| RASA3 | 5.406658 | 0.450555 | 12 |
| FBRSL1 | 5.397095 | 0.449758 | 12 |
| TBX4 | 5.026797 | 0.4189 | 12 |
| ADGRD1 | 4.534801 | 0.3779 | 12 |
| ACOT7 | 5.775309 | 0.577531 | 10 |
| TSPAN4 | 5.19165 | 0.519165 | 10 |
| SH3RF3 | 4.652618 | 0.465262 | 10 |
| AKAP13 | 4.486244 | 0.448624 | 10 |
| ATP11A | 8.379338 | 0.931038 | 9 |
| SND1 | 8.193473 | 0.910386 | 9 |
| TSPAN9 | 6.169591 | 0.68551 | 9 |
| ADAMTS2 | 4.257765 | 0.473085 | 9 |
| AXIN2 | 4.167995 | 0.463111 | 9 |
| DNMT3A | 5.873956 | 0.734245 | 8 |
| MSRA | 4.879587 | 0.609948 | 8 |
| LINC00311 | 4.791788 | 0.598973 | 8 |
| AFF3 | 4.572348 | 0.571543 | 8 |
| C19orf25 | 5.705311 | 0.815044 | 7 |
| NAV1 | 5.457155 | 0.779594 | 7 |
| MIR548H4 | 5.03525 | 0.719321 | 7 |
| VPS13D | 4.517048 | 0.645293 | 7 |
| CXXC5 | 4.440766 | 0.634395 | 7 |
| STRA6 | 5.02413 | 0.837355 | 6 |
| RADIL | 4.864294 | 0.810716 | 6 |
| FBXL18 | 4.811372 | 0.801895 | 6 |
| FMNL2 | 4.58933 | 0.764888 | 6 |
| CRADD | 4.280388 | 0.713398 | 6 |
| TSNAX-DISC1 | 5.346518 | 1.069304 | 5 |
| RUNDC3A | 4.676827 | 0.935365 | 5 |
| ARHGEF7 | 4.428799 | 0.88576 | 5 |

TABLE 122
Cancer Type MNG_ben-3

| Gene site | imp_sum | imp_mean | n |
|---|---|---|---|
| PTPRN2 | 20.68387 | 0.252242 | 82 |
| PRDM16 | 15.67589 | 0.220787 | 71 |
| PCDHGA1 | 6.053782 | 0.102606 | 59 |
| PCDHGA2 | 6.053782 | 0.106207 | 57 |
| PCDHGA3 | 6.370168 | 0.117966 | 54 |
| PCDHGB1 | 6.370168 | 0.120192 | 53 |
| PCDHGA4 | 6.370168 | 0.124905 | 51 |
| PCDHGB2 | 5.853512 | 0.119459 | 49 |
| PCDHGA5 | 5.853512 | 0.124543 | 47 |
| PCDHGB3 | 5.537126 | 0.12877 | 43 |
| PCDHGA6 | 5.22074 | 0.130519 | 40 |
| HDAC4 | 20.47131 | 0.553279 | 37 |
| PCDHGA7 | 5.22074 | 0.141101 | 37 |
| RBFOX3 | 7.450315 | 0.212866 | 35 |
| PAX6 | 6.806875 | 0.194482 | 35 |
| PCDHGB4 | 4.904354 | 0.140124 | 35 |
| PCDHGA8 | 4.904354 | 0.140124 | 35 |
| DIP2C | 10.59089 | 0.330965 | 32 |
| PCDHGB5 | 4.587968 | 0.143374 | 32 |
| PCDHGA9 | 4.587968 | 0.147999 | 31 |
| SHANK2 | 4.876093 | 0.187542 | 26 |
| AGAP1 | 13.06947 | 0.522779 | 25 |
| CAMTA1 | 7.897581 | 0.315903 | 25 |
| PDGFRA | 6.972754 | 0.27891 | 25 |
| MEIS1 | 6.104129 | 0.254339 | 24 |
| SATB2 | 4.776486 | 0.19902 | 24 |
| RPTOR | 12.81574 | 0.557206 | 23 |
| NXN | 8.906232 | 0.387227 | 23 |
| NCOR2 | 8.168088 | 0.355134 | 23 |
| INPP5A | 7.309307 | 0.317796 | 23 |
| HOXB3 | 5.36647 | 0.233325 | 23 |
| RIMBP2 | 4.571507 | 0.198761 | 23 |
| PRKCZ | 6.534716 | 0.297033 | 22 |
| SKI | 10.2754 | 0.489305 | 21 |
| FRMD4A | 8.19508 | 0.409754 | 20 |
| ABR | 4.632685 | 0.231634 | 20 |
| SDK1 | 4.606377 | 0.230319 | 20 |
| MAD1L1 | 13.63544 | 0.717655 | 19 |
| CASZ1 | 6.490032 | 0.341581 | 19 |
| SMG1P2 | 6.468926 | 0.34047 | 19 |
| BOLA2 | 6.468926 | 0.34047 | 19 |
| LOC613038 | 6.468926 | 0.34047 | 19 |
| KCNQ1 | 6.287567 | 0.330925 | 19 |
| ZNF423 | 5.828266 | 0.306751 | 19 |
| TBC1D16 | 8.725799 | 0.484767 | 18 |
| FOXK1 | 8.629545 | 0.479419 | 18 |
| MCF2L | 6.375049 | 0.354169 | 18 |
| SEPTIN9 | 5.866236 | 0.325902 | 18 |
| FOXP1 | 7.901613 | 0.493851 | 16 |
| EBF3 | 5.143972 | 0.321498 | 16 |
| NAV2 | 4.154127 | 0.259633 | 16 |
| GLI2 | 6.306125 | 0.420408 | 15 |
| KIRREL3 | 6.113129 | 0.407542 | 15 |
| ZBTB20 | 5.936453 | 0.395764 | 15 |
| BAIAP2 | 4.920905 | 0.32806 | 15 |
| NFIX | 4.920802 | 0.328053 | 15 |
| SLX1B- | 4.25033 | 0.283355 | 15 |
| SULT1A4 | | | |
| SLX1A | 4.25033 | 0.283355 | 15 |
| LOC606724 | 4.25033 | 0.283355 | 15 |
| RPS6KA2 | 9.58383 | 0.684559 | 14 |
| GNG7 | 5.548519 | 0.396323 | 14 |
| IQSEC1 | 5.331153 | 0.380797 | 14 |
| C7orf50 | 5.028188 | 0.359156 | 14 |
| PRKAG2 | 5.008809 | 0.357772 | 14 |
| MIR548F5 | 4.352643 | 0.310903 | 14 |
| MSI2 | 7.327424 | 0.563648 | 13 |
| GSE1 | 7.256201 | 0.558169 | 13 |
| MYT1L | 4.3416 | 0.333969 | 13 |
| CMIP | 7.483342 | 0.623612 | 12 |
| ZC3H3 | 6.132744 | 0.511062 | 12 |
| GNA12 | 5.702648 | 0.475221 | 12 |
| FBRSL1 | 5.368661 | 0.447388 | 12 |
| MAML3 | 5.175135 | 0.431261 | 12 |
| MIRLET7BHG | 4.929492 | 0.410791 | 12 |
| ADGRD1 | 4.570833 | 0.380903 | 12 |
| GLUD1P2 | 4.151601 | 0.377418 | 11 |
| TBCD | 4.149873 | 0.377261 | 11 |
| ACOT7 | 5.285428 | 0.528543 | 10 |
| TSPAN4 | 5.22317 | 0.522317 | 10 |
| FMN1 | 4.161922 | 0.416192 | 10 |
| SND1 | 8.359196 | 0.9288 | 9 |
| ATP11A | 7.898134 | 0.87757 | 9 |
| ADAMTS2 | 6.192204 | 0.688023 | 9 |
| AXIN2 | 4.836435 | 0.537382 | 9 |
| CACNA2D4 | 4.640282 | 0.515587 | 9 |
| LINC00311 | 4.776345 | 0.597043 | 8 |
| SYNJ2 | 4.629386 | 0.578673 | 8 |
| DNMT3A | 4.550418 | 0.568802 | 8 |
| VRK2 | 4.391817 | 0.548977 | 8 |
| MSRA | 4.391373 | 0.548922 | 8 |
| C19orf25 | 6.125387 | 0.875055 | 7 |
| NAV1 | 5.887576 | 0.841082 | 7 |
| CXXC5 | 4.602583 | 0.657512 | 7 |
| GAK | 4.365581 | 0.623654 | 7 |
| STRA6 | 4.980778 | 0.83013 | 6 |
| FBXL18 | 4.916689 | 0.819448 | 6 |
| CRADD | 4.235191 | 0.705865 | 6 |
| TSNAX-DISC1 | 5.959609 | 1.191922 | 5 |
| RUNDC3A | 4.568501 | 0.9137 | 5 |
| ARHGEF7 | 4.229516 | 0.845903 | 5 |

TABLE 123
Cancer Type MNG_int-A

| Gene site | imp_sum | imp_mean | n |
|---|---|---|---|
| PTPRN2 | 12.70906 | 0.154989 | 82 |
| PRDM16 | 11.63816 | 0.163918 | 71 |
| PCDHGA1 | 5.103482 | 0.0865 | 59 |
| PCDHGA2 | 5.103482 | 0.089535 | 57 |
| PCDHGA3 | 4.787096 | 0.08865 | 54 |
| PCDHGB1 | 4.787096 | 0.090323 | 53 |
| PCDHGA4 | 4.47071 | 0.087661 | 51 |
| PCDHGB2 | 4.47071 | 0.091239 | 49 |
| PCDHGA5 | 4.154324 | 0.08839 | 47 |
| PCDHGB3 | 3.837938 | 0.089254 | 43 |
| HDAC4 | 18.83304 | 0.509001 | 37 |
| RBFOX3 | 7.4952 | 0.214149 | 35 |
| PAX6 | 6.917716 | 0.197649 | 35 |
| DIP2C | 9.266203 | 0.289569 | 32 |
| PCDHGB5 | 3.837938 | 0.119936 | 32 |
| PCDHGA9 | 3.837938 | 0.123804 | 31 |
| GALNT9 | 6.076149 | 0.225043 | 27 |
| SHANK2 | 7.525851 | 0.289456 | 26 |
| AGAP1 | 12.5019 | 0.500076 | 25 |
| CAMTA1 | 5.854312 | 0.234172 | 25 |
| PDGFRA | 5.588541 | 0.223542 | 25 |
| MEIS1 | 3.891259 | 0.162136 | 24 |
| RPTOR | 14.11158 | 0.613547 | 23 |
| NXN | 9.413313 | 0.409274 | 23 |
| INPP5A | 7.284435 | 0.316715 | 23 |
| NCOR2 | 6.839873 | 0.297386 | 23 |
| PRKCZ | 5.423639 | 0.246529 | 22 |
| SKI | 10.53312 | 0.501577 | 21 |
| FRMD4A | 6.034431 | 0.301722 | 20 |
| ABR | 5.825177 | 0.291259 | 20 |
| MAD1L1 | 11.00779 | 0.579357 | 19 |
| SMG1P2 | 6.451549 | 0.339555 | 19 |
| BOLA2 | 6.451549 | 0.339555 | 19 |
| LOC613038 | 6.451549 | 0.339555 | 19 |
| KCNQ1 | 6.01296 | 0.316472 | 19 |
| CASZ1 | 5.531977 | 0.291157 | 19 |
| ZNF423 | 5.186152 | 0.272955 | 19 |
| FOXK1 | 8.350727 | 0.463929 | 18 |
| SEPTIN9 | 6.99831 | 0.388795 | 18 |
| MCF2L | 6.022257 | 0.33457 | 18 |
| TBC1D16 | 5.64135 | 0.313408 | 18 |
| FOXP1 | 6.280391 | 0.392524 | 16 |
| NAV2 | 5.462 | 0.341375 | 16 |
| EBF3 | 3.907012 | 0.244188 | 16 |
| NFIX | 6.747804 | 0.449854 | 15 |
| GLI2 | 6.071155 | 0.404744 | 15 |
| ZBTB20 | 5.817437 | 0.387829 | 15 |
| KIRREL3 | 5.119068 | 0.341271 | 15 |
| KNDC1 | 4.725142 | 0.315009 | 15 |
| SLX1B- | 4.604287 | 0.306952 | 15 |
| SULT1A4 | | | |
| SLX1A | 4.604287 | 0.306952 | 15 |
| LOC606724 | 4.604287 | 0.306952 | 15 |
| BAIAP2 | 4.299045 | 0.286603 | 15 |
| RPS6KA2 | 8.388311 | 0.599165 | 14 |
| PRKAG2 | 5.969594 | 0.4264 | 14 |
| ARHGEF10 | 5.511199 | 0.393657 | 14 |
| C7orf50 | 5.16093 | 0.368638 | 14 |
| IQSEC1 | 4.830224 | 0.345016 | 14 |
| CUX1 | 4.348677 | 0.31062 | 14 |
| GNG7 | 3.996251 | 0.285446 | 14 |
| MSI2 | 5.972012 | 0.459386 | 13 |
| GSE1 | 5.837919 | 0.449071 | 13 |
| CMIP | 7.304481 | 0.608707 | 12 |
| FBRSL1 | 5.400748 | 0.450062 | 12 |
| ISLR2 | 4.337054 | 0.361421 | 12 |
| ZC3H3 | 4.310919 | 0.359243 | 12 |
| GNA12 | 4.165423 | 0.347119 | 12 |
| MIRLET7BHG | 3.974034 | 0.331169 | 12 |
| TNS3 | 3.872449 | 0.322704 | 12 |
| TBCD | 3.872749 | 0.352068 | 11 |
| VGLL4 | 3.823593 | 0.347599 | 11 |
| CTBP2 | 3.812363 | 0.346578 | 11 |
| ACOT7 | 4.898796 | 0.48988 | 10 |
| TSPAN4 | 4.506346 | 0.450635 | 10 |
| SH3RF3 | 4.276021 | 0.427602 | 10 |
| AKAP13 | 4.268271 | 0.426827 | 10 |
| CHST11 | 4.217964 | 0.421796 | 10 |
| SND1 | 7.821647 | 0.869072 | 9 |
| ATP11A | 6.425911 | 0.71399 | 9 |
| ADAMTS2 | 5.261391 | 0.584599 | 9 |
| NOTCH1 | 5.148668 | 0.572074 | 9 |
| TSPAN9 | 4.710569 | 0.523397 | 9 |
| LINC00311 | 4.665631 | 0.583204 | 8 |
| MACROD1 | 3.916449 | 0.489556 | 8 |
| MSRA | 3.844343 | 0.480543 | 8 |
| NAV1 | 5.309092 | 0.758442 | 7 |
| C19orf25 | 4.837513 | 0.691073 | 7 |
| MIR548H4 | 4.474154 | 0.639165 | 7 |
| VPS13D | 4.415997 | 0.630857 | 7 |
| CXXC5 | 3.911578 | 0.558797 | 7 |
| PCCA | 3.903166 | 0.557595 | 7 |
| STRA6 | 5.093259 | 0.848877 | 6 |
| RADIL | 4.962304 | 0.827051 | 6 |
| FBXL18 | 4.351839 | 0.725306 | 6 |
| SLC22A18AS | 3.926613 | 0.654436 | 6 |
| GRK5 | 3.770511 | 0.628419 | 6 |
| TSNAX-DISC1 | 5.623399 | 1.12468 | 5 |
| ARHGEF7 | 4.661456 | 0.932291 | 5 |
| RUNDC3A | 4.656096 | 0.931219 | 5 |
| NDST1 | 3.786943 | 0.946736 | 4 |

TABLE 124
Cancer Type MNG_int-B

| Gene site | imp_sum | imp_mean | n |
|---|---|---|---|
| PTPRN2 | 13.88466 | 0.169325 | 82 |
| PRDM16 | 8.173372 | 0.115118 | 71 |
| PCDHGA1 | 5.065148 | 0.08585 | 59 |
| PCDHGA2 | 5.065148 | 0.088862 | 57 |
| PCDHGA3 | 5.511897 | 0.102072 | 54 |
| PCDHGB1 | 5.828283 | 0.109968 | 53 |
| PCDHGA4 | 5.511897 | 0.108076 | 51 |
| PCDHGB2 | 5.511897 | 0.112488 | 49 |
| PCDHGA5 | 5.511897 | 0.117274 | 47 |
| PCDHGB3 | 5.195511 | 0.120826 | 43 |
| PCDHGA6 | 4.562739 | 0.114068 | 40 |
| HDAC4 | 15.7932 | 0.426843 | 37 |
| PCDHGA7 | 4.562739 | 0.123317 | 37 |
| PAX6 | 6.438263 | 0.18395 | 35 |
| PCDHGB4 | 4.562739 | 0.130364 | 35 |
| PCDHGA8 | 4.562739 | 0.130364 | 35 |
| DIP2C | 7.867118 | 0.245847 | 32 |
| PCDHGB5 | 4.562739 | 0.142586 | 32 |
| PCDHGA9 | 4.562739 | 0.147185 | 31 |
| PCDHGB6 | 3.863568 | 0.133226 | 29 |
| SOX2-OT | 3.6476 | 0.125779 | 29 |
| PCDHGA10 | 3.863568 | 0.137985 | 28 |
| GALNT9 | 4.52022 | 0.167416 | 27 |
| SHANK2 | 4.557056 | 0.175271 | 26 |
| AGAP1 | 11.67976 | 0.46719 | 25 |
| PDGFRA | 6.689215 | 0.267569 | 25 |
| CAMTA1 | 4.055465 | 0.162219 | 25 |
| MEIS1 | 3.916639 | 0.163193 | 24 |
| RPTOR | 11.11178 | 0.483121 | 23 |
| NCOR2 | 6.268918 | 0.272562 | 23 |
| RIMBP2 | 6.09139 | 0.264843 | 23 |
| NXN | 5.381697 | 0.233987 | 23 |
| INPP5A | 4.981406 | 0.216583 | 23 |
| HOXB3 | 4.55696 | 0.198129 | 23 |
| PRKCZ | 4.330653 | 0.196848 | 22 |
| SKI | 9.446678 | 0.449842 | 21 |
| SIM2 | 4.017456 | 0.191307 | 21 |
| HOXA-AS3 | 3.580392 | 0.170495 | 21 |
| FRMD4A | 5.566009 | 0.2783 | 20 |
| ABR | 3.899798 | 0.19499 | 20 |
| MAD1L1 | 11.63535 | 0.612387 | 19 |
| SMG1P2 | 6.677326 | 0.351438 | 19 |
| BOLA2 | 6.677326 | 0.351438 | 19 |
| LOC613038 | 6.677326 | 0.351438 | 19 |
| CASZ1 | 5.756259 | 0.302961 | 19 |
| KCNQ1 | 4.439789 | 0.233673 | 19 |
| ZNF423 | 4.205795 | 0.221358 | 19 |
| FOXK1 | 7.534776 | 0.418599 | 18 |
| MCF2L | 6.120838 | 0.340047 | 18 |
| TBC1D16 | 5.90075 | 0.327819 | 18 |
| SEPTIN9 | 4.89401 | 0.271889 | 18 |
| HOXA3 | 4.728806 | 0.262711 | 18 |
| FOXP1 | 6.315857 | 0.394741 | 16 |
| NAV2 | 4.609604 | 0.2881 | 16 |
| GLI2 | 4.915242 | 0.327683 | 15 |
| ZBTB20 | 4.755149 | 0.31701 | 15 |
| KIRREL3 | 4.620703 | 0.308047 | 15 |
| SLX1B- | 4.161771 | 0.277451 | 15 |
| SULT1A4 | | | |
| SLX1A | 4.161771 | 0.277451 | 15 |
| LOC606724 | 4.161771 | 0.277451 | 15 |
| BAIAP2 | 3.744433 | 0.249629 | 15 |
| RPS6KA2 | 6.906835 | 0.493345 | 14 |
| PRKAG2 | 5.427565 | 0.387683 | 14 |
| C7orf50 | 5.391732 | 0.385124 | 14 |
| IQSEC1 | 4.600055 | 0.328575 | 14 |
| GNG7 | 3.6835 | 0.263107 | 14 |
| GSE1 | 5.549748 | 0.426904 | 13 |
| MSI2 | 5.344116 | 0.411086 | 13 |
| SPTBN4 | 4.546944 | 0.349765 | 13 |
| MYT1L | 3.70103 | 0.284695 | 13 |
| CMIP | 5.926017 | 0.493835 | 12 |
| ZC3H3 | 4.415395 | 0.36795 | 12 |
| FBRSL1 | 4.348837 | 0.362403 | 12 |
| ADGRD1 | 3.851014 | 0.320918 | 12 |
| TBX4 | 3.806107 | 0.317176 | 12 |
| GNA12 | 3.627593 | 0.302299 | 12 |
| ACOT7 | 4.668989 | 0.466899 | 10 |
| SPPL2B | 4.349542 | 0.434954 | 10 |
| LBX1-AS1 | 4.073318 | 0.407332 | 10 |
| TSPAN4 | 3.996852 | 0.399685 | 10 |
| SND1 | 7.161256 | 0.795695 | 9 |
| ATP11A | 6.51973 | 0.724414 | 9 |
| ADAMTS2 | 4.695024 | 0.521669 | 9 |
| NOTCH1 | 3.932607 | 0.436956 | 9 |
| MGMT | 3.570064 | 0.396674 | 9 |
| LINC00311 | 5.225881 | 0.653235 | 8 |
| MSRA | 4.596947 | 0.574618 | 8 |
| PPP2R2B | 3.803844 | 0.475481 | 8 |
| VRK2 | 3.745483 | 0.468185 | 8 |
| DLEU1 | 3.627682 | 0.45346 | 8 |
| C19orf25 | 5.584434 | 0.797776 | 7 |
| NAV1 | 4.6096 | 0.658514 | 7 |
| VPS13D | 4.118734 | 0.588391 | 7 |
| MIR548H4 | 3.68959 | 0.527084 | 7 |
| RADIL | 4.735793 | 0.789299 | 6 |
| STRA6 | 4.373833 | 0.728972 | 6 |
| FBXL18 | 4.238959 | 0.706493 | 6 |
| TSNAX-DISC1 | 5.437458 | 1.087492 | 5 |
| RUNDC3A | 4.211814 | 0.842363 | 5 |
| ARHGEF7 | 4.068087 | 0.813617 | 5 |

TABLE 125
Cancer Type MNG_mal

| Gene site | imp_sum | imp_mean | n |
|---|---|---|---|
| PTPRN2 | 12.94805 | 0.157903 | 82 |
| PRDM16 | 8.949995 | 0.126056 | 71 |
| PCDHGA1 | 3.742834 | 0.063438 | 59 |
| PCDHGA2 | 3.426448 | 0.060113 | 57 |
| PCDHGA3 | 3.441065 | 0.063723 | 54 |
| PCDHGB1 | 3.441065 | 0.064926 | 53 |
| PCDHGA4 | 3.441065 | 0.067472 | 51 |
| PCDHGB3 | 4.073837 | 0.09474 | 43 |
| PCDHGA6 | 3.757451 | 0.093936 | 40 |
| HDAC4 | 18.19781 | 0.491833 | 37 |
| PCDHGA7 | 3.757451 | 0.101553 | 37 |
| RBFOX3 | 8.921133 | 0.25489 | 35 |
| PAX6 | 6.216716 | 0.17762 | 35 |
| PCDHGB4 | 3.757451 | 0.107356 | 35 |
| PCDHGA8 | 3.757451 | 0.107356 | 35 |
| DIP2C | 8.325757 | 0.26018 | 32 |
| PCDHGB5 | 3.441065 | 0.107533 | 32 |
| PCDHGA9 | 3.441065 | 0.111002 | 31 |
| SOX2-OT | 3.584088 | 0.123589 | 29 |
| PCDHGA10 | 3.64925 | 0.13033 | 28 |
| GALNT9 | 5.189127 | 0.19219 | 27 |
| ADARB2 | 3.988528 | 0.153405 | 26 |
| AGAP1 | 11.17486 | 0.446994 | 25 |
| CAMTA1 | 6.000659 | 0.240026 | 25 |
| RPTOR | 11.76013 | 0.51131 | 23 |
| NXN | 7.659148 | 0.333006 | 23 |
| INPP5A | 4.761183 | 0.207008 | 23 |
| NCOR2 | 4.40035 | 0.19132 | 23 |
| PRKCZ | 4.106408 | 0.186655 | 22 |
| SKI | 8.490324 | 0.404301 | 21 |
| FRMD4A | 6.787964 | 0.339398 | 20 |
| ABR | 3.669629 | 0.183481 | 20 |
| MAD1L1 | 10.7065 | 0.5635 | 19 |
| SMG1P2 | 5.009227 | 0.263644 | 19 |
| BOLA2 | 5.009227 | 0.263644 | 19 |
| LOC613038 | 5.009227 | 0.263644 | 19 |
| CASZ1 | 4.902776 | 0.258041 | 19 |
| KCNQ1 | 4.812443 | 0.253286 | 19 |
| FOXK1 | 6.452948 | 0.358497 | 18 |
| TBC1D16 | 5.84581 | 0.324767 | 18 |
| MCF2L | 5.590638 | 0.310591 | 18 |
| RBFOX1 | 4.056975 | 0.225388 | 18 |
| ANKRD11 | 3.383844 | 0.187991 | 18 |
| NAV2 | 4.440685 | 0.277543 | 16 |
| FOXP1 | 3.916603 | 0.244788 | 16 |
| EBF3 | 3.90489 | 0.244056 | 16 |
| ZBTB20 | 5.465001 | 0.364333 | 15 |
| GLI2 | 4.969352 | 0.33129 | 15 |
| NFIX | 4.533438 | 0.302229 | 15 |
| SLX1B- | 4.473477 | 0.298232 | 15 |
| SULT1A4 | | | |
| SLX1A | 4.473477 | 0.298232 | 15 |
| LOC606724 | 4.473477 | 0.298232 | 15 |
| KIRREL3 | 4.106736 | 0.273782 | 15 |
| RPS6KA2 | 8.928392 | 0.637742 | 14 |
| C7orf50 | 6.681647 | 0.477261 | 14 |
| ARHGEF10 | 5.338596 | 0.381328 | 14 |
| IQSEC1 | 4.800841 | 0.342917 | 14 |
| PRKAG2 | 4.714051 | 0.336718 | 14 |
| CUX1 | 4.632663 | 0.330905 | 14 |
| MIR548F5 | 4.155173 | 0.296798 | 14 |
| GNG7 | 3.580244 | 0.255732 | 14 |
| MSI2 | 5.133305 | 0.39487 | 13 |
| MYT1L | 3.815554 | 0.293504 | 13 |
| CMIP | 6.809888 | 0.567491 | 12 |
| ZC3H3 | 4.398193 | 0.366516 | 12 |
| GNA12 | 4.310731 | 0.359228 | 12 |
| FBRSL1 | 4.034154 | 0.33618 | 12 |
| CTNNA2 | 3.687655 | 0.307305 | 12 |
| ADGRD1 | 3.647518 | 0.30396 | 12 |
| FGFR2 | 4.0546 | 0.3686 | 11 |
| CTBP2 | 3.601913 | 0.327447 | 11 |
| ACOT7 | 5.255968 | 0.525597 | 10 |
| TSPAN4 | 4.289444 | 0.428944 | 10 |
| SH3RF3 | 3.83336 | 0.383336 | 10 |
| IGF1R | 3.476465 | 0.347647 | 10 |
| OTX1 | 3.449022 | 0.344902 | 10 |
| ATP11A | 7.824007 | 0.869334 | 9 |
| SND1 | 7.442588 | 0.826954 | 9 |
| ADAMTS2 | 5.027489 | 0.55861 | 9 |
| CACNA2D4 | 3.628826 | 0.403203 | 9 |
| SMAD3 | 4.239672 | 0.529959 | 8 |
| DNMT3A | 3.946081 | 0.49326 | 8 |
| VEPH1 | 3.88798 | 0.485998 | 8 |
| VRK2 | 3.825472 | 0.478184 | 8 |
| DLEU1 | 3.764402 | 0.47055 | 8 |
| LINC00311 | 3.678141 | 0.459768 | 8 |
| MIR548H4 | 5.581196 | 0.797314 | 7 |
| NAV1 | 5.02652 | 0.718074 | 7 |
| VPS13D | 4.911104 | 0.701586 | 7 |
| C19orf25 | 4.766988 | 0.680998 | 7 |
| RXRA | 3.926521 | 0.560932 | 7 |
| FBXL18 | 3.935586 | 0.655931 | 6 |
| RADIL | 3.842419 | 0.640403 | 6 |
| STRA6 | 3.640968 | 0.606828 | 6 |
| TSNAX-DISC1 | 4.753472 | 0.950694 | 5 |
| RUNDC3A | 4.748996 | 0.949799 | 5 |
| ARHGEF7 | 3.710766 | 0.742153 | 5 |
| STAP2 | 3.497874 | 0.874469 | 4 |
| NDST1 | 3.352395 | 0.838099 | 4 |
| RALGAPA2 | 3.456247 | 1.728124 | 2 |

TABLE 126
Cancer Type MNG_SMARCE1

| Gene site | imp_sum | imp_mean | n |
|---|---|---|---|
| PTPRN2 | 12.6468 | 0.154229 | 82 |
| PRDM16 | 7.651707 | 0.107771 | 71 |
| PCDHGA1 | 3.526478 | 0.059771 | 59 |
| PCDHGA2 | 3.526478 | 0.061868 | 57 |
| PCDHGA3 | 3.210092 | 0.059446 | 54 |
| PCDHGB1 | 3.210092 | 0.060568 | 53 |
| PCDHGB2 | 2.893706 | 0.059055 | 49 |
| PCDHGA5 | 2.893706 | 0.061568 | 47 |
| HDAC4 | 16.10253 | 0.435203 | 37 |
| RBFOX3 | 4.992208 | 0.142635 | 35 |
| DIP2C | 7.020543 | 0.219392 | 32 |
| GALNT9 | 3.837148 | 0.142117 | 27 |
| SHANK2 | 4.458318 | 0.171474 | 26 |
| AGAP1 | 9.868271 | 0.394731 | 25 |
| PDGFRA | 3.890312 | 0.155612 | 25 |
| CAMTA1 | 3.737071 | 0.149483 | 25 |
| RPTOR | 8.560527 | 0.372197 | 23 |
| NXN | 5.377517 | 0.233805 | 23 |
| NCOR2 | 4.435836 | 0.192862 | 23 |
| INPP5A | 4.025097 | 0.175004 | 23 |
| PRKCZ | 3.311051 | 0.150502 | 22 |
| SKI | 8.789183 | 0.418533 | 21 |
| FRMD4A | 4.962322 | 0.248116 | 20 |
| SDK1 | 3.806423 | 0.190321 | 20 |
| ABR | 3.53343 | 0.176672 | 20 |
| MAD1L1 | 9.944865 | 0.523414 | 19 |
| CASZ1 | 5.357683 | 0.281983 | 19 |
| SMG1P2 | 5.102141 | 0.268534 | 19 |
| BOLA2 | 5.102141 | 0.268534 | 19 |
| LOC613038 | 5.102141 | 0.268534 | 19 |
| KCNQ1 | 3.579382 | 0.188389 | 19 |
| FOXK1 | 6.658177 | 0.369899 | 18 |
| MCF2L | 4.412204 | 0.245122 | 18 |
| TBC1D16 | 4.185513 | 0.232528 | 18 |
| TBX15 | 2.980007 | 0.175295 | 17 |
| FOXP1 | 6.048305 | 0.378019 | 16 |
| EBF3 | 3.478604 | 0.217413 | 16 |
| GLI2 | 5.692075 | 0.379472 | 15 |
| BAIAP2 | 4.493922 | 0.299595 | 15 |
| KIRREL3 | 4.378257 | 0.291884 | 15 |
| SLX1B- | 4.125981 | 0.275065 | 15 |
| SULT1A4 | | | |
| SLX1A | 4.125981 | 0.275065 | 15 |
| LOC606724 | 4.125981 | 0.275065 | 15 |
| ZBTB20 | 3.943137 | 0.262876 | 15 |
| NFIX | 3.623907 | 0.241594 | 15 |
| RPS6KA2 | 6.025742 | 0.43041 | 14 |
| IQSEC1 | 5.110088 | 0.365006 | 14 |
| ARHGEF10 | 4.474738 | 0.319624 | 14 |
| PRKAG2 | 3.804304 | 0.271736 | 14 |
| C7orf50 | 3.55488 | 0.25392 | 14 |
| CUX1 | 3.121578 | 0.22297 | 14 |
| MSI2 | 4.770678 | 0.366975 | 13 |
| MYT1L | 4.076914 | 0.313609 | 13 |
| GSE1 | 4.001949 | 0.307842 | 13 |
| CMIP | 6.030674 | 0.502556 | 12 |
| FBRSL1 | 4.65505 | 0.387921 | 12 |
| ZC3H3 | 3.719253 | 0.309938 | 12 |
| ADGRD1 | 3.181569 | 0.265131 | 12 |
| CTBP2 | 3.630217 | 0.33002 | 11 |
| COL4A1 | 2.990737 | 0.271885 | 11 |
| ACOT7 | 5.373632 | 0.537363 | 10 |
| GAS7 | 3.731548 | 0.373155 | 10 |
| TSPAN4 | 3.550146 | 0.355015 | 10 |
| AKAP13 | 3.401954 | 0.340195 | 10 |
| ATP11A | 6.644252 | 0.73825 | 9 |
| SND1 | 5.700985 | 0.633443 | 9 |
| ADAMTS2 | 5.450143 | 0.605571 | 9 |
| KCNH2 | 3.652449 | 0.405828 | 9 |
| TSPAN9 | 3.398288 | 0.377588 | 9 |
| CACNA2D4 | 3.264015 | 0.362668 | 9 |
| TRAPPC12 | 2.944589 | 0.327177 | 9 |
| LINC00311 | 4.435695 | 0.554462 | 8 |
| DNMT3A | 4.416558 | 0.55207 | 8 |
| DLEU1 | 3.361173 | 0.420147 | 8 |
| MSRA | 3.294925 | 0.411866 | 8 |
| SYNJ2 | 2.961715 | 0.370214 | 8 |
| ASPSCR1 | 2.915682 | 0.36446 | 8 |
| CXXC5 | 5.650038 | 0.807148 | 7 |
| RXRA | 4.165872 | 0.595125 | 7 |
| VPS13D | 4.089338 | 0.584191 | 7 |
| MIR548H4 | 3.961827 | 0.565975 | 7 |
| NAV1 | 3.792954 | 0.541851 | 7 |
| GAK | 3.696837 | 0.52812 | 7 |
| C19orf25 | 3.252634 | 0.464662 | 7 |
| FBXL18 | 4.26533 | 0.710888 | 6 |
| RADIL | 3.421879 | 0.570313 | 6 |
| COQ8A | 3.189345 | 0.531558 | 6 |
| SLC22A18AS | 3.068701 | 0.51145 | 6 |
| CRADD | 2.919457 | 0.486576 | 6 |
| RUNDC3A | 4.524519 | 0.904904 | 5 |
| ARHGEF7 | 4.430204 | 0.886041 | 5 |
| TSNAX-DISC1 | 3.723805 | 0.744761 | 5 |
| SDK2 | 2.924278 | 0.584856 | 5 |
| GSG1 | 3.483081 | 0.87077 | 4 |
| STAP2 | 3.222442 | 0.80561 | 4 |
| DAGLB | 2.962308 | 0.987436 | 3 |
| SLC6A9 | 2.929569 | 0.976523 | 3 |
| RALGAPA2 | 3.938003 | 1.969001 | 2 |
| SLC25A10 | 2.971607 | 1.485803 | 2 |
| CHTF18 | 2.949343 | 1.474671 | 2 |

TABLE 127
Cancer Type MPNST_Atyp

| Gene site | imp_sum | imp_mean | n |
|---|---|---|---|
| PTPRN2 | 10.49688 | 0.128011 | 82 |
| PRDM16 | 9.331638 | 0.131432 | 71 |
| PCDHGA1 | 4.610238 | 0.07814 | 59 |
| PCDHGA2 | 4.926624 | 0.086432 | 57 |
| PCDHGA3 | 4.926624 | 0.091234 | 54 |
| PCDHGB1 | 4.926624 | 0.092955 | 53 |
| PCDHGA4 | 4.926624 | 0.0966 | 51 |
| PCDHGB2 | 4.926624 | 0.100543 | 49 |
| PCDHGA5 | 4.926624 | 0.104822 | 47 |
| PCDHGB3 | 4.077744 | 0.094831 | 43 |
| PCDHGA6 | 3.761358 | 0.094034 | 40 |
| HDAC4 | 11.4268 | 0.308832 | 37 |
| PCDHGA7 | 3.761358 | 0.101658 | 37 |
| RBFOX3 | 3.763689 | 0.107534 | 35 |
| PCDHGB4 | 3.761358 | 0.107467 | 35 |
| PCDHGA8 | 3.761358 | 0.107467 | 35 |
| DIP2C | 4.329398 | 0.135294 | 32 |
| PCDHGB5 | 4.077744 | 0.127429 | 32 |
| PCDHGA9 | 4.077744 | 0.13154 | 31 |
| PCDHGB6 | 4.077744 | 0.140612 | 29 |
| PCDHGA10 | 3.761358 | 0.134334 | 28 |
| ADARB2 | 5.230539 | 0.201175 | 26 |
| AGAP1 | 10.77193 | 0.430877 | 25 |
| PDGFRA | 4.667772 | 0.186711 | 25 |
| PCDHGB7 | 3.761358 | 0.156723 | 24 |
| MEIS1 | 2.611056 | 0.108794 | 24 |
| RPTOR | 8.23786 | 0.358168 | 23 |
| NCOR2 | 7.734358 | 0.336276 | 23 |
| HOXB3 | 4.665346 | 0.202841 | 23 |
| RIMBP2 | 3.795662 | 0.165029 | 23 |
| PCDHGA11 | 3.761358 | 0.163537 | 23 |
| NXN | 3.212903 | 0.139691 | 23 |
| HOXA-AS3 | 8.000536 | 0.380978 | 21 |
| SKI | 7.268894 | 0.346138 | 21 |
| ZIC4 | 2.892044 | 0.137716 | 21 |
| FRMD4A | 5.721777 | 0.286089 | 20 |
| ABR | 3.043403 | 0.15217 | 20 |
| SDK1 | 3.002207 | 0.15011 | 20 |
| MAD1L1 | 6.504966 | 0.342367 | 19 |
| SMG1P2 | 5.137537 | 0.270397 | 19 |
| BOLA2 | 5.137537 | 0.270397 | 19 |
| LOC613038 | 5.137537 | 0.270397 | 19 |
| ZNF423 | 4.51416 | 0.237587 | 19 |
| CASZ1 | 2.803664 | 0.147561 | 19 |
| KCNQ1 | 2.551606 | 0.134295 | 19 |
| SEPTIN9 | 3.752735 | 0.208485 | 18 |
| TBC1D16 | 3.662815 | 0.20349 | 18 |
| RBFOX1 | 3.58725 | 0.199292 | 18 |
| FOXK1 | 3.086634 | 0.17148 | 18 |
| TBX15 | 3.045215 | 0.17913 | 17 |
| EBF3 | 2.79486 | 0.174679 | 16 |
| NAV2 | 2.583868 | 0.161492 | 16 |
| GLI2 | 4.238032 | 0.282535 | 15 |
| ZBTB20 | 3.214638 | 0.214309 | 15 |
| BAIAP2 | 3.051758 | 0.203451 | 15 |
| PCDHGA12 | 3.761358 | 0.268668 | 14 |
| C7orf50 | 3.23462 | 0.231044 | 14 |
| PRKAG2 | 3.066192 | 0.219014 | 14 |
| CUX1 | 3.004756 | 0.214625 | 14 |
| MSI2 | 3.521666 | 0.270897 | 13 |
| HOXC4 | 2.965225 | 0.228094 | 13 |
| CMIP | 4.557839 | 0.37982 | 12 |
| FBRSL1 | 4.0272 | 0.3356 | 12 |
| ADGRD1 | 2.847644 | 0.237304 | 12 |
| CSMD1 | 2.623068 | 0.218589 | 12 |
| SPON2 | 3.904574 | 0.354961 | 11 |
| PCDHGC3 | 3.761358 | 0.341942 | 11 |
| TBCD | 3.554525 | 0.323139 | 11 |
| SLC9A3 | 2.948527 | 0.268048 | 11 |
| CACNAIC | 2.885609 | 0.262328 | 11 |
| SLC38A10 | 2.782131 | 0.252921 | 11 |
| AKAP13 | 3.296816 | 0.329682 | 10 |
| TSPAN4 | 2.826546 | 0.282655 | 10 |
| OTX1 | 2.726245 | 0.272625 | 10 |
| SND1 | 6.561738 | 0.729082 | 9 |
| ATP11A | 5.144064 | 0.571563 | 9 |
| TSPAN9 | 4.146995 | 0.460777 | 9 |
| ADAMTS2 | 3.609916 | 0.401102 | 9 |
| CACNA2D4 | 3.200749 | 0.355639 | 9 |
| NOTCH1 | 2.66549 | 0.296166 | 9 |
| MGMT | 2.65052 | 0.294502 | 9 |
| MSRA | 3.799832 | 0.474979 | 8 |
| DLEU1 | 3.293788 | 0.411723 | 8 |
| LINC00311 | 3.188449 | 0.398556 | 8 |
| MACROD1 | 2.626244 | 0.32828 | 8 |
| GAK | 3.474309 | 0.49633 | 7 |
| NAV1 | 2.733392 | 0.390485 | 7 |
| MIR548H4 | 2.627448 | 0.37535 | 7 |
| VPS13D | 2.601164 | 0.371595 | 7 |
| CCDC177 | 3.719957 | 0.619993 | 6 |
| FBXL18 | 3.461798 | 0.576966 | 6 |
| FMNL2 | 2.888892 | 0.481482 | 6 |
| ARHGEF7 | 3.716752 | 0.74335 | 5 |
| TSNAX-DISC1 | 3.313869 | 0.662774 | 5 |
| RUNDC3A | 2.954544 | 0.590909 | 5 |
| ARHGAP25 | 2.753627 | 0.550725 | 5 |
| VAV2 | 2.665216 | 0.533043 | 5 |
| TK1 | 2.58289 | 0.516578 | 5 |
| DICER1 | 2.564388 | 0.854796 | 3 |
| WDR81 | 2.558472 | 1.279236 | 2 |

TABLE 128
Cancer Type MPNST_Typ

| Gene site | imp_sum | imp_mean | n |
|---|---|---|---|
| PTPRN2 | 11.40859 | 0.139129 | 82 |
| PRDM16 | 16.35938 | 0.230414 | 71 |
| PCDHGA1 | 7.813541 | 0.132433 | 59 |
| PCDHGA2 | 7.497155 | 0.131529 | 57 |
| PCDHGA3 | 7.813541 | 0.144695 | 54 |
| PCDHGB1 | 8.129927 | 0.153395 | 53 |
| PCDHGA4 | 7.682672 | 0.150641 | 51 |
| PCDHGB2 | 7.682672 | 0.156789 | 49 |
| PCDHGA5 | 7.366286 | 0.156729 | 47 |
| PCDHGB3 | 7.006468 | 0.162941 | 43 |
| PCDHGA6 | 7.006468 | 0.175162 | 40 |
| HDAC4 | 18.57195 | 0.501945 | 37 |
| PCDHGA7 | 6.243333 | 0.168739 | 37 |
| RBFOX3 | 7.251853 | 0.207196 | 35 |
| PCDHGB4 | 6.243333 | 0.178381 | 35 |
| PCDHGA8 | 6.243333 | 0.178381 | 35 |
| PAX6 | 5.878477 | 0.167956 | 35 |
| DIP2C | 8.558231 | 0.267445 | 32 |
| PCDHGB5 | 6.559719 | 0.204991 | 32 |
| PCDHGA9 | 6.559719 | 0.211604 | 31 |
| SOX2-OT | 7.031322 | 0.242459 | 29 |
| PCDHGB6 | 5.793022 | 0.199759 | 29 |
| PCDHGA10 | 5.793022 | 0.206894 | 28 |
| GALNT9 | 5.65269 | 0.209359 | 27 |
| SHANK2 | 5.418389 | 0.2084 | 26 |
| AGAP1 | 13.66331 | 0.546533 | 25 |
| CAMTA1 | 7.369768 | 0.294791 | 25 |
| PDGFRA | 5.680583 | 0.227223 | 25 |
| SATB2 | 6.052462 | 0.252186 | 24 |
| PCDHGB7 | 6.005152 | 0.250215 | 24 |
| MEIS1 | 5.069165 | 0.211215 | 24 |
| RPTOR | 11.28283 | 0.490558 | 23 |
| INPP5A | 6.336466 | 0.275499 | 23 |
| PCDHGA11 | 5.688766 | 0.247338 | 23 |
| NCOR2 | 4.059225 | 0.176488 | 23 |
| RIMBP2 | 4.055906 | 0.176344 | 23 |
| PRKCZ | 4.788565 | 0.217662 | 22 |
| SKI | 7.873089 | 0.374909 | 21 |
| HOXA-AS3 | 6.084415 | 0.289734 | 21 |
| SIM2 | 5.226048 | 0.248859 | 21 |
| ZIC4 | 4.034207 | 0.192105 | 21 |
| FRMD4A | 6.957362 | 0.347868 | 20 |
| SDK1 | 4.378271 | 0.218914 | 20 |
| MAD1L1 | 12.12049 | 0.637921 | 19 |
| CASZ1 | 7.28862 | 0.383612 | 19 |
| ZNF423 | 6.088723 | 0.320459 | 19 |
| SMG1P2 | 5.066878 | 0.266678 | 19 |
| BOLA2 | 5.066878 | 0.266678 | 19 |
| LOC613038 | 5.066878 | 0.266678 | 19 |
| KCNQ1 | 4.118846 | 0.216781 | 19 |
| FOXK1 | 6.011675 | 0.333982 | 18 |
| TBC1D16 | 5.491063 | 0.305059 | 18 |
| ANKRD11 | 4.830669 | 0.268371 | 18 |
| MCF2L | 3.893409 | 0.216301 | 18 |
| PAX6-AS1 | 5.287482 | 0.311028 | 17 |
| RCN1 | 5.287482 | 0.311028 | 17 |
| FOXP1 | 6.513298 | 0.407081 | 16 |
| EBF3 | 5.517271 | 0.344829 | 16 |
| GLI2 | 6.64064 | 0.442709 | 15 |
| BAIAP2 | 5.555953 | 0.370397 | 15 |
| KIRREL3 | 4.728594 | 0.31524 | 15 |
| IQSEC1 | 5.990637 | 0.427903 | 14 |
| RPS6KA2 | 5.431633 | 0.387974 | 14 |
| PCDHGA12 | 4.608739 | 0.329196 | 14 |
| TBX5 | 4.533789 | 0.323842 | 14 |
| CACNA1H | 4.164851 | 0.297489 | 14 |
| PRKAG2 | 4.033154 | 0.288082 | 14 |
| ARHGEF10 | 4.013836 | 0.286703 | 14 |
| MIR548F5 | 3.912287 | 0.279449 | 14 |
| GSE1 | 5.106679 | 0.392821 | 13 |
| MSI2 | 4.801108 | 0.369316 | 13 |
| SPTBN4 | 4.123586 | 0.317199 | 13 |
| CMIP | 5.474613 | 0.456218 | 12 |
| ZC3H3 | 5.183168 | 0.431931 | 12 |
| FBRSL1 | 4.300782 | 0.358398 | 12 |
| TNS3 | 4.118537 | 0.343211 | 12 |
| CCDC140 | 5.431056 | 0.493732 | 11 |
| COL4A1 | 4.814247 | 0.437659 | 11 |
| PCDHGC3 | 4.292353 | 0.390214 | 11 |
| AKAP13 | 4.837756 | 0.483776 | 10 |
| FMN1 | 4.308091 | 0.430809 | 10 |
| KLHL29 | 4.18457 | 0.418457 | 10 |
| ACOT7 | 3.897802 | 0.38978 | 10 |
| SND1 | 7.906603 | 0.878511 | 9 |
| ADAMTS2 | 6.07413 | 0.674903 | 9 |
| ATP11A | 6.044255 | 0.671584 | 9 |
| TRAPPC12 | 4.67812 | 0.519791 | 9 |
| MGMT | 4.059266 | 0.45103 | 9 |
| DLEU1 | 5.18969 | 0.648711 | 8 |
| MSRA | 4.894293 | 0.611787 | 8 |
| GATA4 | 4.400518 | 0.550065 | 8 |
| DNMT3A | 3.983243 | 0.497905 | 8 |
| NAV1 | 4.498508 | 0.642644 | 7 |
| GAK | 4.268656 | 0.609808 | 7 |
| FBXL18 | 4.842362 | 0.80706 | 6 |
| CRADD | 4.395121 | 0.73252 | 6 |
| PAX1 | 4.032237 | 0.672039 | 6 |
| RUNDC3A | 5.089872 | 1.017974 | 5 |
| TSNAX-DISC1 | 4.853614 | 0.970723 | 5 |
| ARHGEF7 | 4.292926 | 0.858585 | 5 |

TABLE 129
Cancer Type MYXGNT

| Gene site | imp_sum | imp_mean | n |
|---|---|---|---|
| PTPRN2 | 8.063995 | 0.098341 | 82 |
| PRDM16 | 6.015023 | 0.084719 | 71 |
| PCDHGA1 | 2.438596 | 0.041332 | 59 |
| PCDHGA2 | 2.438596 | 0.042782 | 57 |
| PCDHGA3 | 2.438596 | 0.045159 | 54 |
| PCDHGB1 | 2.438596 | 0.046011 | 53 |
| PCDHGA4 | 2.438596 | 0.047816 | 51 |
| PCDHGB2 | 2.438596 | 0.049767 | 49 |
| PCDHGA5 | 2.438596 | 0.051885 | 47 |
| PCDHGB3 | 2.12221 | 0.049354 | 43 |
| PCDHGA6 | 2.12221 | 0.053055 | 40 |
| HDAC4 | 5.344795 | 0.144454 | 37 |
| PCDHGA7 | 2.12221 | 0.057357 | 37 |
| PAX6 | 5.957941 | 0.170227 | 35 |
| RBFOX3 | 2.249688 | 0.064277 | 35 |
| PCDHGB4 | 2.12221 | 0.060635 | 35 |
| PCDHGA8 | 2.12221 | 0.060635 | 35 |
| DIP2C | 4.667771 | 0.145868 | 32 |
| PCDHGB5 | 2.12221 | 0.066319 | 32 |
| PCDHGA9 | 2.12221 | 0.068458 | 31 |
| SOX2-OT | 4.654458 | 0.160499 | 29 |
| PDGFRA | 4.560928 | 0.182437 | 25 |
| CAMTA1 | 2.86826 | 0.11473 | 25 |
| AGAP1 | 2.62551 | 0.10502 | 25 |
| SATB2 | 4.23038 | 0.176266 | 24 |
| RPTOR | 5.827061 | 0.25335 | 23 |
| INPP5A | 2.986581 | 0.129851 | 23 |
| NXN | 2.618838 | 0.113863 | 23 |
| NCOR2 | 2.359705 | 0.102596 | 23 |
| PRKCZ | 2.771693 | 0.125986 | 22 |
| SKI | 4.88071 | 0.232415 | 21 |
| SIM2 | 2.403596 | 0.114457 | 21 |
| FRMD4A | 4.809888 | 0.240494 | 20 |
| ZNF423 | 5.127221 | 0.269854 | 19 |
| MAD1L1 | 5.063347 | 0.266492 | 19 |
| SMG1P2 | 3.051539 | 0.160607 | 19 |
| BOLA2 | 3.051539 | 0.160607 | 19 |
| LOC613038 | 3.051539 | 0.160607 | 19 |
| MCF2L | 3.682952 | 0.204608 | 18 |
| SEPTIN9 | 3.483625 | 0.193535 | 18 |
| TBC1D16 | 3.38681 | 0.188156 | 18 |
| FOXK1 | 3.374784 | 0.187488 | 18 |
| RBFOX1 | 2.248114 | 0.124895 | 18 |
| OPCML | 4.650709 | 0.273571 | 17 |
| TBX15 | 3.241245 | 0.190661 | 17 |
| SORBS2 | 2.949142 | 0.184321 | 16 |
| FOXP1 | 2.733394 | 0.170837 | 16 |
| GLI2 | 7.012457 | 0.467497 | 15 |
| EMX2OS | 2.535671 | 0.169045 | 15 |
| CUX1 | 2.623715 | 0.187408 | 14 |
| C7orf50 | 2.108388 | 0.150599 | 14 |
| MSI2 | 3.427545 | 0.263657 | 13 |
| MYT1L | 2.912141 | 0.224011 | 13 |
| SPTBN4 | 2.214702 | 0.170362 | 13 |
| CMIP | 3.717364 | 0.30978 | 12 |
| FBRSL1 | 2.420882 | 0.20174 | 12 |
| MEIS2 | 2.311873 | 0.192656 | 12 |
| MIRLET7BHG | 2.110346 | 0.175862 | 12 |
| CCDC140 | 2.680388 | 0.243672 | 11 |
| RAD51B | 2.510789 | 0.228254 | 11 |
| VGLL4 | 2.298538 | 0.208958 | 11 |
| FGFR2 | 2.241963 | 0.203815 | 11 |
| GLUD1P2 | 2.212583 | 0.201144 | 11 |
| ZC3H12D | 2.073195 | 0.188472 | 11 |
| LBX1-AS1 | 3.409043 | 0.340904 | 10 |
| ACOT7 | 2.570845 | 0.257085 | 10 |
| RGS12 | 2.401681 | 0.240168 | 10 |
| TP73 | 2.363542 | 0.236354 | 10 |
| GRID1 | 2.214702 | 0.22147 | 10 |
| MAML2 | 2.119074 | 0.211907 | 10 |
| ATP11A | 3.768101 | 0.418678 | 9 |
| TRAPPC12 | 3.431857 | 0.381317 | 9 |
| SND1 | 3.356011 | 0.37289 | 9 |
| NOTCH1 | 3.323558 | 0.369284 | 9 |
| ASAP1 | 3.018533 | 0.335393 | 9 |
| KAZN | 2.509768 | 0.278863 | 9 |
| KCNMA1 | 2.356243 | 0.261805 | 9 |
| AXIN2 | 2.329512 | 0.258835 | 9 |
| KCNH2 | 2.23091 | 0.247879 | 9 |
| ADGRB1 | 2.222378 | 0.246931 | 9 |
| LINC00311 | 2.238754 | 0.279844 | 8 |
| MSRA | 2.182144 | 0.272768 | 8 |
| NXPH1 | 2.151276 | 0.268909 | 8 |
| DUSP6 | 4.271224 | 0.610175 | 7 |
| FHIT | 2.833737 | 0.40482 | 7 |
| NAV1 | 2.786186 | 0.398027 | 7 |
| LINC00461 | 2.366798 | 0.338114 | 7 |
| LHPP | 2.10422 | 0.300603 | 7 |
| FBXL18 | 2.190535 | 0.365089 | 6 |
| CRADD | 2.179627 | 0.363271 | 6 |
| CACNA2D3 | 2.129801 | 0.354967 | 6 |
| FAM181A | 2.11702 | 0.352837 | 6 |
| RUNDC3A | 3.425236 | 0.685047 | 5 |
| LIPE-AS1 | 2.290428 | 0.572607 | 4 |
| RBMS3 | 2.287928 | 0.571982 | 4 |
| GRIN2B | 3.005057 | 1.001686 | 3 |
| BFSP2 | 2.545119 | 0.848373 | 3 |
| DAGLB | 2.260342 | 0.753447 | 3 |
| LOXL3 | 2.084867 | 0.694956 | 3 |
| SOX10 | 4.027447 | 2.013724 | 2 |

TABLE 130
Cancer Type NB_MYCN

| Gene site | imp_sum | imp_mean | n |
|---|---|---|---|
| PTPRN2 | 13.77349 | 0.167969 | 82 |
| PRDM16 | 9.137531 | 0.128698 | 71 |
| HDAC4 | 14.90914 | 0.40295 | 37 |
| PAX6 | 10.20883 | 0.291681 | 35 |
| RBFOX3 | 5.604467 | 0.160128 | 35 |
| DIP2C | 12.68854 | 0.396517 | 32 |
| SHANK2 | 4.94307 | 0.190118 | 26 |
| ADARB2 | 3.879706 | 0.149219 | 26 |
| AGAP1 | 8.455554 | 0.338222 | 25 |
| CAMTA1 | 4.880188 | 0.195208 | 25 |
| RPTOR | 8.818478 | 0.383412 | 23 |
| NXN | 7.999339 | 0.347797 | 23 |
| NCOR2 | 5.498296 | 0.239056 | 23 |
| INPP5A | 4.389074 | 0.190829 | 23 |
| RIMBP2 | 3.857062 | 0.167698 | 23 |
| HOXB3 | 3.516834 | 0.152906 | 23 |
| PRKCZ | 4.116492 | 0.187113 | 22 |
| SKI | 7.34881 | 0.349943 | 21 |
| SIM2 | 4.031072 | 0.191956 | 21 |
| FRMD4A | 5.693082 | 0.284654 | 20 |
| SDK1 | 3.987692 | 0.199385 | 20 |
| ABR | 3.501392 | 0.17507 | 20 |
| MAD1L1 | 11.2606 | 0.592663 | 19 |
| ZNF423 | 6.710876 | 0.353204 | 19 |
| SMG1P2 | 6.20605 | 0.326634 | 19 |
| BOLA2 | 6.20605 | 0.326634 | 19 |
| LOC613038 | 6.20605 | 0.326634 | 19 |
| CASZ1 | 5.513095 | 0.290163 | 19 |
| KCNQ1 | 3.348152 | 0.176219 | 19 |
| SEPTIN9 | 4.875206 | 0.270845 | 18 |
| FOXK1 | 4.738861 | 0.26327 | 18 |
| ANKRD11 | 4.444749 | 0.246931 | 18 |
| MCF2L | 3.973541 | 0.220752 | 18 |
| TBC1D16 | 3.477985 | 0.193221 | 18 |
| PAX6-AS1 | 6.095823 | 0.358578 | 17 |
| RCN1 | 6.095823 | 0.358578 | 17 |
| HBG2 | 4.729845 | 0.278226 | 17 |
| EBF3 | 3.910934 | 0.244433 | 16 |
| LRMDA | 5.250944 | 0.350063 | 15 |
| BAIAP2 | 4.496185 | 0.299746 | 15 |
| NFATC1 | 4.454533 | 0.296969 | 15 |
| KIRREL3 | 4.373066 | 0.291538 | 15 |
| GLI2 | 4.301867 | 0.286791 | 15 |
| ZBTB20 | 3.974717 | 0.264981 | 15 |
| DLX6-AS1 | 3.564548 | 0.237637 | 15 |
| PRKAG2 | 5.022579 | 0.358756 | 14 |
| CUX1 | 4.798593 | 0.342757 | 14 |
| MIR548F5 | 3.780039 | 0.270003 | 14 |
| C7orf50 | 3.778709 | 0.269908 | 14 |
| MOB2 | 3.306584 | 0.236185 | 14 |
| MSI2 | 8.759201 | 0.673785 | 13 |
| RFX4 | 4.748792 | 0.365292 | 13 |
| GSE1 | 3.671473 | 0.282421 | 13 |
| MYT1L | 3.629239 | 0.279172 | 13 |
| CMIP | 6.157676 | 0.51314 | 12 |
| ZC3H3 | 5.181392 | 0.431783 | 12 |
| FBRSL1 | 4.383222 | 0.365268 | 12 |
| TBX4 | 4.04326 | 0.336938 | 12 |
| CSMD1 | 3.909171 | 0.325764 | 12 |
| MAML3 | 3.776111 | 0.314676 | 12 |
| TNS3 | 3.647926 | 0.303994 | 12 |
| RASA3 | 3.439803 | 0.28665 | 12 |
| RAD51B | 4.731405 | 0.430128 | 11 |
| CTBP2 | 3.3705 | 0.306409 | 11 |
| TSPAN4 | 5.159493 | 0.515949 | 10 |
| AKAP13 | 4.027337 | 0.402734 | 10 |
| SH3RF3 | 3.721306 | 0.372131 | 10 |
| SND1 | 5.288539 | 0.587615 | 9 |
| ADAMTS2 | 4.883445 | 0.542605 | 9 |
| ATP11A | 4.40828 | 0.489809 | 9 |
| TSPAN9 | 4.22834 | 0.469816 | 9 |
| CACNA2D4 | 4.211872 | 0.467986 | 9 |
| KAZN | 3.950567 | 0.438952 | 9 |
| AXIN2 | 3.512069 | 0.39023 | 9 |
| GPC6 | 3.439569 | 0.382174 | 9 |
| KCNH2 | 3.396482 | 0.377387 | 9 |
| EGFR | 3.281196 | 0.364577 | 9 |
| MSRA | 4.251822 | 0.531478 | 8 |
| SYNJ2 | 3.507904 | 0.438488 | 8 |
| TENM2 | 3.360203 | 0.420025 | 8 |
| NXPH1 | 3.272993 | 0.409124 | 8 |
| LINC00311 | 3.247338 | 0.405917 | 8 |
| GAK | 4.507366 | 0.643909 | 7 |
| C19orf25 | 4.332101 | 0.618872 | 7 |
| NAV1 | 3.751485 | 0.535926 | 7 |
| HOXD3 | 3.302864 | 0.471838 | 7 |
| VPS13D | 3.270809 | 0.467258 | 7 |
| PACRG | 3.188281 | 0.455469 | 7 |
| CRADD | 4.283501 | 0.713917 | 6 |
| FBXL18 | 3.71622 | 0.61937 | 6 |
| FMNL2 | 3.462802 | 0.577134 | 6 |
| WFIKKN2 | 3.183348 | 0.530558 | 6 |
| TSNAX-DISC1 | 4.991709 | 0.998342 | 5 |
| RUNDC3A | 4.645029 | 0.929006 | 5 |
| ARHGEF7 | 3.825064 | 0.765013 | 5 |
| MPP7 | 3.296489 | 0.659298 | 5 |
| FYN | 4.38385 | 1.095962 | 4 |
| CHTF18 | 3.828653 | 1.914327 | 2 |
| SLC25A10 | 3.373693 | 1.686847 | 2 |
| ANKLE2 | 3.350613 | 1.675307 | 2 |

TABLE 131
Cancer Type NB_TMMneg

| Gene site | imp_sum | imp_mean | n |
|---|---|---|---|
| PTPRN2 | 18.55652 | 0.226299 | 82 |
| PRDM16 | 10.22762 | 0.144051 | 71 |
| PCDHGA1 | 7.152279 | 0.121225 | 59 |
| PCDHGA2 | 6.835893 | 0.119928 | 57 |
| PCDHGA3 | 6.474104 | 0.119891 | 54 |
| PCDHGB1 | 6.474104 | 0.122153 | 53 |
| PCDHGA4 | 6.046453 | 0.118558 | 51 |
| PCDHGB2 | 5.625262 | 0.114801 | 49 |
| PCDHGA5 | 5.941648 | 0.126418 | 47 |
| PCDHGB3 | 5.5052 | 0.128028 | 43 |
| PCDHGA6 | 5.5052 | 0.13763 | 40 |
| HDAC4 | 17.16275 | 0.463858 | 37 |
| PCDHGA7 | 4.872428 | 0.131687 | 37 |
| PAX6 | 11.01388 | 0.314682 | 35 |
| RBFOX3 | 5.676042 | 0.162173 | 35 |
| PCDHGB4 | 4.556042 | 0.130173 | 35 |
| PCDHGA8 | 4.556042 | 0.130173 | 35 |
| DIP2C | 11.64339 | 0.363856 | 32 |
| PCDHGB5 | 4.239656 | 0.132489 | 32 |
| GALNT9 | 5.149882 | 0.190736 | 27 |
| SHANK2 | 6.159903 | 0.236919 | 26 |
| AGAP1 | 12.75037 | 0.510015 | 25 |
| PDGFRA | 7.113649 | 0.284546 | 25 |
| CAMTA1 | 6.491436 | 0.259657 | 25 |
| SATB2 | 5.74169 | 0.239237 | 24 |
| MEIS1 | 5.664513 | 0.236021 | 24 |
| NXN | 11.92044 | 0.51828 | 23 |
| RPTOR | 10.02959 | 0.436069 | 23 |
| NCOR2 | 6.754804 | 0.293687 | 23 |
| INPP5A | 6.090449 | 0.264802 | 23 |
| PRKCZ | 7.080414 | 0.321837 | 22 |
| SKI | 10.28144 | 0.489592 | 21 |
| HOXA-AS3 | 5.049535 | 0.240454 | 21 |
| ZIC4 | 4.250293 | 0.202395 | 21 |
| FRMD4A | 7.176558 | 0.358828 | 20 |
| ABR | 6.081806 | 0.30409 | 20 |
| SDK1 | 5.981355 | 0.299068 | 20 |
| MAD1L1 | 12.41341 | 0.653337 | 19 |
| ZNF423 | 6.238529 | 0.328344 | 19 |
| KCNQ1 | 5.876033 | 0.309265 | 19 |
| SMG1P2 | 5.859726 | 0.308407 | 19 |
| BOLA2 | 5.859726 | 0.308407 | 19 |
| LOC613038 | 5.859726 | 0.308407 | 19 |
| CASZ1 | 4.319617 | 0.227348 | 19 |
| TBC1D16 | 8.686104 | 0.482561 | 18 |
| FOXK1 | 7.477284 | 0.415405 | 18 |
| MCF2L | 4.662193 | 0.259011 | 18 |
| ANKRD11 | 4.195478 | 0.233082 | 18 |
| SEPTIN9 | 4.031914 | 0.223995 | 18 |
| PAX6-AS1 | 7.150191 | 0.420599 | 17 |
| RCN1 | 7.150191 | 0.420599 | 17 |
| SIM1 | 4.51478 | 0.265575 | 17 |
| FOXP1 | 6.436364 | 0.402273 | 16 |
| NAV2 | 4.623006 | 0.288938 | 16 |
| GLI2 | 6.19981 | 0.413321 | 15 |
| NFIX | 4.786288 | 0.319086 | 15 |
| BAIAP2 | 4.435057 | 0.29567 | 15 |
| SLX1B- | 4.290474 | 0.286032 | 15 |
| SULT1A4 | | | |
| SLX1A | 4.290474 | 0.286032 | 15 |
| LOC606724 | 4.290474 | 0.286032 | 15 |
| KIRREL3 | 4.274786 | 0.284986 | 15 |
| RPS6KA2 | 6.530167 | 0.466441 | 14 |
| PRKAG2 | 4.493534 | 0.320967 | 14 |
| ARHGEF10 | 4.243537 | 0.30311 | 14 |
| C7orf50 | 4.068381 | 0.290599 | 14 |
| MOB2 | 3.985323 | 0.284666 | 14 |
| MSI2 | 8.580374 | 0.660029 | 13 |
| GSE1 | 5.724454 | 0.440343 | 13 |
| MYT1L | 5.487224 | 0.422094 | 13 |
| RFX4 | 4.115234 | 0.316556 | 13 |
| ZC3H3 | 6.797012 | 0.566418 | 12 |
| FBRSL1 | 5.057732 | 0.421478 | 12 |
| ADGRD1 | 4.916863 | 0.409739 | 12 |
| RASA3 | 4.568026 | 0.380669 | 12 |
| MIRLET7BHG | 4.045357 | 0.337113 | 12 |
| CTBP2 | 4.887996 | 0.444363 | 11 |
| RAD51B | 4.828445 | 0.43895 | 11 |
| TSPAN4 | 5.385332 | 0.538533 | 10 |
| ADAMTS2 | 5.853042 | 0.650338 | 9 |
| ATP11A | 5.785182 | 0.642798 | 9 |
| SND1 | 5.762779 | 0.640309 | 9 |
| TSPAN9 | 4.99043 | 0.554492 | 9 |
| AXIN2 | 4.640668 | 0.51563 | 9 |
| TRAPPC12 | 4.439527 | 0.493281 | 9 |
| CACNA2D4 | 4.422186 | 0.491354 | 9 |
| KCNH2 | 4.06122 | 0.451247 | 9 |
| MSRA | 4.849491 | 0.606186 | 8 |
| TRAPPC9 | 4.147563 | 0.518445 | 8 |
| SYNJ2 | 4.056103 | 0.507013 | 8 |
| RXRA | 4.522346 | 0.646049 | 7 |
| NAV1 | 4.433724 | 0.633389 | 7 |
| VPS13D | 4.250029 | 0.607147 | 7 |
| C19orf25 | 4.135319 | 0.59076 | 7 |
| GAK | 4.046351 | 0.57805 | 7 |
| FBXL18 | 4.988075 | 0.831346 | 6 |
| CRADD | 4.433395 | 0.738899 | 6 |
| RUNDC3A | 5.152499 | 1.0305 | 5 |
| TSNAX-DISC1 | 5.141396 | 1.028279 | 5 |
| ARHGEF7 | 4.761732 | 0.952346 | 5 |
| DNAAF5 | 4.360708 | 0.872142 | 5 |

TABLE 132
Cancer Type NB_TMMpos

| Gene site | imp_sum | imp_mean | n |
|---|---|---|---|
| PTPRN2 | 16.11115 | 0.196477 | 82 |
| PRDM16 | 6.965467 | 0.098105 | 71 |
| HDAC4 | 13.48037 | 0.364334 | 37 |
| PAX6 | 10.13358 | 0.289531 | 35 |
| RBFOX3 | 4.920339 | 0.140581 | 35 |
| DIP2C | 9.275777 | 0.289868 | 32 |
| SHANK2 | 6.227641 | 0.239525 | 26 |
| AGAP1 | 9.214808 | 0.368592 | 25 |
| CAMTA1 | 7.199671 | 0.287987 | 25 |
| SATB2 | 3.007551 | 0.125315 | 24 |
| NXN | 10.45491 | 0.454561 | 23 |
| RPTOR | 10.04757 | 0.436851 | 23 |
| NCOR2 | 4.712774 | 0.204903 | 23 |
| INPP5A | 4.166842 | 0.181167 | 23 |
| PRKCZ | 4.993783 | 0.22699 | 22 |
| SKI | 8.623933 | 0.410663 | 21 |
| HOXA-AS3 | 3.366629 | 0.160316 | 21 |
| ZIC4 | 3.156767 | 0.150322 | 21 |
| FRMD4A | 4.815185 | 0.240759 | 20 |
| SDK1 | 4.46552 | 0.223276 | 20 |
| MAD1L1 | 11.1922 | 0.589063 | 19 |
| SMG1P2 | 4.049626 | 0.213138 | 19 |
| BOLA2 | 4.049626 | 0.213138 | 19 |
| LOC613038 | 4.049626 | 0.213138 | 19 |
| ZNF423 | 3.8885 | 0.204658 | 19 |
| CASZ1 | 3.476123 | 0.182954 | 19 |
| FOXK1 | 6.894914 | 0.383051 | 18 |
| TBC1D16 | 6.826437 | 0.379246 | 18 |
| SEPTIN9 | 3.450705 | 0.191706 | 18 |
| ANKRD11 | 3.271443 | 0.181747 | 18 |
| PAX6-AS1 | 6.216273 | 0.365663 | 17 |
| RCN1 | 6.216273 | 0.365663 | 17 |
| HBG2 | 3.132325 | 0.184254 | 17 |
| FOXP1 | 4.6681 | 0.291756 | 16 |
| NAV2 | 4.575986 | 0.285999 | 16 |
| KIRREL3 | 4.406834 | 0.293789 | 15 |
| BAIAP2 | 4.20718 | 0.280479 | 15 |
| SLX1B- | 3.998125 | 0.266542 | 15 |
| SULT1A4 | | | |
| SLX1A | 3.998125 | 0.266542 | 15 |
| LOC606724 | 3.998125 | 0.266542 | 15 |
| NFATC1 | 3.722419 | 0.248161 | 15 |
| GLI2 | 3.137561 | 0.209171 | 15 |
| RPS6KA2 | 5.499889 | 0.392849 | 14 |
| ARHGEF10 | 4.319529 | 0.308538 | 14 |
| PRKAG2 | 3.795162 | 0.271083 | 14 |
| C7orf50 | 3.035132 | 0.216795 | 14 |
| MSI2 | 8.215674 | 0.631975 | 13 |
| MYT1L | 5.287032 | 0.406695 | 13 |
| RFX4 | 3.737829 | 0.287525 | 13 |
| GSE1 | 3.008545 | 0.231427 | 13 |
| ZC3H3 | 6.773834 | 0.564486 | 12 |
| CMIP | 4.753958 | 0.396163 | 12 |
| GNA12 | 4.582202 | 0.38185 | 12 |
| MIRLET7BHG | 4.044978 | 0.337082 | 12 |
| FBRSL1 | 3.964516 | 0.330376 | 12 |
| ADGRD1 | 3.856339 | 0.321362 | 12 |
| CTBP2 | 4.804597 | 0.436782 | 11 |
| RAD51B | 3.351723 | 0.304702 | 11 |
| TBCD | 3.264218 | 0.296747 | 11 |
| TSPAN4 | 4.852241 | 0.485224 | 10 |
| CHST11 | 4.233357 | 0.423336 | 10 |
| RGS12 | 4.115475 | 0.411548 | 10 |
| ACOT7 | 3.890732 | 0.389073 | 10 |
| CBFA2T3 | 3.433004 | 0.3433 | 10 |
| AKAP13 | 3.410488 | 0.341049 | 10 |
| ADAMTS2 | 5.109962 | 0.567774 | 9 |
| TSPAN9 | 4.490392 | 0.498932 | 9 |
| CACNA2D4 | 3.80421 | 0.42269 | 9 |
| AXIN2 | 3.526607 | 0.391845 | 9 |
| MGMT | 3.378644 | 0.375405 | 9 |
| SMAD3 | 5.640512 | 0.705064 | 8 |
| MSRA | 4.373575 | 0.546697 | 8 |
| VRK2 | 3.327552 | 0.415944 | 8 |
| LINC00311 | 3.275629 | 0.409454 | 8 |
| PPP2R2B | 3.03431 | 0.379289 | 8 |
| MCIDAS | 2.978913 | 0.372364 | 8 |
| NAV1 | 3.844465 | 0.549209 | 7 |
| C19orf25 | 3.733425 | 0.533346 | 7 |
| VPS13D | 3.641552 | 0.520222 | 7 |
| GAK | 3.314179 | 0.473454 | 7 |
| RXRA | 3.115199 | 0.445028 | 7 |
| HOXD3 | 3.091484 | 0.441641 | 7 |
| MIR548H4 | 3.088767 | 0.441252 | 7 |
| FBXL18 | 4.014514 | 0.669086 | 6 |
| CRADD | 3.515875 | 0.585979 | 6 |
| WFIKKN2 | 3.429234 | 0.571539 | 6 |
| COQ8A | 3.36352 | 0.560587 | 6 |
| MYO16 | 3.136848 | 0.522808 | 6 |
| RUNDC3A | 4.982688 | 0.996538 | 5 |
| ARHGEF7 | 3.83097 | 0.766194 | 5 |
| TSNAX-DISC1 | 3.685278 | 0.737056 | 5 |
| BCAR1 | 3.486815 | 0.697363 | 5 |
| DNAAF5 | 3.473447 | 0.694689 | 5 |
| BACH2 | 3.340635 | 0.668127 | 5 |
| NPHP4 | 3.112474 | 0.622495 | 5 |
| DTNA | 3.232674 | 0.808169 | 4 |
| GSG1 | 3.128085 | 0.782021 | 4 |
| DAGLB | 3.09399 | 1.03133 | 3 |
| DICER1 | 2.99365 | 0.997883 | 3 |
| SLC25A10 | 3.024731 | 1.512366 | 2 |

TABLE 133
Cancer Type NFIB_PLEX

| Gene site | imp_sum | imp_mean | n |
|---|---|---|---|
| PTPRN2 | 13.6038 | 0.1659 | 82 |
| PRDM16 | 12.74187 | 0.179463 | 71 |
| PCDHGA1 | 7.609956 | 0.128982 | 59 |
| PCDHGA2 | 7.609956 | 0.133508 | 57 |
| PCDHGA3 | 7.29357 | 0.135066 | 54 |
| PCDHGB1 | 7.29357 | 0.137615 | 53 |
| PCDHGA4 | 6.977184 | 0.136808 | 51 |
| PCDHGB2 | 6.977184 | 0.142392 | 49 |
| PCDHGA5 | 6.532484 | 0.138989 | 47 |
| PCDHGB3 | 5.899712 | 0.137203 | 43 |
| PCDHGA6 | 5.583326 | 0.139583 | 40 |
| HDAC4 | 12.87329 | 0.347927 | 37 |
| PCDHGA7 | 5.26694 | 0.14235 | 37 |
| PAX6 | 10.60945 | 0.303127 | 35 |
| RBFOX3 | 4.967367 | 0.141925 | 35 |
| PCDHGB4 | 4.950554 | 0.141444 | 35 |
| PCDHGA8 | 4.950554 | 0.141444 | 35 |
| DIP2C | 7.630068 | 0.23844 | 32 |
| PCDHGB5 | 5.26694 | 0.164592 | 32 |
| PCDHGA9 | 5.26694 | 0.169901 | 31 |
| SOX2-OT | 5.19331 | 0.17908 | 29 |
| PCDHGB6 | 4.950554 | 0.170709 | 29 |
| PCDHGA10 | 4.950554 | 0.176805 | 28 |
| GALNT9 | 3.903223 | 0.144564 | 27 |
| SHANK2 | 3.595971 | 0.138307 | 26 |
| AGAP1 | 11.34453 | 0.453781 | 25 |
| PDGFRA | 4.704498 | 0.18818 | 25 |
| CAMTA1 | 4.597499 | 0.1839 | 25 |
| PCDHGB7 | 4.317782 | 0.179908 | 24 |
| MEIS1 | 3.490617 | 0.145442 | 24 |
| RPTOR | 8.659899 | 0.376517 | 23 |
| NCOR2 | 7.426108 | 0.322874 | 23 |
| NXN | 6.34216 | 0.275746 | 23 |
| INPP5A | 5.801975 | 0.25226 | 23 |
| PCDHGA11 | 4.317782 | 0.18773 | 23 |
| RIMBP2 | 3.42345 | 0.148846 | 23 |
| PRKCZ | 4.501056 | 0.204593 | 22 |
| SKI | 9.150488 | 0.435738 | 21 |
| FRMD4A | 5.618711 | 0.280936 | 20 |
| SDK1 | 4.48406 | 0.224203 | 20 |
| ABR | 3.444359 | 0.172218 | 20 |
| MAD1L1 | 8.973465 | 0.472288 | 19 |
| SMG1P2 | 6.52842 | 0.343601 | 19 |
| BOLA2 | 6.52842 | 0.343601 | 19 |
| LOC613038 | 6.52842 | 0.343601 | 19 |
| KCNQ1 | 4.698431 | 0.247286 | 19 |
| ZNF423 | 3.51037 | 0.184756 | 19 |
| TBC1D16 | 5.027192 | 0.279288 | 18 |
| FOXK1 | 4.820062 | 0.267781 | 18 |
| SEPTIN9 | 4.378197 | 0.243233 | 18 |
| ANKRD11 | 4.17047 | 0.231693 | 18 |
| PAX6-AS1 | 4.700585 | 0.276505 | 17 |
| RCN1 | 4.700585 | 0.276505 | 17 |
| FOXP1 | 4.200912 | 0.262557 | 16 |
| SORBS2 | 4.032652 | 0.252041 | 16 |
| SLX1B- | 5.361231 | 0.357415 | 15 |
| SULT1A4 | | | |
| SLX1A | 5.361231 | 0.357415 | 15 |
| LOC606724 | 5.361231 | 0.357415 | 15 |
| GLI2 | 5.193071 | 0.346205 | 15 |
| ZBTB20 | 3.750908 | 0.250061 | 15 |
| KIRREL3 | 3.40391 | 0.226927 | 15 |
| CUX1 | 5.001913 | 0.357279 | 14 |
| IQSEC1 | 4.782704 | 0.341622 | 14 |
| RPS6KA2 | 4.680709 | 0.334336 | 14 |
| ARHGEF10 | 3.493473 | 0.249534 | 14 |
| PRKAG2 | 3.428263 | 0.244876 | 14 |
| C7orf50 | 3.396421 | 0.242602 | 14 |
| MSI2 | 6.004289 | 0.461868 | 13 |
| GSE1 | 5.190069 | 0.399236 | 13 |
| MYT1L | 3.452289 | 0.265561 | 13 |
| RFX4 | 3.397458 | 0.261343 | 13 |
| FBRSL1 | 5.176679 | 0.43139 | 12 |
| CMIP | 5.04849 | 0.420708 | 12 |
| ADGRD1 | 4.376901 | 0.364742 | 12 |
| GNA12 | 4.328821 | 0.360735 | 12 |
| ZC3H3 | 3.725687 | 0.310474 | 12 |
| SPON2 | 6.316248 | 0.574204 | 11 |
| CTBP2 | 4.24005 | 0.385459 | 11 |
| ANAPC16 | 4.089777 | 0.371798 | 11 |
| TBCD | 4.036366 | 0.366942 | 11 |
| RAD51B | 3.70189 | 0.336535 | 11 |
| ACOT7 | 5.140454 | 0.514045 | 10 |
| AKAP13 | 4.18378 | 0.418378 | 10 |
| TSPAN4 | 3.740082 | 0.374008 | 10 |
| KLHL29 | 3.563838 | 0.356384 | 10 |
| SND1 | 4.427409 | 0.491934 | 9 |
| AXIN2 | 3.728727 | 0.414303 | 9 |
| ASAP1 | 3.678608 | 0.408734 | 9 |
| CACNA2D4 | 3.512472 | 0.390275 | 9 |
| LINC00311 | 4.314256 | 0.539282 | 8 |
| SMAD3 | 4.240593 | 0.530074 | 8 |
| MSRA | 3.942701 | 0.492838 | 8 |
| C19orf25 | 3.692036 | 0.527434 | 7 |
| FBXL18 | 4.951015 | 0.825169 | 6 |
| CCDC177 | 4.125511 | 0.687585 | 6 |
| RUNDC3A | 4.905148 | 0.98103 | 5 |
| LOC100130872 | 4.289063 | 0.857813 | 5 |
| TSNAX-DISC1 | 3.660081 | 0.732016 | 5 |
| BCAR1 | 3.402498 | 0.6805 | 5 |
| GSG1 | 3.580673 | 0.895168 | 4 |

TABLE 134
Cancer Type O_IDH

| Gene site | imp_sum | imp_mean | n |
|---|---|---|---|
| PTPRN2 | 17.77707 | 0.216793 | 82 |
| PRDM16 | 10.35636 | 0.145864 | 71 |
| HDAC4 | 11.77959 | 0.318367 | 37 |
| PAX6 | 9.742512 | 0.278357 | 35 |
| RBFOX3 | 9.319109 | 0.26626 | 35 |
| DIP2C | 5.326051 | 0.166439 | 32 |
| SOX2-OT | 7.391918 | 0.254894 | 29 |
| GALNT9 | 3.939244 | 0.145898 | 27 |
| SHANK2 | 3.989276 | 0.153434 | 26 |
| AGAP1 | 5.848567 | 0.233943 | 25 |
| CAMTA1 | 5.732686 | 0.229307 | 25 |
| PDGFRA | 4.617729 | 0.184709 | 25 |
| SATB2 | 4.763835 | 0.198493 | 24 |
| MEIS1 | 4.006012 | 0.166917 | 24 |
| RPTOR | 8.845044 | 0.384567 | 23 |
| NXN | 4.586101 | 0.199396 | 23 |
| NCOR2 | 3.685137 | 0.160223 | 23 |
| INPP5A | 3.656301 | 0.15897 | 23 |
| RIMBP2 | 3.332114 | 0.144875 | 23 |
| PRKCZ | 4.32746 | 0.196703 | 22 |
| SKI | 9.339571 | 0.444741 | 21 |
| FRMD4A | 6.884633 | 0.344232 | 20 |
| ABR | 5.443179 | 0.272159 | 20 |
| SDK1 | 4.502169 | 0.225108 | 20 |
| MAD1L1 | 12.02304 | 0.632791 | 19 |
| ZNF423 | 6.304621 | 0.331822 | 19 |
| SMG1P2 | 5.86104 | 0.308476 | 19 |
| BOLA2 | 5.86104 | 0.308476 | 19 |
| LOC613038 | 5.86104 | 0.308476 | 19 |
| CASZ1 | 5.032192 | 0.264852 | 19 |
| KCNQ1 | 3.876356 | 0.204019 | 19 |
| CFAP46 | 3.865955 | 0.203471 | 19 |
| FOXK1 | 5.340903 | 0.296717 | 18 |
| ANKRD11 | 5.290515 | 0.293918 | 18 |
| TBC1D16 | 4.520863 | 0.251159 | 18 |
| SEPTIN9 | 4.430265 | 0.246126 | 18 |
| MCF2L | 3.959938 | 0.219997 | 18 |
| OPCML | 4.990801 | 0.293577 | 17 |
| NAV2 | 5.052861 | 0.315804 | 16 |
| FOXP1 | 4.679177 | 0.292449 | 16 |
| GLI2 | 8.548733 | 0.569916 | 15 |
| KIRREL3 | 3.966147 | 0.26441 | 15 |
| BAIAP2 | 3.944493 | 0.262966 | 15 |
| ZBTB20 | 3.690344 | 0.246023 | 15 |
| LRMDA | 3.364631 | 0.224309 | 15 |
| RPS6KA2 | 6.139807 | 0.438558 | 14 |
| IQSEC1 | 4.328154 | 0.309154 | 14 |
| CUX1 | 3.333429 | 0.238102 | 14 |
| MSI2 | 6.180821 | 0.475448 | 13 |
| TNS3 | 5.496717 | 0.45806 | 12 |
| ADGRD1 | 4.486901 | 0.373908 | 12 |
| MIRLET7BHG | 4.423029 | 0.368586 | 12 |
| CMIP | 4.400102 | 0.366675 | 12 |
| FBRSL1 | 4.210507 | 0.350876 | 12 |
| MEGF6 | 3.597623 | 0.299802 | 12 |
| RASA3 | 3.442699 | 0.286892 | 12 |
| ZC3H3 | 3.320047 | 0.276671 | 12 |
| RAD51B | 4.015803 | 0.365073 | 11 |
| FGFR2 | 3.234357 | 0.294032 | 11 |
| TSPAN4 | 4.43102 | 0.443102 | 10 |
| ACOT7 | 4.035124 | 0.403512 | 10 |
| NR2F1-AS1 | 3.742456 | 0.374246 | 10 |
| SND1 | 6.183886 | 0.687098 | 9 |
| ATP11A | 6.073319 | 0.674813 | 9 |
| ADAMTS2 | 5.297555 | 0.588617 | 9 |
| TSPAN9 | 4.699971 | 0.522219 | 9 |
| AXIN2 | 4.010917 | 0.445657 | 9 |
| NEAT1 | 3.679876 | 0.408875 | 9 |
| ASAP1 | 3.604679 | 0.40052 | 9 |
| RUNX1 | 3.36976 | 0.374418 | 9 |
| MSRA | 4.663132 | 0.582891 | 8 |
| DNMT3A | 4.382435 | 0.547804 | 8 |
| LINC00311 | 4.286512 | 0.535814 | 8 |
| PPP2R2B | 4.000987 | 0.500123 | 8 |
| ESRRG | 3.56145 | 0.445181 | 8 |
| NAV1 | 4.088238 | 0.584034 | 7 |
| DUSP6 | 4.062795 | 0.580399 | 7 |
| VPS13D | 3.777117 | 0.539588 | 7 |
| LINC00461 | 3.447133 | 0.492448 | 7 |
| C19orf25 | 3.425021 | 0.489289 | 7 |
| FBXL18 | 4.856634 | 0.809439 | 6 |
| SLC22A18AS | 3.61879 | 0.603132 | 6 |
| FAM181A | 3.292217 | 0.548703 | 6 |
| CRADD | 3.249844 | 0.541641 | 6 |
| RUNDC3A | 4.771459 | 0.954292 | 5 |
| PRR5L | 4.24277 | 0.848554 | 5 |
| MRC2 | 4.151333 | 0.830267 | 5 |
| ARHGEF7 | 3.679727 | 0.735945 | 5 |
| TSNAX-DISC1 | 3.665763 | 0.733153 | 5 |
| AP2A2 | 3.421652 | 0.68433 | 5 |
| TK1 | 3.408928 | 0.681786 | 5 |
| STAP2 | 5.527156 | 1.381789 | 4 |
| RBMS3 | 4.067302 | 1.016826 | 4 |
| DTNA | 3.836485 | 0.959121 | 4 |
| DAGLB | 3.993437 | 1.331146 | 3 |
| SRRM3 | 3.919526 | 1.306509 | 3 |
| ANKLE2 | 4.01036 | 2.00518 | 2 |
| SLC25A10 | 3.973706 | 1.986853 | 2 |
| SOX10 | 3.856613 | 1.928306 | 2 |
| CHTF18 | 3.272229 | 1.636114 | 2 |

TABLE 135
Cancer Type OLIGOSARC_IDH

| Gene site | imp_sum | imp_mean | n |
|---|---|---|---|
| PTPRN2 | 21.63143 | 0.263798 | 82 |
| PRDM16 | 14.17415 | 0.199636 | 71 |
| PCDHGA1 | 6.739654 | 0.114231 | 59 |
| PCDHGA2 | 6.423268 | 0.112689 | 57 |
| PCDHGA3 | 6.106882 | 0.11309 | 54 |
| PCDHGB1 | 6.106882 | 0.115224 | 53 |
| PCDHGA4 | 6.106882 | 0.119743 | 51 |
| PCDHGB2 | 6.106882 | 0.12463 | 49 |
| PCDHGA5 | 5.790496 | 0.123202 | 47 |
| PCDHGB3 | 4.710492 | 0.109546 | 43 |
| HDAC4 | 12.47842 | 0.337255 | 37 |
| PCDHGA7 | 3.868612 | 0.104557 | 37 |
| PAX6 | 10.51905 | 0.300544 | 35 |
| RBFOX3 | 8.446715 | 0.241335 | 35 |
| PCDHGB4 | 3.868612 | 0.110532 | 35 |
| PCDHGA8 | 3.868612 | 0.110532 | 35 |
| DIP2C | 8.32832 | 0.26026 | 32 |
| SOX2-OT | 5.793454 | 0.199774 | 29 |
| GALNT9 | 4.635391 | 0.171681 | 27 |
| PDGFRA | 6.113805 | 0.244552 | 25 |
| AGAP1 | 5.365893 | 0.214636 | 25 |
| CAMTA1 | 4.25973 | 0.170389 | 25 |
| SATB2 | 5.00547 | 0.208561 | 24 |
| MEIS1 | 4.846214 | 0.201926 | 24 |
| PCDHGB7 | 3.885005 | 0.161875 | 24 |
| RPTOR | 10.2269 | 0.444648 | 23 |
| INPP5A | 6.950543 | 0.302198 | 23 |
| NCOR2 | 6.548584 | 0.284721 | 23 |
| PRKCZ | 6.525097 | 0.296595 | 22 |
| SKI | 7.803382 | 0.37159 | 21 |
| SIM2 | 4.1068 | 0.195562 | 21 |
| ZIC4 | 3.965825 | 0.188849 | 21 |
| ABR | 4.684248 | 0.234212 | 20 |
| FRMD4A | 4.50663 | 0.225332 | 20 |
| SDK1 | 4.455217 | 0.222761 | 20 |
| MAD1L1 | 11.15551 | 0.587132 | 19 |
| CASZ1 | 5.790791 | 0.304778 | 19 |
| KCNQ1 | 3.722935 | 0.195944 | 19 |
| ZNF423 | 3.597687 | 0.189352 | 19 |
| SMG1P2 | 3.572242 | 0.188013 | 19 |
| BOLA2 | 3.572242 | 0.188013 | 19 |
| LOC613038 | 3.572242 | 0.188013 | 19 |
| TBC1D16 | 6.813484 | 0.378527 | 18 |
| ANKRD11 | 6.188601 | 0.343811 | 18 |
| FOXK1 | 5.396017 | 0.299779 | 18 |
| SEPTIN9 | 4.022652 | 0.223481 | 18 |
| MCF2L | 3.929171 | 0.218287 | 18 |
| TBX15 | 5.634993 | 0.33147 | 17 |
| OPCML | 5.175403 | 0.304435 | 17 |
| PAX6-AS1 | 4.060002 | 0.238824 | 17 |
| RCN1 | 4.060002 | 0.238824 | 17 |
| FOXP1 | 5.074186 | 0.317137 | 16 |
| SORBS2 | 4.261092 | 0.266318 | 16 |
| NAV2 | 4.257525 | 0.266095 | 16 |
| GLI2 | 7.121 | 0.474733 | 15 |
| SLX1B- | 4.871386 | 0.324759 | 15 |
| SULT1A4 | | | |
| SLX1A | 4.871386 | 0.324759 | 15 |
| LOC606724 | 4.871386 | 0.324759 | 15 |
| NFIX | 4.779389 | 0.318626 | 15 |
| BAIAP2 | 4.73258 | 0.315505 | 15 |
| ZBTB20 | 4.376098 | 0.29174 | 15 |
| IQSEC1 | 4.898046 | 0.34986 | 14 |
| RPS6KA2 | 4.826184 | 0.344727 | 14 |
| PRKAG2 | 4.522356 | 0.323025 | 14 |
| C7orf50 | 4.165446 | 0.297532 | 14 |
| MIR548F5 | 3.918394 | 0.279885 | 14 |
| ARHGEF10 | 3.677818 | 0.262701 | 14 |
| MSI2 | 4.478717 | 0.344517 | 13 |
| SPTBN4 | 4.149056 | 0.319158 | 13 |
| MYT1L | 3.576019 | 0.275078 | 13 |
| ISLR2 | 5.440996 | 0.453416 | 12 |
| FBRSL1 | 4.808985 | 0.400749 | 12 |
| MIRLET7BHG | 4.647168 | 0.387264 | 12 |
| TNS3 | 3.685582 | 0.307132 | 12 |
| GNA12 | 3.615064 | 0.301255 | 12 |
| CMIP | 3.567877 | 0.297323 | 12 |
| CTBP2 | 4.14712 | 0.377011 | 11 |
| SPON2 | 3.576957 | 0.325178 | 11 |
| SKOR1 | 4.506284 | 0.450628 | 10 |
| MAML2 | 3.792377 | 0.379238 | 10 |
| TSPAN4 | 3.691292 | 0.369129 | 10 |
| ADGRB1 | 4.933429 | 0.548159 | 9 |
| AXIN2 | 4.733289 | 0.525921 | 9 |
| ASAP1 | 4.082458 | 0.453606 | 9 |
| KCNH2 | 3.947404 | 0.4386 | 9 |
| KAZN | 3.921414 | 0.435713 | 9 |
| ADAMTS2 | 3.82162 | 0.424624 | 9 |
| APBA2 | 3.721262 | 0.413474 | 9 |
| VRK2 | 4.851925 | 0.606491 | 8 |
| LINC00311 | 4.619994 | 0.577499 | 8 |
| DLEU1 | 4.410582 | 0.551323 | 8 |
| MCC | 4.231691 | 0.528961 | 8 |
| DNMT3A | 3.769963 | 0.471245 | 8 |
| C19orf25 | 4.000033 | 0.571433 | 7 |
| SLC22A18AS | 3.7963 | 0.632717 | 6 |
| CRADD | 3.744372 | 0.624062 | 6 |
| TSNAX-DISC1 | 4.748255 | 0.949651 | 5 |
| RUNDC3A | 4.609288 | 0.921858 | 5 |
| STAP2 | 5.128221 | 1.282055 | 4 |
| RBMS3 | 3.735742 | 0.933936 | 4 |

TABLE 136
Cancer Type PA_CORT

| Gene site | imp_sum | imp_mean | n |
|---|---|---|---|
| PTPRN2 | 26.60108 | 0.324403 | 82 |
| PRDM16 | 21.33245 | 0.300457 | 71 |
| PCDHGA1 | 9.343276 | 0.158361 | 59 |
| PCDHGA2 | 9.659662 | 0.169468 | 57 |
| PCDHGA3 | 9.184591 | 0.170085 | 54 |
| PCDHGB1 | 8.868205 | 0.167325 | 53 |
| PCDHGA4 | 8.868205 | 0.173886 | 51 |
| PCDHGB2 | 8.726713 | 0.178096 | 49 |
| PCDHGA5 | 8.040168 | 0.171067 | 47 |
| PCDHGB3 | 7.407396 | 0.172265 | 43 |
| PCDHGA6 | 6.682433 | 0.167061 | 40 |
| HDAC4 | 14.9952 | 0.405276 | 37 |
| PCDHGA7 | 6.366047 | 0.172055 | 37 |
| PAX6 | 14.82851 | 0.423672 | 35 |
| RBFOX3 | 10.41433 | 0.297552 | 35 |
| PCDHGB4 | 6.321425 | 0.180612 | 35 |
| PCDHGA8 | 6.321425 | 0.180612 | 35 |
| DIP2C | 11.97159 | 0.374112 | 32 |
| PCDHGB5 | 6.005039 | 0.187657 | 32 |
| PCDHGA9 | 6.005039 | 0.193711 | 31 |
| SOX2-OT | 12.47069 | 0.430024 | 29 |
| PCDHGB6 | 5.441033 | 0.187622 | 29 |
| GALNT9 | 5.83543 | 0.216127 | 27 |
| SHANK2 | 9.288615 | 0.357254 | 26 |
| ADARB2 | 5.29415 | 0.203621 | 26 |
| AGAP1 | 11.35434 | 0.454173 | 25 |
| CAMTA1 | 10.98461 | 0.439384 | 25 |
| PDGFRA | 6.909238 | 0.27637 | 25 |
| SATB2 | 8.571627 | 0.357151 | 24 |
| MEIS1 | 7.849198 | 0.32705 | 24 |
| PCDHGB7 | 5.309981 | 0.221249 | 24 |
| RPTOR | 13.02038 | 0.566103 | 23 |
| INPP5A | 9.175249 | 0.398924 | 23 |
| NCOR2 | 8.533146 | 0.371006 | 23 |
| NXN | 6.064108 | 0.263657 | 23 |
| HOXB3 | 5.491228 | 0.238749 | 23 |
| PCDHGA11 | 5.309981 | 0.230869 | 23 |
| PRKCZ | 6.851413 | 0.311428 | 22 |
| SKI | 12.70136 | 0.604827 | 21 |
| SIM2 | 6.757476 | 0.321785 | 21 |
| FRMD4A | 10.16063 | 0.508031 | 20 |
| SDK1 | 6.123697 | 0.306185 | 20 |
| ABR | 5.984562 | 0.299228 | 20 |
| MAD1L1 | 12.05065 | 0.634245 | 19 |
| ZNF423 | 12.0421 | 0.633795 | 19 |
| SMG1P2 | 6.543669 | 0.344404 | 19 |
| BOLA2 | 6.543669 | 0.344404 | 19 |
| LOC613038 | 6.543669 | 0.344404 | 19 |
| CASZ1 | 5.71895 | 0.300997 | 19 |
| FOXK1 | 9.183113 | 0.510173 | 18 |
| MCF2L | 7.131597 | 0.3962 | 18 |
| RBFOX1 | 5.787189 | 0.321511 | 18 |
| ANKRD11 | 5.647336 | 0.313741 | 18 |
| TBC1D16 | 5.201895 | 0.288994 | 18 |
| OPCML | 9.879184 | 0.581128 | 17 |
| FOXP1 | 7.81498 | 0.488436 | 16 |
| SORBS2 | 6.551892 | 0.409493 | 16 |
| NAV2 | 6.508386 | 0.406774 | 16 |
| GLI2 | 11.30732 | 0.753821 | 15 |
| ZBTB20 | 7.170015 | 0.478001 | 15 |
| KIRREL3 | 5.782804 | 0.38552 | 15 |
| LRMDA | 5.330559 | 0.355371 | 15 |
| BAIAP2 | 5.257505 | 0.3505 | 15 |
| RPS6KA2 | 6.803775 | 0.485984 | 14 |
| IQSEC1 | 6.731631 | 0.480831 | 14 |
| PRKAG2 | 6.726839 | 0.480489 | 14 |
| CUX1 | 6.109245 | 0.436375 | 14 |
| ARHGEF10 | 5.664014 | 0.404572 | 14 |
| C7orf50 | 5.596942 | 0.399782 | 14 |
| MSI2 | 6.596031 | 0.507387 | 13 |
| MIR9-3HG | 5.784035 | 0.444926 | 13 |
| MYT1L | 5.43139 | 0.417799 | 13 |
| KIF26B | 5.38755 | 0.414427 | 13 |
| RFX4 | 5.191773 | 0.399367 | 13 |
| CMIP | 6.630744 | 0.552562 | 12 |
| MIRLET7BHG | 6.544033 | 0.545336 | 12 |
| MEIS2 | 5.905022 | 0.492085 | 12 |
| ADGRD1 | 5.134363 | 0.427864 | 12 |
| RAD51B | 6.287653 | 0.571605 | 11 |
| FGFR2 | 6.131599 | 0.557418 | 11 |
| VGLL4 | 6.041934 | 0.549267 | 11 |
| CCDC140 | 5.647124 | 0.513375 | 11 |
| SPON2 | 5.191216 | 0.471929 | 11 |
| LBX1-AS1 | 6.618751 | 0.661875 | 10 |
| AKAP13 | 5.601161 | 0.560116 | 10 |
| CHST11 | 5.46443 | 0.546443 | 10 |
| NTM | 5.110489 | 0.511049 | 10 |
| SND1 | 6.666831 | 0.740759 | 9 |
| ADGRB1 | 6.605145 | 0.733905 | 9 |
| TSPAN9 | 6.101004 | 0.677889 | 9 |
| ATP11A | 5.788809 | 0.643201 | 9 |
| NOTCH1 | 5.409682 | 0.601076 | 9 |
| AXIN2 | 5.36063 | 0.595626 | 9 |
| TRAPPC12 | 5.300167 | 0.588907 | 9 |
| LINC00311 | 5.447325 | 0.680916 | 8 |
| MSRA | 5.326954 | 0.665869 | 8 |
| DLEU1 | 5.270307 | 0.658788 | 8 |
| DUSP6 | 7.401435 | 1.057348 | 7 |
| LINC00461 | 6.722238 | 0.96032 | 7 |
| RUNDC3A | 5.392471 | 1.078494 | 5 |

TABLE 137
Cancer Type PA_INF

| Gene site | imp_sum | imp_mean | n |
|---|---|---|---|
| PTPRN2 | 26.36911 | 0.321575 | 82 |
| PRDM16 | 21.97585 | 0.309519 | 71 |
| PCDHGA1 | 8.267047 | 0.140119 | 59 |
| PCDHGA2 | 7.950661 | 0.139485 | 57 |
| PCDHGA3 | 7.950661 | 0.147234 | 54 |
| PCDHGB1 | 7.950661 | 0.150012 | 53 |
| PCDHGA4 | 7.950661 | 0.155895 | 51 |
| PCDHGB2 | 7.634275 | 0.155802 | 49 |
| PCDHGA5 | 7.108589 | 0.151247 | 47 |
| PCDHGB3 | 7.108589 | 0.165316 | 43 |
| PCDHGA6 | 6.708268 | 0.167707 | 40 |
| HDAC4 | 13.94982 | 0.377022 | 37 |
| PCDHGA7 | 5.947182 | 0.160735 | 37 |
| PAX6 | 14.94418 | 0.426977 | 35 |
| RBFOX3 | 8.664253 | 0.24755 | 35 |
| PCDHGB4 | 5.947182 | 0.169919 | 35 |
| PCDHGA8 | 5.947182 | 0.169919 | 35 |
| DIP2C | 12.43841 | 0.3887 | 32 |
| PCDHGB5 | 5.188257 | 0.162133 | 32 |
| PCDHGA9 | 5.188257 | 0.167363 | 31 |
| SOX2-OT | 13.43776 | 0.463371 | 29 |
| SHANK2 | 5.102298 | 0.196242 | 26 |
| CAMTA1 | 10.52437 | 0.420975 | 25 |
| AGAP1 | 10.44052 | 0.417621 | 25 |
| PDGFRA | 7.810578 | 0.312423 | 25 |
| MEIS1 | 8.770815 | 0.365451 | 24 |
| SATB2 | 6.73535 | 0.28064 | 24 |
| RPTOR | 13.2166 | 0.574635 | 23 |
| INPP5A | 7.865212 | 0.341966 | 23 |
| HOXB3 | 6.650084 | 0.289134 | 23 |
| NXN | 5.752376 | 0.250103 | 23 |
| NCOR2 | 5.49232 | 0.238797 | 23 |
| PRKCZ | 6.759222 | 0.307237 | 22 |
| SKI | 12.17179 | 0.579609 | 21 |
| SIM2 | 5.437087 | 0.258909 | 21 |
| FRMD4A | 8.140409 | 0.40702 | 20 |
| ABR | 6.71436 | 0.335718 | 20 |
| SDK1 | 5.668025 | 0.283401 | 20 |
| MAD1L1 | 13.69774 | 0.720933 | 19 |
| ZNF423 | 10.42024 | 0.548433 | 19 |
| SMG1P2 | 8.785156 | 0.462377 | 19 |
| BOLA2 | 8.785156 | 0.462377 | 19 |
| LOC613038 | 8.785156 | 0.462377 | 19 |
| CASZ1 | 5.862427 | 0.308549 | 19 |
| FOXK1 | 9.295546 | 0.516419 | 18 |
| MCF2L | 7.672036 | 0.426224 | 18 |
| SEPTIN9 | 6.396588 | 0.355366 | 18 |
| TBC1D16 | 5.890404 | 0.327245 | 18 |
| ANKRD11 | 5.202671 | 0.289037 | 18 |
| OPCML | 10.85961 | 0.6388 | 17 |
| TBX15 | 5.389743 | 0.317044 | 17 |
| NAV2 | 7.235721 | 0.452233 | 16 |
| FOXP1 | 6.534835 | 0.408427 | 16 |
| SORBS2 | 5.818589 | 0.363662 | 16 |
| GLI2 | 11.79622 | 0.786415 | 15 |
| ZBTB20 | 7.39887 | 0.493258 | 15 |
| EMX2OS | 5.889967 | 0.392664 | 15 |
| KIRREL3 | 5.272782 | 0.351519 | 15 |
| BAIAP2 | 5.193254 | 0.346217 | 15 |
| IQSEC1 | 6.665892 | 0.476135 | 14 |
| RPS6KA2 | 6.482534 | 0.463038 | 14 |
| CUX1 | 6.332662 | 0.452333 | 14 |
| TBX5 | 5.998658 | 0.428476 | 14 |
| PRKAG2 | 5.424972 | 0.387498 | 14 |
| MSI2 | 8.809547 | 0.677657 | 13 |
| MIR9-3HG | 7.266107 | 0.558931 | 13 |
| MYT1L | 6.182617 | 0.475586 | 13 |
| TNS3 | 6.483199 | 0.540267 | 12 |
| CMIP | 6.235741 | 0.519645 | 12 |
| ADGRD1 | 6.01181 | 0.500984 | 12 |
| ZC3H3 | 5.848371 | 0.487364 | 12 |
| MIRLET7BHG | 5.809331 | 0.484111 | 12 |
| TBX4 | 5.309311 | 0.442443 | 12 |
| RAD51B | 6.756107 | 0.614192 | 11 |
| FGFR2 | 5.887634 | 0.535239 | 11 |
| VGLLA | 5.848507 | 0.531682 | 11 |
| CCDC140 | 5.387338 | 0.489758 | 11 |
| LBX1-AS1 | 6.170454 | 0.617045 | 10 |
| SH3RF3 | 5.498813 | 0.549881 | 10 |
| ACOT7 | 5.262586 | 0.526259 | 10 |
| AKAP13 | 5.213203 | 0.52132 | 10 |
| CHST11 | 5.049935 | 0.504993 | 10 |
| SND1 | 6.644614 | 0.73829 | 9 |
| ATP11A | 6.482206 | 0.720245 | 9 |
| AXIN2 | 5.892237 | 0.654693 | 9 |
| ADGRB1 | 5.660024 | 0.628892 | 9 |
| NOTCH1 | 5.494313 | 0.610479 | 9 |
| TSPAN9 | 5.424342 | 0.602705 | 9 |
| LINC00311 | 5.644053 | 0.705507 | 8 |
| DLEU1 | 5.378806 | 0.672351 | 8 |
| GRIK2 | 5.373596 | 0.671699 | 8 |
| DUSP6 | 7.573024 | 1.081861 | 7 |
| LINC00461 | 5.998306 | 0.856901 | 7 |
| ITPKB | 5.242199 | 0.748886 | 7 |
| SOX6 | 5.231915 | 0.747416 | 7 |
| FBXL18 | 5.169746 | 0.861624 | 6 |
| CRADD | 5.025567 | 0.837595 | 6 |
| RUNDC3A | 5.624716 | 1.124943 | 5 |
| TSNAX-DISC1 | 5.453342 | 1.090668 | 5 |
| SOX10 | 5.45089 | 2.725445 | 2 |

TABLE 138
Cancer Type PA_INF_FGFR

| Gene site | imp_sum | imp_mean | n |
|---|---|---|---|
| PTPRN2 | 11.26445 | 0.137371 | 82 |
| PRDM16 | 8.496392 | 0.119667 | 71 |
| PCDHGA1 | 3.049854 | 0.051692 | 59 |
| PCDHGA2 | 2.733468 | 0.047956 | 57 |
| PCDHGA3 | 3.049854 | 0.056479 | 54 |
| PCDHGB1 | 3.049854 | 0.057544 | 53 |
| PCDHGA4 | 3.049854 | 0.059801 | 51 |
| PCDHGB2 | 3.049854 | 0.062242 | 49 |
| PCDHGA5 | 3.049854 | 0.064891 | 47 |
| PCDHGB3 | 3.113131 | 0.072398 | 43 |
| PCDHGA6 | 2.796745 | 0.069919 | 40 |
| HDAC4 | 7.246665 | 0.195856 | 37 |
| RBFOX3 | 4.115757 | 0.117593 | 35 |
| PAX6 | 2.950393 | 0.084297 | 35 |
| DIP2C | 3.94419 | 0.123256 | 32 |
| SOX2-OT | 6.305877 | 0.217444 | 29 |
| AGAP1 | 5.710979 | 0.228439 | 25 |
| CAMTA1 | 4.469934 | 0.178797 | 25 |
| PDGFRA | 4.121216 | 0.164849 | 25 |
| MEIS1 | 4.003889 | 0.166829 | 24 |
| SATB2 | 2.608137 | 0.108672 | 24 |
| RPTOR | 5.723025 | 0.248827 | 23 |
| INPP5A | 3.546366 | 0.15419 | 23 |
| NCOR2 | 2.912079 | 0.126612 | 23 |
| PRKCZ | 4.349281 | 0.197695 | 22 |
| SKI | 6.671857 | 0.317707 | 21 |
| FRMD4A | 5.899552 | 0.294978 | 20 |
| ABR | 2.703796 | 0.13519 | 20 |
| SDK1 | 2.608231 | 0.130412 | 20 |
| ZNF423 | 7.885591 | 0.415031 | 19 |
| MAD1L1 | 7.709643 | 0.405771 | 19 |
| SMG1P2 | 4.091947 | 0.215366 | 19 |
| BOLA2 | 4.091947 | 0.215366 | 19 |
| LOC613038 | 4.091947 | 0.215366 | 19 |
| FOXK1 | 5.212468 | 0.289582 | 18 |
| MCF2L | 5.179781 | 0.287766 | 18 |
| OPCML | 5.864633 | 0.344978 | 17 |
| TBX15 | 2.668844 | 0.156991 | 17 |
| NAV2 | 5.230587 | 0.326912 | 16 |
| FOXP1 | 4.08692 | 0.255432 | 16 |
| GLI2 | 7.167995 | 0.477866 | 15 |
| LRMDA | 4.316013 | 0.287734 | 15 |
| EMX2OS | 3.598047 | 0.23987 | 15 |
| ZBTB20 | 2.822678 | 0.188179 | 15 |
| CUX1 | 3.947981 | 0.281999 | 14 |
| TBX5 | 3.517706 | 0.251265 | 14 |
| PRKAG2 | 2.751418 | 0.19653 | 14 |
| RPS6KA2 | 2.59765 | 0.185546 | 14 |
| IQSEC1 | 2.530759 | 0.180769 | 14 |
| MSI2 | 4.465475 | 0.343498 | 13 |
| RFX4 | 2.444632 | 0.188049 | 13 |
| CMIP | 4.639566 | 0.38663 | 12 |
| MIRLET7BHG | 2.910187 | 0.242516 | 12 |
| RAD51B | 3.984986 | 0.362271 | 11 |
| VGLLA | 3.739061 | 0.339915 | 11 |
| SLC38A10 | 2.577776 | 0.234343 | 11 |
| BCL11B | 3.701392 | 0.370139 | 10 |
| LBX1-AS1 | 3.091577 | 0.309158 | 10 |
| NTM | 2.980801 | 0.29808 | 10 |
| GAS7 | 2.846296 | 0.28463 | 10 |
| SH3RF3 | 2.667166 | 0.266717 | 10 |
| SPPL2B | 2.645354 | 0.264535 | 10 |
| ACOT7 | 2.448463 | 0.244846 | 10 |
| CHST11 | 2.421619 | 0.242162 | 10 |
| NOTCH1 | 4.133478 | 0.459275 | 9 |
| SND1 | 3.736434 | 0.415159 | 9 |
| ATP11A | 3.493815 | 0.388202 | 9 |
| AXIN2 | 3.352521 | 0.372502 | 9 |
| RUNX1 | 3.281493 | 0.36461 | 9 |
| ASAP1 | 3.213416 | 0.357046 | 9 |
| TSPAN9 | 3.02109 | 0.335677 | 9 |
| TRAPPC12 | 2.816738 | 0.312971 | 9 |
| PACS2 | 2.584394 | 0.287155 | 9 |
| SLC22A18 | 2.443995 | 0.271555 | 9 |
| MSRA | 3.595183 | 0.449398 | 8 |
| SMAD3 | 2.708286 | 0.338536 | 8 |
| LINC00311 | 2.682674 | 0.335334 | 8 |
| DNMT3A | 2.550167 | 0.318771 | 8 |
| MCC | 2.440322 | 0.30504 | 8 |
| DUSP6 | 4.996075 | 0.713725 | 7 |
| SOX6 | 3.850643 | 0.550092 | 7 |
| LINC00461 | 3.688793 | 0.52697 | 7 |
| NAV1 | 3.635722 | 0.519389 | 7 |
| LOC145845 | 3.302787 | 0.550464 | 6 |
| FBXL18 | 3.030425 | 0.505071 | 6 |
| LRRFIP1 | 2.755256 | 0.459209 | 6 |
| COQ8A | 2.530892 | 0.421815 | 6 |
| RUNDC3A | 4.458772 | 0.891754 | 5 |
| TEAD1 | 3.100721 | 0.620144 | 5 |
| TSNAX-DISC1 | 2.784059 | 0.556812 | 5 |
| STARD13 | 2.516872 | 0.503374 | 5 |
| RBMS3 | 2.565293 | 0.641323 | 4 |
| DTNA | 2.55449 | 0.638623 | 4 |
| MYT1 | 2.492204 | 0.623051 | 4 |
| LINC00856 | 2.470881 | 0.61772 | 4 |
| VOPP1 | 2.447651 | 0.611913 | 4 |
| GRIN2B | 3.976503 | 1.325501 | 3 |
| BFSP2 | 2.8358 | 0.945267 | 3 |
| SOX10 | 4.418234 | 2.209117 | 2 |
| SLC25A10 | 2.584089 | 1.292045 | 2 |

TABLE 139
Cancer Type PA_MID

| Gene site | imp_sum | imp_mean | n |
|---|---|---|---|
| PTPRN2 | 24.92907 | 0.304013 | 82 |
| PRDM16 | 22.38057 | 0.315219 | 71 |
| PCDHGA1 | 9.007676 | 0.152672 | 59 |
| PCDHGA2 | 9.007676 | 0.158029 | 57 |
| PCDHGA3 | 8.374904 | 0.155091 | 54 |
| PCDHGB1 | 8.374904 | 0.158017 | 53 |
| PCDHGA4 | 8.374904 | 0.164214 | 51 |
| PCDHGB2 | 7.995381 | 0.163171 | 49 |
| PCDHGA5 | 7.177763 | 0.152718 | 47 |
| PCDHGB3 | 6.848598 | 0.15927 | 43 |
| PCDHGA6 | 6.891039 | 0.172276 | 40 |
| HDAC4 | 13.57788 | 0.36697 | 37 |
| PCDHGA7 | 6.574653 | 0.177693 | 37 |
| PAX6 | 11.37816 | 0.32509 | 35 |
| RBFOX3 | 7.228479 | 0.206528 | 35 |
| PCDHGB4 | 5.610741 | 0.160307 | 35 |
| PCDHGA8 | 5.610741 | 0.160307 | 35 |
| DIP2C | 12.45531 | 0.389228 | 32 |
| PCDHGB5 | 5.335334 | 0.166729 | 32 |
| PCDHGA9 | 5.65172 | 0.182314 | 31 |
| SOX2-OT | 11.54569 | 0.398127 | 29 |
| PCDHGB6 | 5.428568 | 0.187192 | 29 |
| PCDHGA10 | 5.744954 | 0.205177 | 28 |
| GALNT9 | 4.869047 | 0.180335 | 27 |
| SHANK2 | 7.031771 | 0.270453 | 26 |
| AGAP1 | 10.51541 | 0.420616 | 25 |
| CAMTA1 | 10.12603 | 0.405041 | 25 |
| PDGFRA | 8.291798 | 0.331672 | 25 |
| SATB2 | 7.24036 | 0.301682 | 24 |
| MEIS1 | 6.286198 | 0.261925 | 24 |
| PCDHGB7 | 5.112182 | 0.213008 | 24 |
| RPTOR | 12.23551 | 0.531979 | 23 |
| INPP5A | 8.05987 | 0.350429 | 23 |
| NCOR2 | 6.856589 | 0.298113 | 23 |
| NXN | 5.412195 | 0.235313 | 23 |
| HOXB3 | 5.195531 | 0.225893 | 23 |
| PRKCZ | 6.410068 | 0.291367 | 22 |
| SKI | 11.88106 | 0.565765 | 21 |
| ZIC4 | 5.131981 | 0.24438 | 21 |
| SIM2 | 5.037634 | 0.239887 | 21 |
| FRMD4A | 8.255047 | 0.412752 | 20 |
| ABR | 7.36424 | 0.368212 | 20 |
| SDK1 | 4.85756 | 0.242878 | 20 |
| MAD1L1 | 10.80834 | 0.56886 | 19 |
| SMG1P2 | 8.670162 | 0.456324 | 19 |
| BOLA2 | 8.670162 | 0.456324 | 19 |
| LOC613038 | 8.670162 | 0.456324 | 19 |
| ZNF423 | 6.865541 | 0.361344 | 19 |
| FOXK1 | 9.060215 | 0.503345 | 18 |
| TBC1D16 | 8.611254 | 0.478403 | 18 |
| MCF2L | 6.904808 | 0.3836 | 18 |
| RBFOX1 | 6.215358 | 0.345298 | 18 |
| ANKRD11 | 6.088915 | 0.338273 | 18 |
| SEPTIN9 | 4.9001 | 0.272228 | 18 |
| OPCML | 9.261312 | 0.544783 | 17 |
| PAX6-AS1 | 5.151432 | 0.303025 | 17 |
| RCN1 | 5.151432 | 0.303025 | 17 |
| NAV2 | 6.342771 | 0.396423 | 16 |
| FOXP1 | 5.687228 | 0.355452 | 16 |
| SORBS2 | 5.485831 | 0.342864 | 16 |
| GLI2 | 10.1483 | 0.676553 | 15 |
| ZBTB20 | 6.74146 | 0.449431 | 15 |
| EMX2OS | 6.561478 | 0.437432 | 15 |
| KIRREL3 | 5.503255 | 0.366884 | 15 |
| BAIAP2 | 4.921008 | 0.328067 | 15 |
| RPS6KA2 | 7.793022 | 0.556644 | 14 |
| CUX1 | 6.182666 | 0.441619 | 14 |
| IQSEC1 | 6.070246 | 0.433589 | 14 |
| TBX5 | 5.372219 | 0.38373 | 14 |
| PRKAG2 | 5.282265 | 0.377305 | 14 |
| MSI2 | 6.939435 | 0.533803 | 13 |
| RFX4 | 5.583069 | 0.429467 | 13 |
| MYT1L | 5.004928 | 0.384994 | 13 |
| SPTBN4 | 4.915305 | 0.3781 | 13 |
| CMIP | 5.591839 | 0.465987 | 12 |
| FBRSL1 | 5.362243 | 0.446854 | 12 |
| MEIS2 | 5.221624 | 0.435135 | 12 |
| TNS3 | 4.892318 | 0.407693 | 12 |
| FGFR2 | 6.145005 | 0.558637 | 11 |
| VGLL4 | 6.111036 | 0.555549 | 11 |
| RAD51B | 5.814694 | 0.528609 | 11 |
| CCDC140 | 5.413668 | 0.492152 | 11 |
| LBX1-AS1 | 6.627648 | 0.662765 | 10 |
| SH3RF3 | 6.510324 | 0.651032 | 10 |
| NTM | 4.970905 | 0.497091 | 10 |
| ATP11A | 6.420082 | 0.713342 | 9 |
| SND1 | 6.282092 | 0.69801 | 9 |
| NOTCH1 | 5.579218 | 0.619913 | 9 |
| ADGRB1 | 5.235298 | 0.5817 | 9 |
| TSPAN9 | 4.850493 | 0.538944 | 9 |
| LINC00311 | 6.110924 | 0.763866 | 8 |
| GRIK2 | 5.325754 | 0.665719 | 8 |
| MSRA | 5.235986 | 0.654498 | 8 |
| DLEU1 | 5.195263 | 0.649408 | 8 |
| DUSP6 | 7.486675 | 1.069525 | 7 |
| LINC00461 | 5.641189 | 0.805884 | 7 |
| NAV1 | 5.002949 | 0.714707 | 7 |
| RUNDC3A | 5.714321 | 1.142864 | 5 |
| ARHGEF7 | 4.927637 | 0.985527 | 5 |
| SOX10 | 5.52976 | 2.76488 | 2 |

TABLE 140
Cancer Type PB_FOXR2

| Gene site | imp_sum | imp_mean | n |
|---|---|---|---|
| PTPRN2 | 7.990592 | 0.097446 | 82 |
| PRDM16 | 5.878697 | 0.082799 | 71 |
| HDAC4 | 9.817625 | 0.265341 | 37 |
| PAX6 | 4.582936 | 0.130941 | 35 |
| RBFOX3 | 4.257452 | 0.121641 | 35 |
| DIP2C | 4.849074 | 0.151534 | 32 |
| GALNT9 | 4.664578 | 0.172762 | 27 |
| ADARB2 | 2.531088 | 0.09735 | 26 |
| CAMTA1 | 7.388806 | 0.295552 | 25 |
| AGAP1 | 5.664287 | 0.226571 | 25 |
| PDGFRA | 2.983932 | 0.119357 | 25 |
| MEIS1 | 2.457591 | 0.1024 | 24 |
| RPTOR | 6.022756 | 0.261859 | 23 |
| NXN | 4.43426 | 0.192794 | 23 |
| NCOR2 | 4.165875 | 0.181125 | 23 |
| RIMBP2 | 3.892405 | 0.169235 | 23 |
| INPP5A | 3.431163 | 0.149181 | 23 |
| SKI | 4.913274 | 0.233965 | 21 |
| SDK1 | 2.733652 | 0.136683 | 20 |
| MAD1L1 | 10.74638 | 0.565599 | 19 |
| CASZ1 | 3.359893 | 0.176836 | 19 |
| ZNF423 | 3.082744 | 0.16225 | 19 |
| SMG1P2 | 2.643986 | 0.139157 | 19 |
| BOLA2 | 2.643986 | 0.139157 | 19 |
| LOC613038 | 2.643986 | 0.139157 | 19 |
| FOXK1 | 3.833278 | 0.21296 | 18 |
| TBC1D16 | 2.536714 | 0.140929 | 18 |
| ANKRD11 | 2.507306 | 0.139295 | 18 |
| HBG2 | 5.796202 | 0.340953 | 17 |
| TBX15 | 5.622326 | 0.330725 | 17 |
| FOXP1 | 3.682609 | 0.230163 | 16 |
| NAV2 | 3.015244 | 0.188453 | 16 |
| KNDC1 | 3.337509 | 0.222501 | 15 |
| SLX1B- | 2.538607 | 0.16924 | 15 |
| SULT1A4 | | | |
| SLX1A | 2.538607 | 0.16924 | 15 |
| LOC606724 | 2.538607 | 0.16924 | 15 |
| NFATC1 | 2.416337 | 0.161089 | 15 |
| CUX1 | 2.668292 | 0.190592 | 14 |
| C7orf50 | 2.4789 | 0.177064 | 14 |
| TBX5 | 2.46133 | 0.175809 | 14 |
| MOB2 | 2.370305 | 0.169307 | 14 |
| MSI2 | 4.002983 | 0.307922 | 13 |
| MYT1L | 3.035138 | 0.233472 | 13 |
| GSE1 | 2.260512 | 0.173886 | 13 |
| TNS3 | 4.970195 | 0.414183 | 12 |
| FBRSL1 | 3.684879 | 0.307073 | 12 |
| ZC3H3 | 3.247704 | 0.270642 | 12 |
| GNA12 | 2.330387 | 0.194199 | 12 |
| CTBP2 | 2.994621 | 0.272238 | 11 |
| RAD51B | 2.761373 | 0.251034 | 11 |
| ETS1 | 2.687183 | 0.268718 | 10 |
| AKAP13 | 2.401156 | 0.240116 | 10 |
| AUTS2 | 2.378175 | 0.237818 | 10 |
| SND1 | 4.92843 | 0.547603 | 9 |
| CACNA2D4 | 4.16434 | 0.462704 | 9 |
| ATP11A | 3.792183 | 0.421354 | 9 |
| ADAMTS2 | 3.289882 | 0.365542 | 9 |
| TSPAN9 | 3.275225 | 0.363914 | 9 |
| GPC6 | 2.691387 | 0.299043 | 9 |
| PDE6B | 2.400909 | 0.266768 | 9 |
| RUNX1 | 2.349199 | 0.261022 | 9 |
| MGMT | 2.259619 | 0.251069 | 9 |
| SSBP3 | 2.23661 | 0.248512 | 9 |
| VRK2 | 5.188252 | 0.648532 | 8 |
| PPP2R2B | 3.874229 | 0.484279 | 8 |
| DNMT3A | 3.389235 | 0.423654 | 8 |
| DLEU1 | 2.512305 | 0.314038 | 8 |
| TRAPPC9 | 2.408322 | 0.30104 | 8 |
| MIR124-2HG | 2.862366 | 0.408909 | 7 |
| F11R | 2.743506 | 0.391929 | 7 |
| TRIM6-TRIM34 | 2.397273 | 0.342468 | 7 |
| PITPNC1 | 2.387203 | 0.341029 | 7 |
| MIR548H4 | 2.325792 | 0.332256 | 7 |
| HOTAIR | 2.259323 | 0.32276 | 7 |
| LDLRAD4 | 2.259092 | 0.322727 | 7 |
| TRAK1 | 2.697156 | 0.449526 | 6 |
| DNAJB6 | 2.595136 | 0.432523 | 6 |
| MYO16 | 2.504651 | 0.417442 | 6 |
| TRIM34 | 2.397273 | 0.399546 | 6 |
| TSNAX-DISC1 | 4.231114 | 0.846223 | 5 |
| ARHGEF7 | 2.573357 | 0.514671 | 5 |
| TSTD1 | 2.266536 | 0.453307 | 5 |
| GSG1 | 2.662472 | 0.665618 | 4 |
| EXT1 | 2.49718 | 0.624295 | 4 |
| RASGRP3 | 3.037567 | 1.012522 | 3 |
| SLC25A22 | 2.963633 | 0.987878 | 3 |
| SLC12A9 | 2.824573 | 0.941524 | 3 |
| ANKRD33B | 2.399937 | 0.799979 | 3 |
| CCDC167 | 2.397717 | 0.799239 | 3 |
| DAGLB | 2.310307 | 0.770102 | 3 |
| CHTF18 | 4.125188 | 2.062594 | 2 |
| UTRN | 2.665067 | 1.332534 | 2 |
| KIF21B | 2.591026 | 1.295513 | 2 |
| UHRF1 | 2.588786 | 1.294393 | 2 |
| TRIM65 | 2.373132 | 1.186566 | 2 |
| DDX31 | 2.254488 | 1.127244 | 2 |
| ARL6IP6 | 2.833138 | 2.833138 | 1 |
| KCNV2 | 2.68683 | 2.68683 | 1 |
| DDT | 2.658782 | 2.658782 | 1 |
| DNAJC27 | 2.281123 | 2.281123 | 1 |

TABLE 141
Cancer Type PB_Grp1A

| Gene site | imp_sum | imp_mean | n |
|---|---|---|---|
| PTPRN2 | 13.14354 | 0.160287 | 82 |
| PRDM16 | 12.4281 | 0.175044 | 71 |
| PCDHGA1 | 4.717988 | 0.079966 | 59 |
| PCDHGA2 | 4.717988 | 0.082772 | 57 |
| PCDHGA3 | 4.290336 | 0.079451 | 54 |
| PCDHGB1 | 4.290336 | 0.08095 | 53 |
| PCDHGA4 | 4.606722 | 0.090328 | 51 |
| PCDHGB2 | 4.606722 | 0.094015 | 49 |
| PCDHGA5 | 4.606722 | 0.098015 | 47 |
| PCDHGB3 | 4.290336 | 0.099775 | 43 |
| PCDHGA6 | 4.290336 | 0.107258 | 40 |
| HDAC4 | 15.02807 | 0.406164 | 37 |
| PCDHGA7 | 3.97395 | 0.107404 | 37 |
| RBFOX3 | 8.054898 | 0.23014 | 35 |
| PAX6 | 6.607636 | 0.18879 | 35 |
| PCDHGB4 | 3.97395 | 0.113541 | 35 |
| PCDHGA8 | 3.97395 | 0.113541 | 35 |
| DIP2C | 7.234737 | 0.226086 | 32 |
| PCDHGB5 | 3.97395 | 0.124186 | 32 |
| PCDHGA9 | 3.657564 | 0.117986 | 31 |
| GALNT9 | 5.728502 | 0.212167 | 27 |
| SHANK2 | 4.017317 | 0.154512 | 26 |
| CAMTA1 | 9.204105 | 0.368164 | 25 |
| AGAP1 | 7.880278 | 0.315211 | 25 |
| PDGFRA | 3.962118 | 0.158485 | 25 |
| PCDHGB7 | 4.265517 | 0.17773 | 24 |
| MEIS1 | 4.019856 | 0.167494 | 24 |
| RPTOR | 10.82454 | 0.470632 | 23 |
| NCOR2 | 8.674575 | 0.377155 | 23 |
| NXN | 8.626693 | 0.375074 | 23 |
| INPP5A | 7.050943 | 0.306563 | 23 |
| RIMBP2 | 6.203164 | 0.269703 | 23 |
| PCDHGA11 | 4.265517 | 0.185457 | 23 |
| PRKCZ | 4.345374 | 0.197517 | 22 |
| SKI | 7.982678 | 0.380128 | 21 |
| MAD1L1 | 14.00072 | 0.73688 | 19 |
| SMG1P2 | 6.150135 | 0.323691 | 19 |
| BOLA2 | 6.150135 | 0.323691 | 19 |
| LOC613038 | 6.150135 | 0.323691 | 19 |
| CASZ1 | 6.003889 | 0.315994 | 19 |
| KCNQ1 | 5.093913 | 0.268101 | 19 |
| CFAP46 | 3.876613 | 0.204032 | 19 |
| ZNF423 | 3.739536 | 0.196818 | 19 |
| FOXK1 | 5.324759 | 0.29582 | 18 |
| SEPTIN9 | 3.795298 | 0.21085 | 18 |
| ANKRD11 | 3.789854 | 0.210547 | 18 |
| HBG2 | 5.257775 | 0.309281 | 17 |
| TBX15 | 4.572216 | 0.268954 | 17 |
| OPCML | 3.915604 | 0.23033 | 17 |
| NAV2 | 5.577801 | 0.348613 | 16 |
| FOXP1 | 3.802156 | 0.237635 | 16 |
| BAIAP2 | 4.821444 | 0.32143 | 15 |
| KNDC1 | 4.609228 | 0.307282 | 15 |
| ZBTB20 | 4.515262 | 0.301017 | 15 |
| CUX1 | 6.211835 | 0.443703 | 14 |
| C7orf50 | 5.385842 | 0.384703 | 14 |
| IQSEC1 | 5.384054 | 0.384575 | 14 |
| MIR548F5 | 4.897931 | 0.349852 | 14 |
| GNG7 | 3.984604 | 0.284615 | 14 |
| MOB2 | 3.924169 | 0.280298 | 14 |
| ARHGEF10 | 3.835325 | 0.273952 | 14 |
| PCDHGA12 | 3.632745 | 0.259482 | 14 |
| MSI2 | 8.145857 | 0.626604 | 13 |
| MYT1L | 5.718421 | 0.439879 | 13 |
| GSE1 | 4.969846 | 0.382296 | 13 |
| RFX4 | 4.509334 | 0.346872 | 13 |
| FBRSL1 | 5.839394 | 0.486616 | 12 |
| MIRLET7BHG | 5.794207 | 0.482851 | 12 |
| ZC3H3 | 5.362076 | 0.44684 | 12 |
| CMIP | 4.219709 | 0.351642 | 12 |
| MAML3 | 3.660775 | 0.305065 | 12 |
| CTBP2 | 4.396751 | 0.399705 | 11 |
| SLC38A10 | 4.038955 | 0.367178 | 11 |
| RAD51B | 3.924346 | 0.356759 | 11 |
| LBX1-AS1 | 5.08053 | 0.508053 | 10 |
| AKAP13 | 4.666204 | 0.46662 | 10 |
| FMN1 | 4.42103 | 0.442103 | 10 |
| AUTS2 | 4.372976 | 0.437298 | 10 |
| ETS1 | 4.309239 | 0.430924 | 10 |
| NR5A2 | 4.294828 | 0.429483 | 10 |
| NBEA | 3.794825 | 0.379483 | 10 |
| SND1 | 6.776733 | 0.75297 | 9 |
| AXIN2 | 5.396535 | 0.599615 | 9 |
| TSPAN9 | 4.939725 | 0.548858 | 9 |
| ADAMTS2 | 4.653586 | 0.517065 | 9 |
| ATP11A | 4.587726 | 0.509747 | 9 |
| CACNA2D4 | 4.375753 | 0.486195 | 9 |
| PDE6B | 3.91789 | 0.435321 | 9 |
| VRK2 | 8.419695 | 1.052462 | 8 |
| PPP2R2B | 4.94812 | 0.618515 | 8 |
| TRAPPC9 | 3.803547 | 0.475443 | 8 |
| ASPSCR1 | 3.785069 | 0.473134 | 8 |
| DLEU1 | 3.769648 | 0.471206 | 8 |
| MIR548H4 | 4.051045 | 0.578721 | 7 |
| MIR124-2HG | 3.881805 | 0.554544 | 7 |
| CALD1 | 4.047304 | 0.674551 | 6 |
| TRAK1 | 3.896317 | 0.649386 | 6 |
| TSNAX-DISC1 | 4.975083 | 0.995017 | 5 |
| ARHGEF7 | 3.716847 | 0.743369 | 5 |
| CHTF18 | 4.686664 | 2.343332 | 2 |

TABLE 142
Cancer Type PB_Grp1B

| Gene site | imp_sum | imp_mean | n |
|---|---|---|---|
| PTPRN2 | 4.33509 | 0.052867 | 82 |
| PRDM16 | 3.020796 | 0.042546 | 71 |
| PCDHGA1 | 2.763024 | 0.046831 | 59 |
| PCDHGA2 | 2.763024 | 0.048474 | 57 |
| PCDHGA3 | 2.763024 | 0.051167 | 54 |
| PCDHGB1 | 2.763024 | 0.052133 | 53 |
| PCDHGA4 | 2.763024 | 0.054177 | 51 |
| PCDHGB2 | 2.763024 | 0.056388 | 49 |
| PCDHGA5 | 2.763024 | 0.058788 | 47 |
| PCDHGB3 | 2.763024 | 0.064256 | 43 |
| HDAC4 | 8.343297 | 0.225495 | 37 |
| RBFOX3 | 4.992446 | 0.142641 | 35 |
| AGAP1 | 2.587405 | 0.103496 | 25 |
| RPTOR | 5.172582 | 0.224895 | 23 |
| INPP5A | 4.131043 | 0.179611 | 23 |
| NXN | 3.094062 | 0.134524 | 23 |
| HOXB3 | 2.730562 | 0.11872 | 23 |
| SKI | 3.986412 | 0.189829 | 21 |
| FRMD4A | 2.158766 | 0.107938 | 20 |
| MAD1L1 | 9.902993 | 0.52121 | 19 |
| CASZ1 | 4.723625 | 0.248612 | 19 |
| SMG1P2 | 2.819412 | 0.14839 | 19 |
| BOLA2 | 2.819412 | 0.14839 | 19 |
| LOC613038 | 2.819412 | 0.14839 | 19 |
| FOXK1 | 3.799291 | 0.211072 | 18 |
| TBX15 | 4.455878 | 0.26211 | 17 |
| FOXP1 | 4.913795 | 0.307112 | 16 |
| NAV2 | 3.62173 | 0.226358 | 16 |
| DLX6-AS1 | 2.999526 | 0.199968 | 15 |
| GLI2 | 2.899444 | 0.193296 | 15 |
| KIRREL3 | 2.675446 | 0.178363 | 15 |
| BAIAP2 | 2.320908 | 0.154727 | 15 |
| CUX1 | 2.991178 | 0.213656 | 14 |
| MIR548F5 | 2.280434 | 0.162888 | 14 |
| PPP2R2A | 2.269914 | 0.162137 | 14 |
| MSI2 | 4.460783 | 0.343137 | 13 |
| MYT1L | 3.527057 | 0.271312 | 13 |
| ZC3H3 | 3.987479 | 0.33229 | 12 |
| MIRLET7BHG | 3.400021 | 0.283335 | 12 |
| CMIP | 3.032205 | 0.252684 | 12 |
| RAD51B | 2.502474 | 0.227498 | 11 |
| WNT5A | 2.212228 | 0.201112 | 11 |
| LBX1-AS1 | 4.354166 | 0.435417 | 10 |
| AUTS2 | 3.360625 | 0.336062 | 10 |
| ETS1 | 2.697473 | 0.269747 | 10 |
| ANKS1B | 2.618779 | 0.261878 | 10 |
| RGS12 | 2.286667 | 0.228667 | 10 |
| SKOR1 | 2.18314 | 0.218314 | 10 |
| NR5A2 | 2.165993 | 0.216599 | 10 |
| NBEA | 2.145445 | 0.214545 | 10 |
| BCL11B | 2.102114 | 0.210211 | 10 |
| SND1 | 4.161108 | 0.462345 | 9 |
| CACNA2D4 | 3.857369 | 0.428597 | 9 |
| ATP11A | 3.444519 | 0.382724 | 9 |
| TSPAN9 | 3.284664 | 0.364963 | 9 |
| AXIN2 | 3.194411 | 0.354935 | 9 |
| MGMT | 2.792104 | 0.310234 | 9 |
| GPC6 | 2.725476 | 0.302831 | 9 |
| RUNX1 | 2.635013 | 0.292779 | 9 |
| VRK2 | 4.104786 | 0.513098 | 8 |
| VEPH1 | 3.963503 | 0.495438 | 8 |
| PPP2R2B | 3.139021 | 0.392378 | 8 |
| MACROD1 | 2.846503 | 0.355813 | 8 |
| MSRA | 2.51368 | 0.31421 | 8 |
| TRAPPC9 | 2.181993 | 0.272749 | 8 |
| DLEU1 | 2.165119 | 0.27064 | 8 |
| GDNF | 3.616465 | 0.516638 | 7 |
| MIR124-2HG | 3.448424 | 0.492632 | 7 |
| MIR548H4 | 3.005505 | 0.429358 | 7 |
| DUSP6 | 2.645882 | 0.377983 | 7 |
| PITPNC1 | 2.205611 | 0.315087 | 7 |
| NAV1 | 2.160334 | 0.308619 | 7 |
| TRAK1 | 2.474917 | 0.412486 | 6 |
| COLEC11 | 2.403608 | 0.400601 | 6 |
| ARHGAP18 | 2.123442 | 0.353907 | 6 |
| TSNAX-DISC1 | 3.917575 | 0.783515 | 5 |
| LOC100132215 | 2.575006 | 0.515001 | 5 |
| CACNA2D2 | 2.279359 | 0.455872 | 5 |
| CASP8 | 2.221321 | 0.444264 | 5 |
| OTP | 2.208145 | 0.441629 | 5 |
| ARHGEF7 | 2.133698 | 0.42674 | 5 |
| ITGA5 | 2.638831 | 0.659708 | 4 |
| EXT1 | 2.523982 | 0.630995 | 4 |
| GSG1 | 2.312788 | 0.578197 | 4 |
| MSC-AS1 | 2.179854 | 0.544963 | 4 |
| SLC12A9 | 2.456232 | 0.818744 | 3 |
| SLC1A7 | 2.330836 | 0.776945 | 3 |
| EPAS1 | 2.278496 | 0.759499 | 3 |
| ANKRD33B | 2.113427 | 0.704476 | 3 |
| DAGLB | 2.10671 | 0.702237 | 3 |
| CHTF18 | 3.997221 | 1.99861 | 2 |
| TRIM65 | 2.555016 | 1.277508 | 2 |
| KIF21B | 2.54759 | 1.273795 | 2 |
| UHRF1 | 2.546712 | 1.273356 | 2 |
| DDX31 | 2.195924 | 1.097962 | 2 |
| ERI3 | 2.141521 | 1.07076 | 2 |
| KCNV2 | 2.80926 | 2.80926 | 1 |
| DDT | 2.680828 | 2.680828 | 1 |
| ARL6IP6 | 2.602609 | 2.602609 | 1 |
| DNAJC27 | 2.364602 | 2.364602 | 1 |

TABLE 143
Cancer Type PB_Grp2

| Gene site | imp_sum | imp_mean | n |
|---|---|---|---|
| PTPRN2 | 5.879729 | 0.071704 | 82 |
| PRDM16 | 6.245735 | 0.087968 | 71 |
| PCDHGA1 | 2.531088 | 0.0429 | 59 |
| PCDHGA2 | 2.531088 | 0.044405 | 57 |
| PCDHGA3 | 2.531088 | 0.046872 | 54 |
| PCDHGB1 | 2.531088 | 0.047756 | 53 |
| PCDHGA4 | 2.214702 | 0.043426 | 51 |
| PCDHGB2 | 2.214702 | 0.045198 | 49 |
| PCDHGA5 | 2.214702 | 0.047121 | 47 |
| HDAC4 | 6.957028 | 0.188028 | 37 |
| PAX6 | 3.41803 | 0.097658 | 35 |
| DIP2C | 3.646075 | 0.11394 | 32 |
| AGAP1 | 6.205598 | 0.248224 | 25 |
| CAMTA1 | 5.497657 | 0.219906 | 25 |
| MEIS1 | 6.099519 | 0.254147 | 24 |
| INPP5A | 4.568314 | 0.198622 | 23 |
| RPTOR | 4.296497 | 0.186804 | 23 |
| RIMBP2 | 3.736288 | 0.162447 | 23 |
| NCOR2 | 3.441629 | 0.149636 | 23 |
| HOXB3 | 2.803838 | 0.121906 | 23 |
| NXN | 2.478876 | 0.107777 | 23 |
| PRKCZ | 3.156096 | 0.143459 | 22 |
| SKI | 4.063587 | 0.193504 | 21 |
| FRMD4A | 2.151691 | 0.107585 | 20 |
| MAD1L1 | 10.73492 | 0.564996 | 19 |
| CASZ1 | 4.948578 | 0.260451 | 19 |
| SMG1P2 | 4.05105 | 0.213213 | 19 |
| BOLA2 | 4.05105 | 0.213213 | 19 |
| LOC613038 | 4.05105 | 0.213213 | 19 |
| ZNF423 | 2.440375 | 0.128441 | 19 |
| ANKRD11 | 3.160691 | 0.175594 | 18 |
| FOXK1 | 2.457772 | 0.136543 | 18 |
| TBX15 | 4.553703 | 0.267865 | 17 |
| FOXP1 | 6.345018 | 0.396564 | 16 |
| NAV2 | 3.64718 | 0.227949 | 16 |
| EBF3 | 2.315293 | 0.144706 | 16 |
| KNDC1 | 2.920987 | 0.194732 | 15 |
| BAIAP2 | 2.468116 | 0.164541 | 15 |
| SLX1B- | 2.427079 | 0.161805 | 15 |
| SULT1A4 | | | |
| SLX1A | 2.427079 | 0.161805 | 15 |
| LOC606724 | 2.427079 | 0.161805 | 15 |
| NFIX | 2.350296 | 0.156686 | 15 |
| NFATC1 | 2.289517 | 0.152634 | 15 |
| GLI2 | 2.25982 | 0.150655 | 15 |
| ARHGEF10 | 3.657226 | 0.26123 | 14 |
| GNG7 | 2.38778 | 0.170556 | 14 |
| PRKAG2 | 2.314672 | 0.165334 | 14 |
| MYT1L | 5.2682 | 0.405246 | 13 |
| MSI2 | 2.388799 | 0.183754 | 13 |
| MIRLET7BHG | 5.382895 | 0.448575 | 12 |
| ZC3H3 | 3.236118 | 0.269677 | 12 |
| FBRSL1 | 2.620636 | 0.218386 | 12 |
| CMIP | 2.242281 | 0.186857 | 12 |
| AKAP13 | 2.754346 | 0.275435 | 10 |
| LBX1-AS1 | 2.32726 | 0.232726 | 10 |
| NR5A2 | 2.32255 | 0.232255 | 10 |
| NBEA | 2.279871 | 0.227987 | 10 |
| KCNIP4 | 2.153457 | 0.215346 | 10 |
| SND1 | 4.69454 | 0.521616 | 9 |
| ADAMTS2 | 4.195005 | 0.466112 | 9 |
| TSPAN9 | 4.119054 | 0.457673 | 9 |
| CACNA2D4 | 3.496569 | 0.388508 | 9 |
| MGMT | 3.047656 | 0.338628 | 9 |
| ATP11A | 2.55549 | 0.283943 | 9 |
| VRK2 | 4.823612 | 0.602952 | 8 |
| DNMT3A | 3.277359 | 0.40967 | 8 |
| PPP2R2B | 3.154545 | 0.394318 | 8 |
| TRAPPC9 | 3.05946 | 0.382433 | 8 |
| POU6F2 | 2.759699 | 0.344962 | 8 |
| TENM2 | 2.439959 | 0.304995 | 8 |
| MIR124-2HG | 2.84696 | 0.406709 | 7 |
| MIR548H4 | 2.247968 | 0.321138 | 7 |
| PBX1 | 2.68946 | 0.448243 | 6 |
| ARHGAP18 | 2.545821 | 0.424303 | 6 |
| TRAK1 | 2.507813 | 0.417969 | 6 |
| COLEC11 | 2.262199 | 0.377033 | 6 |
| DNAJB6 | 2.220931 | 0.370155 | 6 |
| FBXL18 | 2.177682 | 0.362947 | 6 |
| TSNAX-DISC1 | 4.397586 | 0.879517 | 5 |
| OTP | 3.698275 | 0.739655 | 5 |
| ARHGEF7 | 2.679132 | 0.535826 | 5 |
| IL17D | 2.157772 | 0.431554 | 5 |
| SDK2 | 2.15301 | 0.430602 | 5 |
| GSG1 | 2.673792 | 0.668448 | 4 |
| EXT1 | 2.545343 | 0.636336 | 4 |
| PCSK9 | 2.268441 | 0.56711 | 4 |
| SLC25A22 | 2.812923 | 0.937641 | 3 |
| LOC339874 | 2.524663 | 0.841554 | 3 |
| DAGLB | 2.358333 | 0.786111 | 3 |
| ARMC2 | 2.267345 | 0.755782 | 3 |
| RASGRP3 | 2.162284 | 0.720761 | 3 |
| CHTF18 | 4.034748 | 2.017374 | 2 |
| KIF21B | 2.700938 | 1.350469 | 2 |
| UHRF1 | 2.699644 | 1.349822 | 2 |
| TRIM65 | 2.5883 | 1.29415 | 2 |
| UTRN | 2.432967 | 1.216483 | 2 |
| KCNV2 | 2.747887 | 2.747887 | 1 |
| ARL6IP6 | 2.674833 | 2.674833 | 1 |
| DDT | 2.616198 | 2.616198 | 1 |
| DNAJC27 | 2.40222 | 2.40222 | 1 |

TABLE 144
Cancer Type PGG

| Gene site | imp_sum | imp_mean | n |
|---|---|---|---|
| PTPRN2 | 16.42773 | 0.200338 | 82 |
| PRDM16 | 14.89853 | 0.209838 | 71 |
| PCDHGA1 | 5.194941 | 0.08805 | 59 |
| PCDHGA2 | 4.647119 | 0.081528 | 57 |
| PCDHGA3 | 4.647119 | 0.086058 | 54 |
| PCDHGB1 | 4.647119 | 0.087681 | 53 |
| PCDHGA4 | 4.647119 | 0.09112 | 51 |
| PCDHGB2 | 4.330733 | 0.088382 | 49 |
| PCDHGA5 | 4.330733 | 0.092143 | 47 |
| PCDHGB3 | 4.014347 | 0.093357 | 43 |
| PCDHGA6 | 3.697961 | 0.092449 | 40 |
| HDAC4 | 14.70154 | 0.397339 | 37 |
| PCDHGA7 | 3.697961 | 0.099945 | 37 |
| PAX6 | 9.396488 | 0.268471 | 35 |
| RBFOX3 | 6.943902 | 0.198397 | 35 |
| DIP2C | 12.19685 | 0.381152 | 32 |
| PCDHGB5 | 3.697961 | 0.115561 | 32 |
| PCDHGA9 | 3.697961 | 0.119289 | 31 |
| GALNT9 | 4.477861 | 0.165847 | 27 |
| SHANK2 | 6.641535 | 0.255444 | 26 |
| ADARB2 | 4.992732 | 0.192028 | 26 |
| AGAP1 | 7.522315 | 0.300893 | 25 |
| CAMTA1 | 6.748919 | 0.269957 | 25 |
| PDGFRA | 6.040879 | 0.241635 | 25 |
| MEIS1 | 4.902005 | 0.20425 | 24 |
| SATB2 | 4.458027 | 0.185751 | 24 |
| RPTOR | 10.34906 | 0.449959 | 23 |
| NCOR2 | 6.429091 | 0.279526 | 23 |
| NXN | 4.656189 | 0.202443 | 23 |
| INPP5A | 4.200631 | 0.182636 | 23 |
| RIMBP2 | 4.182212 | 0.181835 | 23 |
| PRKCZ | 6.843107 | 0.31105 | 22 |
| SKI | 6.831861 | 0.325327 | 21 |
| SIM2 | 4.967137 | 0.23653 | 21 |
| ZIC4 | 4.39678 | 0.20937 | 21 |
| HOXA-AS3 | 4.352134 | 0.207244 | 21 |
| ABR | 5.548789 | 0.277439 | 20 |
| SDK1 | 5.017472 | 0.250874 | 20 |
| FRMD4A | 4.471013 | 0.223551 | 20 |
| MAD1L1 | 13.69728 | 0.720909 | 19 |
| SMG1P2 | 6.309543 | 0.332081 | 19 |
| BOLA2 | 6.309543 | 0.332081 | 19 |
| LOC613038 | 6.309543 | 0.332081 | 19 |
| CASZ1 | 5.556523 | 0.292449 | 19 |
| KCNQ1 | 5.062779 | 0.266462 | 19 |
| ZNF423 | 4.958846 | 0.260992 | 19 |
| FOXK1 | 8.033926 | 0.446329 | 18 |
| ANKRD11 | 6.119522 | 0.339973 | 18 |
| HOXA3 | 4.581533 | 0.25453 | 18 |
| SEPTIN9 | 3.734312 | 0.207462 | 18 |
| OPCML | 7.091087 | 0.417123 | 17 |
| FOXP1 | 8.141302 | 0.508831 | 16 |
| EBF3 | 4.276513 | 0.267282 | 16 |
| SORBS2 | 3.805694 | 0.237856 | 16 |
| GLI2 | 5.218606 | 0.347907 | 15 |
| BAIAP2 | 4.62765 | 0.30851 | 15 |
| ZBTB20 | 3.998661 | 0.266577 | 15 |
| RPS6KA2 | 6.719789 | 0.479985 | 14 |
| CUX1 | 5.035008 | 0.359643 | 14 |
| C7orf50 | 4.943359 | 0.353097 | 14 |
| ARHGEF10 | 4.04954 | 0.289253 | 14 |
| PRKAG2 | 3.917642 | 0.279832 | 14 |
| MIR548F5 | 3.862537 | 0.275896 | 14 |
| MSI2 | 6.451313 | 0.496255 | 13 |
| MYT1L | 5.457573 | 0.419813 | 13 |
| GSE1 | 4.099706 | 0.315362 | 13 |
| KIF26B | 3.745511 | 0.288116 | 13 |
| MIRLET7BHG | 5.921882 | 0.49349 | 12 |
| ZC3H3 | 4.467121 | 0.37226 | 12 |
| ADGRD1 | 4.429613 | 0.369134 | 12 |
| MAML3 | 4.106386 | 0.342199 | 12 |
| FBRSL1 | 3.995056 | 0.332921 | 12 |
| RAD51B | 4.875002 | 0.443182 | 11 |
| CACNA1C | 4.625387 | 0.42049 | 11 |
| CTBP2 | 4.50338 | 0.409398 | 11 |
| TBCD | 4.406564 | 0.400597 | 11 |
| ZC3H12D | 3.972821 | 0.361166 | 11 |
| TSPAN4 | 4.339881 | 0.433988 | 10 |
| ACOT7 | 4.068272 | 0.406827 | 10 |
| GAS7 | 3.926778 | 0.392678 | 10 |
| SND1 | 7.366746 | 0.818527 | 9 |
| ADAMTS2 | 6.07964 | 0.675516 | 9 |
| ATP11A | 4.000599 | 0.444511 | 9 |
| TSPAN9 | 3.858385 | 0.428709 | 9 |
| CACNA2D4 | 3.789858 | 0.421095 | 9 |
| SYNJ2 | 5.070239 | 0.63378 | 8 |
| MSRA | 4.537357 | 0.56717 | 8 |
| CELF4 | 4.18234 | 0.522792 | 8 |
| DNMT3A | 4.131511 | 0.516439 | 8 |
| C19orf25 | 5.169302 | 0.738472 | 7 |
| NAV1 | 4.871626 | 0.695947 | 7 |
| RXRA | 4.485045 | 0.640721 | 7 |
| GAK | 4.428979 | 0.632711 | 7 |
| FBXL18 | 5.28216 | 0.88036 | 6 |
| COQ8A | 3.727351 | 0.621225 | 6 |
| TSNAX-DISC1 | 5.16109 | 1.032218 | 5 |
| ARHGEF7 | 3.877893 | 0.775579 | 5 |
| DAGLB | 3.770107 | 1.256702 | 3 |
| SLC25A10 | 3.948105 | 1.974052 | 2 |
| GRTP1 | 3.86273 | 3.86273 | 1 |

TABLE 145
Cancer Type PGNT

| Gene site | imp_sum | imp_mean | n |
|---|---|---|---|
| PTPRN2 | 9.670636 | 0.117935 | 82 |
| PRDM16 | 8.537715 | 0.12025 | 71 |
| PCDHGA1 | 2.847474 | 0.048262 | 59 |
| PCDHGA2 | 2.847474 | 0.049956 | 57 |
| PCDHGA3 | 2.847474 | 0.052731 | 54 |
| PCDHGB1 | 2.847474 | 0.053726 | 53 |
| PCDHGA4 | 2.847474 | 0.055833 | 51 |
| PCDHGB2 | 2.531088 | 0.051655 | 49 |
| PCDHGA5 | 2.214702 | 0.047121 | 47 |
| HDAC4 | 7.100621 | 0.191909 | 37 |
| PAX6 | 4.879341 | 0.13941 | 35 |
| RBFOX3 | 2.850514 | 0.081443 | 35 |
| DIP2C | 5.382506 | 0.168203 | 32 |
| SOX2-OT | 2.240588 | 0.077262 | 29 |
| SHANK2 | 3.518303 | 0.135319 | 26 |
| AGAP1 | 5.469833 | 0.218793 | 25 |
| CAMTA1 | 4.959348 | 0.198374 | 25 |
| MEIS1 | 2.463832 | 0.10266 | 24 |
| RPTOR | 6.32875 | 0.275163 | 23 |
| PRKCZ | 3.144122 | 0.142915 | 22 |
| SKI | 5.674442 | 0.270212 | 21 |
| SIM2 | 2.861346 | 0.136255 | 21 |
| FRMD4A | 5.798668 | 0.289933 | 20 |
| MAD1L1 | 6.815063 | 0.358688 | 19 |
| ZNF423 | 5.541159 | 0.29164 | 19 |
| SMG1P2 | 3.766805 | 0.198253 | 19 |
| BOLA2 | 3.766805 | 0.198253 | 19 |
| LOC613038 | 3.766805 | 0.198253 | 19 |
| SEPTIN9 | 3.855717 | 0.214207 | 18 |
| FOXK1 | 3.789053 | 0.210503 | 18 |
| MCF2L | 2.451037 | 0.136169 | 18 |
| TBC1D16 | 2.251131 | 0.125063 | 18 |
| OPCML | 6.251591 | 0.367741 | 17 |
| TBX15 | 2.563061 | 0.150768 | 17 |
| SORBS2 | 4.230863 | 0.264429 | 16 |
| FOXP1 | 3.326476 | 0.207905 | 16 |
| NAV2 | 2.86515 | 0.179072 | 16 |
| GLI2 | 8.035971 | 0.535731 | 15 |
| ZBTB20 | 2.977912 | 0.198527 | 15 |
| KIRREL3 | 2.341256 | 0.156084 | 15 |
| IQSEC1 | 3.602837 | 0.257345 | 14 |
| CUX1 | 2.624781 | 0.187484 | 14 |
| MYT1L | 3.361744 | 0.258596 | 13 |
| MSI2 | 3.038353 | 0.233719 | 13 |
| RFX4 | 2.731063 | 0.210082 | 13 |
| MIR9-3HG | 2.453844 | 0.188757 | 13 |
| CMIP | 2.524447 | 0.210371 | 12 |
| ADGRD1 | 2.355411 | 0.196284 | 12 |
| MEIS2 | 2.345753 | 0.195479 | 12 |
| MIRLET7BHG | 2.28207 | 0.190173 | 12 |
| RAD51B | 3.396644 | 0.308786 | 11 |
| LBX1-AS1 | 3.297492 | 0.329749 | 10 |
| SH3RF3 | 3.275721 | 0.327572 | 10 |
| BCL11B | 2.919731 | 0.291973 | 10 |
| CHST11 | 2.693586 | 0.269359 | 10 |
| ACOT7 | 2.588561 | 0.258856 | 10 |
| KLHL29 | 2.406422 | 0.240642 | 10 |
| TSPAN4 | 2.280454 | 0.228045 | 10 |
| ATP11A | 3.527614 | 0.391957 | 9 |
| KCNMA1 | 3.421058 | 0.380118 | 9 |
| NOTCH1 | 3.228355 | 0.358706 | 9 |
| SND1 | 2.915387 | 0.323932 | 9 |
| AXIN2 | 2.791748 | 0.310194 | 9 |
| TSPAN9 | 2.749423 | 0.305491 | 9 |
| ASAP1 | 2.576769 | 0.286308 | 9 |
| ADGRB1 | 2.478578 | 0.275398 | 9 |
| KCNH2 | 2.303838 | 0.255982 | 9 |
| BAHCC1 | 3.218199 | 0.402275 | 8 |
| MSRA | 3.205927 | 0.400741 | 8 |
| GRIK2 | 2.896612 | 0.362077 | 8 |
| RORA | 2.826827 | 0.353353 | 8 |
| SYNJ2 | 2.665264 | 0.333158 | 8 |
| RGS20 | 2.654073 | 0.331759 | 8 |
| DNMT3A | 2.543642 | 0.317955 | 8 |
| LINC00311 | 2.510965 | 0.313871 | 8 |
| DPP6 | 2.350778 | 0.293847 | 8 |
| ARHGAP22 | 2.221081 | 0.277635 | 8 |
| DUSP6 | 3.995818 | 0.570831 | 7 |
| NAV1 | 3.539936 | 0.505705 | 7 |
| LINC00461 | 2.956634 | 0.422376 | 7 |
| FBXL18 | 2.998454 | 0.499742 | 6 |
| COQ8A | 2.471408 | 0.411901 | 6 |
| FAM181A | 2.180075 | 0.363346 | 6 |
| CACNA2D3 | 2.170913 | 0.361819 | 6 |
| RUNDC3A | 4.022233 | 0.804447 | 5 |
| TSNAX-DISC1 | 3.170826 | 0.634165 | 5 |
| ARHGEF7 | 2.536285 | 0.507257 | 5 |
| RBMS3 | 2.939999 | 0.735 | 4 |
| LINC00856 | 2.41614 | 0.604035 | 4 |
| DTNA | 2.32145 | 0.580363 | 4 |
| CORO2B | 2.251054 | 0.562763 | 4 |
| DAGLB | 2.701334 | 0.900445 | 3 |
| RGL1 | 2.50912 | 0.836373 | 3 |
| LOXL3 | 2.453125 | 0.817708 | 3 |
| GRIN2B | 2.211003 | 0.737001 | 3 |
| SOX10 | 4.516727 | 2.258363 | 2 |
| CORO1C | 2.939766 | 1.469883 | 2 |
| SLC25A10 | 2.621386 | 1.310693 | 2 |
| SMURF1 | 2.53297 | 1.266485 | 2 |
| DUSP7 | 3.308439 | 3.308439 | 1 |

TABLE 146
Cancer Type PIN_CYT

| Gene site | imp_sum | imp_mean | n |
|---|---|---|---|
| PTPRN2 | 1.741058 | 0.021232 | 82 |
| PRDM16 | 3.334924 | 0.046971 | 71 |
| HDAC4 | 5.936564 | 0.160448 | 37 |
| RBFOX3 | 1.518927 | 0.043398 | 35 |
| GALNT9 | 2.24148 | 0.083018 | 27 |
| CAMTA1 | 3.032036 | 0.121281 | 25 |
| AGAP1 | 2.468052 | 0.098722 | 25 |
| PDGFRA | 1.916142 | 0.076646 | 25 |
| INPP5A | 3.35832 | 0.146014 | 23 |
| RIMBP2 | 2.847474 | 0.123803 | 23 |
| RPTOR | 2.690902 | 0.116996 | 23 |
| NXN | 1.606425 | 0.069845 | 23 |
| PRKCZ | 2.295075 | 0.104322 | 22 |
| SKI | 2.26782 | 0.107991 | 21 |
| SIM2 | 1.479891 | 0.070471 | 21 |
| ABR | 2.010051 | 0.100503 | 20 |
| MAD1L1 | 7.546451 | 0.397182 | 19 |
| SMG1P2 | 2.546606 | 0.134032 | 19 |
| BOLA2 | 2.546606 | 0.134032 | 19 |
| LOC613038 | 2.546606 | 0.134032 | 19 |
| CASZ1 | 1.756619 | 0.092454 | 19 |
| ANKRD11 | 1.688539 | 0.093808 | 18 |
| BAIAP2 | 3.160719 | 0.210715 | 15 |
| GLI2 | 1.781405 | 0.11876 | 15 |
| KNDC1 | 1.753354 | 0.11689 | 15 |
| KIRREL3 | 1.430049 | 0.095337 | 15 |
| CUX1 | 2.227876 | 0.159134 | 14 |
| MIR548F5 | 1.83105 | 0.130789 | 14 |
| IQSEC1 | 1.792469 | 0.128034 | 14 |
| ARHGEF10 | 1.58193 | 0.112995 | 14 |
| MYT1L | 2.873446 | 0.221034 | 13 |
| MSI2 | 2.667305 | 0.205177 | 13 |
| RFX4 | 2.219412 | 0.170724 | 13 |
| GSE1 | 1.898316 | 0.146024 | 13 |
| ZC3H3 | 2.480448 | 0.206704 | 12 |
| CMIP | 2.010323 | 0.167527 | 12 |
| TBCD | 1.497155 | 0.136105 | 11 |
| ACOT7 | 1.987582 | 0.198758 | 10 |
| LBX1-AS1 | 1.898316 | 0.189832 | 10 |
| AUTS2 | 1.756206 | 0.175621 | 10 |
| CHST11 | 1.58193 | 0.158193 | 10 |
| ETS1 | 1.459477 | 0.145948 | 10 |
| SND1 | 4.04963 | 0.449959 | 9 |
| ADAMTS2 | 2.74312 | 0.304791 | 9 |
| MGMT | 2.635724 | 0.292858 | 9 |
| TSPAN9 | 2.101132 | 0.233459 | 9 |
| GPC6 | 2.079566 | 0.231063 | 9 |
| CACNA2D4 | 1.944875 | 0.216097 | 9 |
| AXIN2 | 1.744232 | 0.193804 | 9 |
| ATP11A | 1.715972 | 0.190664 | 9 |
| SSBP3 | 1.468395 | 0.163155 | 9 |
| VRK2 | 2.977551 | 0.372194 | 8 |
| PPP2R2B | 2.61938 | 0.327422 | 8 |
| DNMT3A | 2.384503 | 0.298063 | 8 |
| NR2E1 | 1.935458 | 0.241932 | 8 |
| DLEU1 | 1.926288 | 0.240786 | 8 |
| MCIDAS | 1.619196 | 0.202399 | 8 |
| AFF3 | 1.575851 | 0.196981 | 8 |
| NAV1 | 2.3868 | 0.340971 | 7 |
| MIR548H4 | 1.755887 | 0.250841 | 7 |
| LDLRAD4 | 1.680758 | 0.240108 | 7 |
| NRG1 | 1.569307 | 0.224187 | 7 |
| PACRG | 1.542894 | 0.220413 | 7 |
| TRAK1 | 2.55303 | 0.425505 | 6 |
| CRADD | 2.177719 | 0.362953 | 6 |
| CCDC85C | 1.924137 | 0.32069 | 6 |
| PRKCE | 1.78586 | 0.297643 | 6 |
| HIVEP3 | 1.765887 | 0.294315 | 6 |
| FBXL18 | 1.574633 | 0.262439 | 6 |
| STK24 | 1.44151 | 0.240252 | 6 |
| TSNAX-DISC1 | 3.510266 | 0.702053 | 5 |
| VAV2 | 2.269564 | 0.453913 | 5 |
| SNX29 | 1.787393 | 0.357479 | 5 |
| SCOC | 1.782484 | 0.356497 | 5 |
| ARHGEF7 | 1.750087 | 0.350017 | 5 |
| SDK2 | 1.669768 | 0.333954 | 5 |
| BCAR1 | 1.634295 | 0.326859 | 5 |
| PARD3 | 1.515853 | 0.303171 | 5 |
| EXT1 | 2.145258 | 0.536314 | 4 |
| EML1 | 1.453677 | 0.363419 | 4 |
| DAGLB | 2.341444 | 0.780481 | 3 |
| SLC25A22 | 1.992387 | 0.664129 | 3 |
| LOC339874 | 1.933398 | 0.644466 | 3 |
| BFSP2 | 1.802792 | 0.600931 | 3 |
| CHTF18 | 3.607335 | 1.803668 | 2 |
| TRIM65 | 2.240251 | 1.120126 | 2 |
| UHRF1 | 1.879138 | 0.939569 | 2 |
| DISC1 | 1.837896 | 0.918948 | 2 |
| ERI3 | 1.784265 | 0.892132 | 2 |
| KIF21B | 1.741481 | 0.87074 | 2 |
| SLC25A10 | 1.56997 | 0.784985 | 2 |
| KCNV2 | 2.351678 | 2.351678 | 1 |
| ARL6IP6 | 2.349183 | 2.349183 | 1 |
| DNAJC27 | 2.020613 | 2.020613 | 1 |
| DDT | 1.965552 | 1.965552 | 1 |
| GTF2E2 | 1.722938 | 1.722938 | 1 |
| DLG4 | 1.600331 | 1.600331 | 1 |
| SMAGP | 1.589762 | 1.589762 | 1 |
| CAMK4 | 1.487366 | 1.487366 | 1 |
| CPEB4 | 1.450927 | 1.450927 | 1 |

TABLE 147
Cancer Type PIN_RB

| Gene site | imp_sum | imp_mean | n |
|---|---|---|---|
| PTPRN2 | 6.807633 | 0.08302 | 82 |
| PRDM16 | 8.820872 | 0.124238 | 71 |
| PCDHGA1 | 3.070622 | 0.052044 | 59 |
| PCDHGA2 | 3.070622 | 0.053871 | 57 |
| PCDHGA3 | 3.070622 | 0.056863 | 54 |
| PCDHGB1 | 2.754236 | 0.051967 | 53 |
| PCDHGA4 | 2.754236 | 0.054005 | 51 |
| PCDHGB2 | 2.754236 | 0.056209 | 49 |
| HDAC4 | 10.06115 | 0.271923 | 37 |
| PCDHGA7 | 2.754236 | 0.074439 | 37 |
| RBFOX3 | 7.194733 | 0.205564 | 35 |
| PAX6 | 4.643137 | 0.132661 | 35 |
| PCDHGB4 | 2.754236 | 0.078692 | 35 |
| PCDHGA8 | 2.754236 | 0.078692 | 35 |
| DIP2C | 5.631461 | 0.175983 | 32 |
| PCDHGB5 | 2.754236 | 0.08607 | 32 |
| PCDHGA9 | 2.754236 | 0.088846 | 31 |
| GALNT9 | 4.351717 | 0.161175 | 27 |
| SHANK2 | 2.77855 | 0.106867 | 26 |
| AGAP1 | 7.896254 | 0.31585 | 25 |
| CAMTA1 | 5.377977 | 0.215119 | 25 |
| RPTOR | 7.070887 | 0.30743 | 23 |
| NXN | 6.481997 | 0.281826 | 23 |
| INPP5A | 6.462468 | 0.280977 | 23 |
| NCOR2 | 4.823809 | 0.209731 | 23 |
| HOXB3 | 3.182751 | 0.13838 | 23 |
| PRKCZ | 4.531267 | 0.205967 | 22 |
| SKI | 5.140933 | 0.244806 | 21 |
| MAD1L1 | 11.37283 | 0.59857 | 19 |
| KCNQ1 | 4.609785 | 0.24262 | 19 |
| CASZ1 | 4.242069 | 0.223267 | 19 |
| CFAP46 | 3.058498 | 0.160974 | 19 |
| SEPTIN9 | 4.156349 | 0.230908 | 18 |
| TBC1D16 | 4.078198 | 0.226567 | 18 |
| FOXK1 | 3.599246 | 0.199958 | 18 |
| RBFOX1 | 2.905804 | 0.161434 | 18 |
| TBX15 | 3.849284 | 0.226428 | 17 |
| PAX6-AS1 | 3.403635 | 0.200214 | 17 |
| RCN1 | 3.403635 | 0.200214 | 17 |
| HBG2 | 3.055271 | 0.179722 | 17 |
| FOXP1 | 5.64517 | 0.352823 | 16 |
| GLI2 | 3.31874 | 0.221249 | 15 |
| ZBTB20 | 2.717999 | 0.1812 | 15 |
| MOB2 | 3.821702 | 0.272979 | 14 |
| C7orf50 | 3.812754 | 0.27234 | 14 |
| CUX1 | 3.309291 | 0.236378 | 14 |
| MYT1L | 5.914172 | 0.454936 | 13 |
| MSI2 | 5.606145 | 0.431242 | 13 |
| GSE1 | 3.507548 | 0.269811 | 13 |
| RFX4 | 3.292323 | 0.253256 | 13 |
| HOXC4 | 3.167416 | 0.243647 | 13 |
| FBRSL1 | 3.437212 | 0.286434 | 12 |
| ZC3H3 | 2.976908 | 0.248076 | 12 |
| ADGRD1 | 2.819879 | 0.23499 | 12 |
| VGLLA | 3.617583 | 0.328871 | 11 |
| CTBP2 | 3.607351 | 0.327941 | 11 |
| RAD51B | 3.084489 | 0.280408 | 11 |
| AUTS2 | 3.876295 | 0.38763 | 10 |
| AKAP13 | 3.807734 | 0.380773 | 10 |
| LBX1-AS1 | 3.365908 | 0.336591 | 10 |
| ANKS1B | 3.045053 | 0.304505 | 10 |
| ETS1 | 2.974553 | 0.297455 | 10 |
| KLHL29 | 2.870455 | 0.287046 | 10 |
| ACOT7 | 2.7672 | 0.27672 | 10 |
| SH3RF3 | 2.758512 | 0.275851 | 10 |
| SND1 | 6.161496 | 0.684611 | 9 |
| ADAMTS2 | 5.206113 | 0.578457 | 9 |
| ATP11A | 4.405099 | 0.489455 | 9 |
| TSPAN9 | 4.084057 | 0.453784 | 9 |
| CACNA2D4 | 3.871799 | 0.4302 | 9 |
| AXIN2 | 3.679095 | 0.408788 | 9 |
| GPC6 | 2.841096 | 0.315677 | 9 |
| TRAPPC12 | 2.810486 | 0.312276 | 9 |
| PACS2 | 2.7717 | 0.307967 | 9 |
| VRK2 | 5.571942 | 0.696493 | 8 |
| PPP2R2B | 4.519998 | 0.565 | 8 |
| MSRA | 3.153244 | 0.394156 | 8 |
| LHX4 | 3.040615 | 0.380077 | 8 |
| DNMT3A | 2.998912 | 0.374864 | 8 |
| ASPSCR1 | 2.759335 | 0.344917 | 8 |
| PITPNC1 | 3.392984 | 0.484712 | 7 |
| VPS13D | 3.215465 | 0.459352 | 7 |
| MIR548H4 | 2.873085 | 0.410441 | 7 |
| NAV1 | 2.784796 | 0.397828 | 7 |
| TRAK1 | 2.702981 | 0.450497 | 6 |
| TSNAX-DISC1 | 4.436183 | 0.887237 | 5 |
| ARHGEF7 | 3.758143 | 0.751629 | 5 |
| SDK2 | 3.042551 | 0.60851 | 5 |
| CPEB1-AS1 | 2.902565 | 0.580513 | 5 |
| GSG1 | 3.067506 | 0.766877 | 4 |
| EXT1 | 2.905124 | 0.726281 | 4 |
| CCDC167 | 2.885096 | 0.961699 | 3 |
| DAGLB | 2.788926 | 0.929642 | 3 |
| CHTF18 | 4.526632 | 2.263316 | 2 |
| UHRF1 | 2.829708 | 1.414854 | 2 |
| TRIM65 | 2.721111 | 1.360556 | 2 |
| ANKLE2 | 2.696564 | 1.348282 | 2 |
| KCNV2 | 3.041097 | 3.041097 | 1 |
| DDT | 2.931778 | 2.931778 | 1 |
| ARL6IP6 | 2.85111 | 2.85111 | 1 |

TABLE 148
Cancer Type PITAD_ACTH

| Gene site | imp_sum | imp_mean | n |
|---|---|---|---|
| PTPRN2 | 19.17421 | 0.233832 | 82 |
| PRDM16 | 9.122084 | 0.12848 | 71 |
| PCDHGA1 | 5.542064 | 0.093933 | 59 |
| PCDHGA2 | 5.138416 | 0.090148 | 57 |
| PCDHGA3 | 4.82203 | 0.089297 | 54 |
| PCDHGB1 | 4.505644 | 0.085012 | 53 |
| PCDHGA4 | 3.741984 | 0.073372 | 51 |
| PCDHGB2 | 3.741984 | 0.076367 | 49 |
| PCDHGA5 | 3.425598 | 0.072885 | 47 |
| PCDHGB3 | 3.425598 | 0.079665 | 43 |
| PCDHGA6 | 3.741984 | 0.09355 | 40 |
| HDAC4 | 12.09289 | 0.326835 | 37 |
| PCDHGA7 | 3.425598 | 0.092584 | 37 |
| PAX6 | 10.45792 | 0.298798 | 35 |
| RBFOX3 | 7.596219 | 0.217035 | 35 |
| PCDHGB4 | 3.425598 | 0.097874 | 35 |
| PCDHGA8 | 3.425598 | 0.097874 | 35 |
| DIP2C | 6.007771 | 0.187743 | 32 |
| PCDHGB5 | 3.425598 | 0.10705 | 32 |
| GALNT9 | 3.861279 | 0.14301 | 27 |
| SHANK2 | 6.779732 | 0.260759 | 26 |
| ADARB2 | 3.476029 | 0.133693 | 26 |
| AGAP1 | 11.98423 | 0.479369 | 25 |
| CAMTA1 | 7.135416 | 0.285417 | 25 |
| PDGFRA | 4.281752 | 0.17127 | 25 |
| MEIS1 | 3.580472 | 0.149186 | 24 |
| RPTOR | 12.00629 | 0.522013 | 23 |
| NCOR2 | 5.886835 | 0.255949 | 23 |
| RIMBP2 | 5.040982 | 0.219173 | 23 |
| INPP5A | 4.731128 | 0.205701 | 23 |
| NXN | 4.077344 | 0.177276 | 23 |
| HOXB3 | 3.719388 | 0.161713 | 23 |
| PRKCZ | 5.345998 | 0.243 | 22 |
| SKI | 7.127028 | 0.339382 | 21 |
| SDK1 | 6.179441 | 0.308972 | 20 |
| MAD1L1 | 12.31632 | 0.648227 | 19 |
| CASZ1 | 5.175372 | 0.272388 | 19 |
| SMG1P2 | 4.984239 | 0.262328 | 19 |
| BOLA2 | 4.984239 | 0.262328 | 19 |
| LOC613038 | 4.984239 | 0.262328 | 19 |
| KCNQ1 | 4.91896 | 0.258893 | 19 |
| ZNF423 | 3.344899 | 0.176047 | 19 |
| FOXK1 | 7.797997 | 0.433222 | 18 |
| MCF2L | 5.436094 | 0.302005 | 18 |
| TBC1D16 | 5.1288 | 0.284933 | 18 |
| ANKRD11 | 4.182539 | 0.232363 | 18 |
| OPCML | 6.113981 | 0.359646 | 17 |
| PAX6-AS1 | 4.225622 | 0.248566 | 17 |
| RCN1 | 4.225622 | 0.248566 | 17 |
| HBG2 | 4.047264 | 0.238074 | 17 |
| FOXP1 | 7.553211 | 0.472076 | 16 |
| GLI2 | 3.75433 | 0.250289 | 15 |
| BAIAP2 | 3.658439 | 0.243896 | 15 |
| CUX1 | 6.189493 | 0.442107 | 14 |
| IQSEC1 | 5.463401 | 0.390243 | 14 |
| PRKAG2 | 5.378718 | 0.384194 | 14 |
| RPS6KA2 | 4.50413 | 0.321724 | 14 |
| C7orf50 | 3.729526 | 0.266395 | 14 |
| MIR548F5 | 3.263675 | 0.23312 | 14 |
| GSE1 | 5.168568 | 0.397582 | 13 |
| MSI2 | 4.73444 | 0.364188 | 13 |
| MYT1L | 3.517965 | 0.270613 | 13 |
| CMIP | 6.7903 | 0.565858 | 12 |
| FBRSL1 | 5.656115 | 0.471343 | 12 |
| GNA12 | 4.95367 | 0.412806 | 12 |
| ZC3H3 | 4.462214 | 0.371851 | 12 |
| TNS3 | 4.14463 | 0.345386 | 12 |
| ADGRD1 | 3.764111 | 0.313676 | 12 |
| CTNNA2 | 3.461448 | 0.288454 | 12 |
| CACNA1C | 4.810843 | 0.437349 | 11 |
| AKAP13 | 4.99846 | 0.499846 | 10 |
| ACOT7 | 4.708338 | 0.470834 | 10 |
| TP73 | 3.68141 | 0.368141 | 10 |
| MAML2 | 3.65158 | 0.365158 | 10 |
| CHST11 | 3.513526 | 0.351353 | 10 |
| RGS12 | 3.455723 | 0.345572 | 10 |
| TSPAN4 | 3.341946 | 0.334195 | 10 |
| STK32C | 3.235654 | 0.323565 | 10 |
| SND1 | 7.617901 | 0.846433 | 9 |
| ATP11A | 7.281694 | 0.809077 | 9 |
| ADAMTS2 | 4.790399 | 0.532267 | 9 |
| SSBP3 | 3.831948 | 0.425772 | 9 |
| TSPAN9 | 3.532304 | 0.392478 | 9 |
| CPNE4 | 3.276085 | 0.364009 | 9 |
| SYNJ2 | 3.941616 | 0.492702 | 8 |
| VRK2 | 3.743569 | 0.467946 | 8 |
| DNMT3A | 3.547929 | 0.443491 | 8 |
| TRAPPC9 | 3.488493 | 0.436062 | 8 |
| MSRA | 3.329945 | 0.416243 | 8 |
| NAV1 | 4.903574 | 0.700511 | 7 |
| C19orf25 | 4.106974 | 0.586711 | 7 |
| ITPK1 | 3.776112 | 0.539445 | 7 |
| GAK | 3.584731 | 0.512104 | 7 |
| SLC22A18AS | 3.579437 | 0.596573 | 6 |
| COQ8A | 3.330149 | 0.555025 | 6 |
| FBXL18 | 3.249672 | 0.541612 | 6 |
| ARHGEF7 | 3.920434 | 0.784087 | 5 |
| AP2A2 | 3.275345 | 0.655069 | 5 |
| DAGLB | 3.283237 | 1.094412 | 3 |
| CHTF18 | 3.458887 | 1.729444 | 2 |

TABLE 149
Cancer Type PITAD_GON

| Gene site | imp_sum | imp_mean | n |
|---|---|---|---|
| PTPRN2 | 15.85732 | 0.193382 | 82 |
| PRDM16 | 12.4923 | 0.175948 | 71 |
| PCDHGA1 | 3.525377 | 0.059752 | 59 |
| PCDHGA2 | 3.525377 | 0.061849 | 57 |
| PCDHGA3 | 3.841763 | 0.071144 | 54 |
| PCDHGB1 | 3.525377 | 0.066517 | 53 |
| PCDHGA4 | 3.525377 | 0.069125 | 51 |
| PCDHGA5 | 3.525377 | 0.075008 | 47 |
| PCDHGB3 | 3.525377 | 0.081986 | 43 |
| PCDHGA6 | 3.525377 | 0.088134 | 40 |
| HDAC4 | 13.45165 | 0.363558 | 37 |
| PAX6 | 7.585868 | 0.216739 | 35 |
| RBFOX3 | 6.519025 | 0.186258 | 35 |
| DIP2C | 9.028569 | 0.282143 | 32 |
| GALNT9 | 6.832147 | 0.253042 | 27 |
| SHANK2 | 5.430148 | 0.208852 | 26 |
| ADARB2 | 3.809447 | 0.146517 | 26 |
| AGAP1 | 11.92867 | 0.477147 | 25 |
| CAMTA1 | 6.389659 | 0.255586 | 25 |
| RPTOR | 12.3548 | 0.537165 | 23 |
| NCOR2 | 7.588369 | 0.329929 | 23 |
| NXN | 7.13107 | 0.310047 | 23 |
| INPP5A | 5.005737 | 0.217641 | 23 |
| RIMBP2 | 4.987523 | 0.216849 | 23 |
| PRKCZ | 6.175028 | 0.280683 | 22 |
| SKI | 9.224385 | 0.439256 | 21 |
| SDK1 | 5.625445 | 0.281272 | 20 |
| ABR | 4.106215 | 0.205311 | 20 |
| FRMD4A | 3.90104 | 0.195052 | 20 |
| MAD1L1 | 12.00363 | 0.63177 | 19 |
| CASZ1 | 6.659107 | 0.350479 | 19 |
| SMG1P2 | 4.54033 | 0.238965 | 19 |
| BOLA2 | 4.54033 | 0.238965 | 19 |
| LOC613038 | 4.54033 | 0.238965 | 19 |
| KCNQ1 | 4.009293 | 0.211015 | 19 |
| ZNF423 | 3.732505 | 0.196448 | 19 |
| FOXK1 | 7.302009 | 0.405667 | 18 |
| ANKRD11 | 5.736872 | 0.318715 | 18 |
| SEPTIN9 | 4.774176 | 0.265232 | 18 |
| TBC1D16 | 3.603049 | 0.200169 | 18 |
| MCF2L | 3.522413 | 0.19569 | 18 |
| FOXP1 | 6.732947 | 0.420809 | 16 |
| NAV2 | 5.31472 | 0.33217 | 16 |
| KIRREL3 | 5.025011 | 0.335001 | 15 |
| GLI2 | 4.239524 | 0.282635 | 15 |
| NFIX | 3.86524 | 0.257683 | 15 |
| ZBTB20 | 3.610608 | 0.240707 | 15 |
| RPS6KA2 | 6.927184 | 0.494799 | 14 |
| PRKAG2 | 5.894677 | 0.421048 | 14 |
| CUX1 | 4.79929 | 0.342806 | 14 |
| C7orf50 | 4.465788 | 0.318985 | 14 |
| MSI2 | 6.420891 | 0.493915 | 13 |
| GSE1 | 4.474357 | 0.344181 | 13 |
| MYT1L | 3.477324 | 0.267486 | 13 |
| CMIP | 6.222363 | 0.51853 | 12 |
| ZC3H3 | 4.932071 | 0.411006 | 12 |
| FBRSL1 | 4.480177 | 0.373348 | 12 |
| GNA12 | 4.310212 | 0.359184 | 12 |
| ADGRD1 | 4.306251 | 0.358854 | 12 |
| MIRLET7BHG | 3.922727 | 0.326894 | 12 |
| TNS3 | 3.742759 | 0.311897 | 12 |
| MAML3 | 3.663325 | 0.305277 | 12 |
| CTBP2 | 4.493697 | 0.408518 | 11 |
| RAD51B | 3.947974 | 0.358907 | 11 |
| AKAP13 | 5.092606 | 0.509261 | 10 |
| TSPAN4 | 4.565719 | 0.456572 | 10 |
| ACOT7 | 4.106723 | 0.410672 | 10 |
| CHST11 | 3.920325 | 0.392032 | 10 |
| SND1 | 6.453557 | 0.717062 | 9 |
| ATP11A | 6.421095 | 0.713455 | 9 |
| ADAMTS2 | 5.474662 | 0.608296 | 9 |
| CACNA2D4 | 4.585301 | 0.509478 | 9 |
| TRAPPC12 | 4.327882 | 0.480876 | 9 |
| KCNH2 | 3.714634 | 0.412737 | 9 |
| AXIN2 | 3.553005 | 0.394778 | 9 |
| ASAP1 | 3.381626 | 0.375736 | 9 |
| VRK2 | 5.230801 | 0.65385 | 8 |
| SYNJ2 | 4.191457 | 0.523932 | 8 |
| MSRA | 4.182854 | 0.522857 | 8 |
| PPP2R2B | 4.044417 | 0.505552 | 8 |
| LINC00311 | 3.788514 | 0.473564 | 8 |
| AFF3 | 3.6804 | 0.46005 | 8 |
| MACROD1 | 3.556003 | 0.4445 | 8 |
| DNMT3A | 3.45295 | 0.431619 | 8 |
| VPS13D | 4.166295 | 0.595185 | 7 |
| MIR548H4 | 3.94891 | 0.56413 | 7 |
| GAK | 3.462955 | 0.494708 | 7 |
| NAV1 | 3.447503 | 0.4925 | 7 |
| RXRA | 3.371265 | 0.481609 | 7 |
| CRADD | 5.277152 | 0.879525 | 6 |
| FBXL18 | 4.201993 | 0.700332 | 6 |
| SLC22A18AS | 3.40043 | 0.566738 | 6 |
| TSNAX-DISC1 | 5.18505 | 1.03701 | 5 |
| ARHGEF7 | 4.85859 | 0.971718 | 5 |
| AP2A2 | 4.302334 | 0.860467 | 5 |
| RUNDC3A | 4.192518 | 0.838504 | 5 |
| FAM53B | 3.451051 | 0.69021 | 5 |
| DENND2B | 3.757544 | 0.939386 | 4 |
| CHTF18 | 3.908401 | 1.954201 | 2 |
| ANKLE2 | 3.602716 | 1.801358 | 2 |

TABLE 150
Cancer Type PITAD_PRL

| Gene site | imp_sum | imp_mean | n |
|---|---|---|---|
| PTPRN2 | 10.92341 | 0.133212 | 82 |
| PRDM16 | 17.84186 | 0.251294 | 71 |
| PCDHGA1 | 2.870937 | 0.04866 | 59 |
| PCDHGA2 | 3.480246 | 0.061057 | 57 |
| PCDHGA3 | 3.16386 | 0.05859 | 54 |
| PCDHGB1 | 3.16386 | 0.059695 | 53 |
| PCDHGA4 | 3.16386 | 0.062036 | 51 |
| PCDHGB2 | 3.16386 | 0.064569 | 49 |
| PCDHGA5 | 3.16386 | 0.067316 | 47 |
| PCDHGB3 | 2.531088 | 0.058863 | 43 |
| HDAC4 | 9.680024 | 0.261622 | 37 |
| PCDHGA7 | 2.531088 | 0.068408 | 37 |
| RBFOX3 | 9.268066 | 0.264802 | 35 |
| PAX6 | 4.731554 | 0.135187 | 35 |
| DIP2C | 4.837681 | 0.151178 | 32 |
| GALNT9 | 3.34937 | 0.124051 | 27 |
| ADARB2 | 4.48861 | 0.172639 | 26 |
| SHANK2 | 3.848093 | 0.148004 | 26 |
| AGAP1 | 6.120262 | 0.24481 | 25 |
| CAMTA1 | 5.518994 | 0.22076 | 25 |
| RPTOR | 8.079101 | 0.351265 | 23 |
| NCOR2 | 5.196516 | 0.225935 | 23 |
| NXN | 4.64885 | 0.202124 | 23 |
| INPP5A | 3.51989 | 0.153039 | 23 |
| RIMBP2 | 3.375559 | 0.146763 | 23 |
| PCDHGA11 | 2.531088 | 0.110047 | 23 |
| PRKCZ | 6.614886 | 0.300677 | 22 |
| SKI | 7.920704 | 0.377176 | 21 |
| SDK1 | 6.738556 | 0.336928 | 20 |
| FRMD4A | 4.832466 | 0.241623 | 20 |
| ABR | 3.304098 | 0.165205 | 20 |
| MAD1L1 | 9.049154 | 0.476271 | 19 |
| CFAP46 | 3.751009 | 0.197422 | 19 |
| KCNQ1 | 3.581092 | 0.188479 | 19 |
| SMG1P2 | 2.951013 | 0.155316 | 19 |
| BOLA2 | 2.951013 | 0.155316 | 19 |
| LOC613038 | 2.951013 | 0.155316 | 19 |
| FOXK1 | 6.068214 | 0.337123 | 18 |
| ANKRD11 | 3.188781 | 0.177154 | 18 |
| OPCML | 4.582781 | 0.269575 | 17 |
| FOXP1 | 5.549672 | 0.346855 | 16 |
| EBF3 | 3.280538 | 0.205034 | 16 |
| NAV2 | 3.09908 | 0.193693 | 16 |
| GLI2 | 4.199646 | 0.279976 | 15 |
| ZBTB20 | 3.087348 | 0.205823 | 15 |
| KIRREL3 | 3.044419 | 0.202961 | 15 |
| ARHGEF10 | 4.468218 | 0.319158 | 14 |
| CUX1 | 3.573829 | 0.255273 | 14 |
| PRKAG2 | 2.858734 | 0.204195 | 14 |
| RPS6KA2 | 2.641252 | 0.188661 | 14 |
| RFX4 | 3.881895 | 0.298607 | 13 |
| GSE1 | 2.848839 | 0.219141 | 13 |
| TNS3 | 4.855949 | 0.404662 | 12 |
| CMIP | 4.550525 | 0.37921 | 12 |
| FBRSL1 | 3.956517 | 0.32971 | 12 |
| ZC3H3 | 3.604721 | 0.300393 | 12 |
| ADGRD1 | 2.568643 | 0.214054 | 12 |
| SLC38A10 | 3.41188 | 0.310171 | 11 |
| RAD51B | 3.317418 | 0.301583 | 11 |
| CACNA1C | 3.123701 | 0.283973 | 11 |
| TBCD | 2.849245 | 0.259022 | 11 |
| AKAP13 | 3.419932 | 0.341993 | 10 |
| CHST11 | 3.350029 | 0.335003 | 10 |
| KLHL29 | 3.337935 | 0.333793 | 10 |
| ACOT7 | 2.874701 | 0.28747 | 10 |
| TSPAN4 | 2.770126 | 0.277013 | 10 |
| NBEA | 2.651581 | 0.265158 | 10 |
| KCNH2 | 5.639847 | 0.62665 | 9 |
| ATP11A | 4.264072 | 0.473786 | 9 |
| KAZN | 3.524144 | 0.391572 | 9 |
| SND1 | 3.523703 | 0.391523 | 9 |
| AXIN2 | 3.172624 | 0.352514 | 9 |
| TSPAN9 | 2.975484 | 0.330609 | 9 |
| CACNA2D4 | 2.82727 | 0.314141 | 9 |
| PRDM8 | 5.089011 | 0.636126 | 8 |
| TRAPPC9 | 3.2271 | 0.403387 | 8 |
| SYNJ2 | 3.139206 | 0.392401 | 8 |
| AFF3 | 2.851203 | 0.3564 | 8 |
| TENM2 | 2.744674 | 0.343084 | 8 |
| VRK2 | 2.73707 | 0.342134 | 8 |
| CDH4 | 2.54359 | 0.317949 | 8 |
| GAK | 3.126348 | 0.446621 | 7 |
| RXRA | 3.028493 | 0.432642 | 7 |
| BTBD11 | 2.810303 | 0.401472 | 7 |
| NAV1 | 2.770524 | 0.395789 | 7 |
| MYO16 | 3.435703 | 0.572617 | 6 |
| FBXL18 | 3.395152 | 0.565859 | 6 |
| CRADD | 2.952569 | 0.492095 | 6 |
| C10orf90 | 2.779358 | 0.463226 | 6 |
| ANKS1A | 2.620006 | 0.436668 | 6 |
| TSNAX-DISC1 | 3.402578 | 0.680516 | 5 |
| ARHGEF7 | 3.189843 | 0.637969 | 5 |
| AP2A2 | 2.800656 | 0.560131 | 5 |
| NPHP4 | 2.718223 | 0.543645 | 5 |
| BCAR1 | 2.691854 | 0.538371 | 5 |
| STON1- | 2.564437 | 0.512887 | 5 |
| GTF2A1L | | | |
| GSG1 | 2.88867 | 0.722167 | 4 |
| DICER1 | 2.718233 | 0.906078 | 3 |
| ERI3 | 2.857462 | 1.428731 | 2 |
| SLC25A10 | 2.623878 | 1.311939 | 2 |

TABLE 151
Cancer Type PITAD_STH_DENSE1

| Gene site | imp_sum | imp_mean | n |
|---|---|---|---|
| PTPRN2 | 10.27842 | 0.125347 | 82 |
| PRDM16 | 11.33441 | 0.15964 | 71 |
| HDAC4 | 12.51061 | 0.338124 | 37 |
| RBFOX3 | 10.33693 | 0.295341 | 35 |
| PAX6 | 7.931791 | 0.226623 | 35 |
| DIP2C | 4.742445 | 0.148201 | 32 |
| SOX2-OT | 3.740453 | 0.128981 | 29 |
| GALNT9 | 2.654267 | 0.098306 | 27 |
| SHANK2 | 6.240972 | 0.240037 | 26 |
| ADARB2 | 2.548463 | 0.098018 | 26 |
| AGAP1 | 6.683091 | 0.267324 | 25 |
| CAMTA1 | 4.304365 | 0.172175 | 25 |
| PDGFRA | 2.864174 | 0.114567 | 25 |
| SATB2 | 2.826366 | 0.117765 | 24 |
| RPTOR | 6.468808 | 0.281253 | 23 |
| NXN | 4.209588 | 0.183026 | 23 |
| NCOR2 | 4.094608 | 0.178026 | 23 |
| INPP5A | 2.309147 | 0.100398 | 23 |
| PRKCZ | 3.7406 | 0.170027 | 22 |
| SKI | 5.727075 | 0.272718 | 21 |
| SDK1 | 5.562399 | 0.27812 | 20 |
| ABR | 5.144643 | 0.257232 | 20 |
| FRMD4A | 2.272281 | 0.113614 | 20 |
| MAD1L1 | 7.497513 | 0.394606 | 19 |
| CFAP46 | 2.668222 | 0.140433 | 19 |
| CASZ1 | 2.446375 | 0.128757 | 19 |
| TBC1D16 | 2.486189 | 0.138122 | 18 |
| MCF2L | 2.353362 | 0.130742 | 18 |
| HBG2 | 2.993198 | 0.17607 | 17 |
| OPCML | 2.840465 | 0.167086 | 17 |
| FOXP1 | 2.89223 | 0.180764 | 16 |
| NAV2 | 2.421048 | 0.151316 | 16 |
| BAIAP2 | 4.257113 | 0.283808 | 15 |
| GLI2 | 3.74488 | 0.249659 | 15 |
| LRMDA | 3.245548 | 0.21637 | 15 |
| KNDC1 | 2.746169 | 0.183078 | 15 |
| ARHGEF10 | 3.637593 | 0.259828 | 14 |
| CUX1 | 3.39947 | 0.242819 | 14 |
| IQSEC1 | 2.79111 | 0.199365 | 14 |
| MIR548F5 | 2.63285 | 0.188061 | 14 |
| CACNA1H | 2.559313 | 0.182808 | 14 |
| GNG7 | 2.308896 | 0.164921 | 14 |
| RPS6KA2 | 2.262334 | 0.161595 | 14 |
| MSI2 | 4.443542 | 0.341811 | 13 |
| RFX4 | 3.866979 | 0.29746 | 13 |
| GSE1 | 3.189499 | 0.245346 | 13 |
| CMIP | 4.92255 | 0.410213 | 12 |
| FBRSL1 | 3.633172 | 0.302764 | 12 |
| TNS3 | 3.298056 | 0.274838 | 12 |
| ZC3H3 | 2.913897 | 0.242825 | 12 |
| MEGF6 | 2.726935 | 0.227245 | 12 |
| ADGRD1 | 2.691479 | 0.22429 | 12 |
| CTNNA2 | 2.554934 | 0.212911 | 12 |
| GNA12 | 2.465474 | 0.205456 | 12 |
| CTBP2 | 3.160477 | 0.287316 | 11 |
| TSPAN4 | 3.575588 | 0.357559 | 10 |
| TP73 | 2.661734 | 0.266173 | 10 |
| LMF1 | 2.552461 | 0.255246 | 10 |
| RGS12 | 2.538724 | 0.253872 | 10 |
| BCL11B | 2.524088 | 0.252409 | 10 |
| ACOT7 | 2.448677 | 0.244868 | 10 |
| TRAPPC12 | 4.772877 | 0.53032 | 9 |
| ATP11A | 4.469811 | 0.496646 | 9 |
| CACNA2D4 | 4.395031 | 0.488337 | 9 |
| KCNH2 | 4.206333 | 0.46737 | 9 |
| KAZN | 3.652715 | 0.405857 | 9 |
| ADAMTS2 | 3.514329 | 0.390481 | 9 |
| SND1 | 3.276925 | 0.364103 | 9 |
| PRDM8 | 5.748341 | 0.718543 | 8 |
| MSRA | 3.95826 | 0.494783 | 8 |
| AFF3 | 3.37929 | 0.422411 | 8 |
| TRAPPC9 | 3.052095 | 0.381512 | 8 |
| DNMT3A | 2.812413 | 0.351552 | 8 |
| MACROD1 | 2.75926 | 0.344908 | 8 |
| PPP2R2B | 2.59441 | 0.324301 | 8 |
| VRK2 | 2.574109 | 0.321764 | 8 |
| CELF4 | 2.360714 | 0.295089 | 8 |
| RXRA | 2.621084 | 0.374441 | 7 |
| LHPP | 2.36559 | 0.337941 | 7 |
| ITPKB | 2.339152 | 0.334165 | 7 |
| CRADD | 3.538289 | 0.589715 | 6 |
| FBXL18 | 3.002949 | 0.500492 | 6 |
| C10orf90 | 2.578042 | 0.429674 | 6 |
| GRK5 | 2.534788 | 0.422465 | 6 |
| TRAK1 | 2.488331 | 0.414722 | 6 |
| TSNAX-DISC1 | 3.761812 | 0.752362 | 5 |
| TEAD1 | 2.984378 | 0.596876 | 5 |
| AP2A2 | 2.937556 | 0.587511 | 5 |
| VAV2 | 2.282187 | 0.456437 | 5 |
| GSG1 | 2.90875 | 0.727187 | 4 |
| SCG5 | 2.765914 | 0.691479 | 4 |
| LINC00856 | 2.394591 | 0.598648 | 4 |
| DAGLB | 3.118583 | 1.039528 | 3 |
| GNAS | 2.364452 | 0.788151 | 3 |
| TRIM65 | 2.832082 | 1.416041 | 2 |
| ERI3 | 2.578356 | 1.289178 | 2 |
| GALK2 | 2.572375 | 1.286187 | 2 |
| SLC25A10 | 2.480457 | 1.240229 | 2 |
| CACNA1D | 2.393238 | 1.196619 | 2 |
| DISC1 | 2.322679 | 1.16134 | 2 |

TABLE 152
Cancer Type PITAD_STH_DENSE2

| Gene site | imp_sum | imp_mean | n |
|---|---|---|---|
| PTPRN2 | 15.26347 | 0.18614 | 82 |
| PRDM16 | 18.99297 | 0.267507 | 71 |
| PCDHGA1 | 7.882026 | 0.133594 | 59 |
| PCDHGA2 | 7.437325 | 0.130479 | 57 |
| PCDHGA3 | 6.804553 | 0.12601 | 54 |
| PCDHGB1 | 6.804553 | 0.128388 | 53 |
| PCDHGA4 | 6.804553 | 0.133423 | 51 |
| PCDHGB2 | 6.488167 | 0.132412 | 49 |
| PCDHGA5 | 6.171781 | 0.131314 | 47 |
| PCDHGB3 | 5.539009 | 0.128814 | 43 |
| PCDHGA6 | 4.458758 | 0.111469 | 40 |
| HDAC4 | 14.43817 | 0.390221 | 37 |
| PCDHGA7 | 4.458758 | 0.120507 | 37 |
| RBFOX3 | 9.902052 | 0.282916 | 35 |
| PAX6 | 7.951795 | 0.227194 | 35 |
| PCDHGB4 | 4.142372 | 0.118353 | 35 |
| PCDHGA8 | 4.142372 | 0.118353 | 35 |
| DIP2C | 5.458819 | 0.170588 | 32 |
| PCDHGB5 | 4.775144 | 0.149223 | 32 |
| PCDHGA9 | 4.277945 | 0.137998 | 31 |
| PCDHGB6 | 4.594331 | 0.158425 | 29 |
| SOX2-OT | 4.381182 | 0.151075 | 29 |
| PCDHGA10 | 4.277945 | 0.152784 | 28 |
| GALNT9 | 3.40227 | 0.12601 | 27 |
| ADARB2 | 8.255536 | 0.317521 | 26 |
| SHANK2 | 6.470832 | 0.248878 | 26 |
| AGAP1 | 6.24246 | 0.249698 | 25 |
| CAMTA1 | 4.805518 | 0.192221 | 25 |
| PDGFRA | 4.758412 | 0.190336 | 25 |
| PCDHGB7 | 3.961559 | 0.165065 | 24 |
| RPTOR | 9.501283 | 0.413099 | 23 |
| NCOR2 | 8.322187 | 0.361834 | 23 |
| NXN | 6.27367 | 0.272768 | 23 |
| HOXB3 | 6.035781 | 0.262425 | 23 |
| RIMBP2 | 4.314302 | 0.187578 | 23 |
| PCDHGA11 | 3.645173 | 0.158486 | 23 |
| PRKCZ | 6.665697 | 0.302986 | 22 |
| SKI | 6.064214 | 0.288772 | 21 |
| ZIC4 | 3.876225 | 0.184582 | 21 |
| ABR | 4.708382 | 0.235419 | 20 |
| FRMD4A | 4.646882 | 0.232344 | 20 |
| SDK1 | 4.557783 | 0.227889 | 20 |
| SMG1P2 | 6.376076 | 0.335583 | 19 |
| BOLA2 | 6.376076 | 0.335583 | 19 |
| LOC613038 | 6.376076 | 0.335583 | 19 |
| MAD1L1 | 6.313695 | 0.3323 | 19 |
| ZNF423 | 5.971828 | 0.314307 | 19 |
| KCNQ1 | 4.104771 | 0.216041 | 19 |
| CASZ1 | 3.518041 | 0.18516 | 19 |
| FOXK1 | 5.737213 | 0.318734 | 18 |
| ANKRD11 | 5.407599 | 0.300422 | 18 |
| SEPTIN9 | 4.293449 | 0.238525 | 18 |
| HOXA3 | 3.872172 | 0.215121 | 18 |
| RBFOX1 | 3.745567 | 0.208087 | 18 |
| OPCML | 6.021126 | 0.354184 | 17 |
| PAX6-AS1 | 3.880785 | 0.228281 | 17 |
| RCN1 | 3.880785 | 0.228281 | 17 |
| FOXP1 | 6.844759 | 0.427797 | 16 |
| NAV2 | 5.02674 | 0.314171 | 16 |
| EBF3 | 3.502228 | 0.218889 | 16 |
| SORBS2 | 3.432584 | 0.214536 | 16 |
| GLI2 | 6.503929 | 0.433595 | 15 |
| ZBTB20 | 4.605473 | 0.307032 | 15 |
| SLX1B- | 3.622028 | 0.241469 | 15 |
| SULT1A4 | | | |
| SLX1A | 3.622028 | 0.241469 | 15 |
| LOC606724 | 3.622028 | 0.241469 | 15 |
| BAIAP2 | 3.511134 | 0.234076 | 15 |
| CACNA1H | 4.422444 | 0.315889 | 14 |
| CUX1 | 4.074849 | 0.291061 | 14 |
| ARHGEF10 | 3.826456 | 0.273318 | 14 |
| PRKAG2 | 3.716511 | 0.265465 | 14 |
| GSE1 | 5.515004 | 0.424231 | 13 |
| MSI2 | 5.261013 | 0.404693 | 13 |
| RFX4 | 5.115566 | 0.393505 | 13 |
| SPTBN4 | 4.003012 | 0.307924 | 13 |
| ZC3H3 | 4.158095 | 0.346508 | 12 |
| CMIP | 3.573186 | 0.297766 | 12 |
| CSMD1 | 3.466178 | 0.288848 | 12 |
| CTBP2 | 4.442545 | 0.403868 | 11 |
| RAD51B | 3.346196 | 0.3042 | 11 |
| AKAP13 | 4.173414 | 0.417341 | 10 |
| ACOT7 | 3.680344 | 0.368034 | 10 |
| IGF1R | 3.578494 | 0.357849 | 10 |
| AUTS2 | 3.505236 | 0.350524 | 10 |
| ATP11A | 6.090584 | 0.676732 | 9 |
| CACNA2D4 | 5.851531 | 0.65017 | 9 |
| TRAPPC12 | 4.298298 | 0.477589 | 9 |
| TSPAN9 | 4.152279 | 0.461364 | 9 |
| KCNH2 | 4.010049 | 0.445561 | 9 |
| ASAP1 | 3.541546 | 0.393505 | 9 |
| VRK2 | 5.539611 | 0.692451 | 8 |
| PRDM8 | 5.353148 | 0.669143 | 8 |
| PPP2R2B | 4.450425 | 0.556303 | 8 |
| AFF3 | 4.31238 | 0.539048 | 8 |
| LINC00311 | 3.475399 | 0.434425 | 8 |
| MSRA | 3.461528 | 0.432691 | 8 |
| TRAPPC9 | 3.415412 | 0.426927 | 8 |
| AP2A2 | 3.729851 | 0.74597 | 5 |
| TSNAX-DISC1 | 3.398771 | 0.679754 | 5 |
| DAGLB | 3.850281 | 1.283427 | 3 |

TABLE 153
Cancer Type PITAD_STH_SPARSE

| Gene site | imp_sum | imp_mean | n |
|---|---|---|---|
| PTPRN2 | 13.40369 | 0.16346 | 82 |
| PRDM16 | 12.82439 | 0.180625 | 71 |
| PCDHGB1 | 3.352538 | 0.063255 | 53 |
| PCDHGB2 | 3.352538 | 0.068419 | 49 |
| PCDHGB3 | 3.352538 | 0.077966 | 43 |
| PCDHGA6 | 3.352538 | 0.083813 | 40 |
| HDAC4 | 16.85468 | 0.455532 | 37 |
| RBFOX3 | 14.15142 | 0.404326 | 35 |
| PAX6 | 9.704796 | 0.27728 | 35 |
| DIP2C | 8.826223 | 0.275819 | 32 |
| GALNT9 | 4.266274 | 0.15801 | 27 |
| SHANK2 | 7.465451 | 0.287133 | 26 |
| ADARB2 | 4.498758 | 0.173029 | 26 |
| AGAP1 | 7.299004 | 0.29196 | 25 |
| CAMTA1 | 5.061254 | 0.20245 | 25 |
| PDGFRA | 3.664179 | 0.146567 | 25 |
| SATB2 | 4.242972 | 0.176791 | 24 |
| RPTOR | 11.09559 | 0.482417 | 23 |
| NCOR2 | 6.299198 | 0.273878 | 23 |
| INPP5A | 6.283045 | 0.273176 | 23 |
| RIMBP2 | 5.67775 | 0.246859 | 23 |
| NXN | 5.0646 | 0.2202 | 23 |
| HOXB3 | 3.682036 | 0.160089 | 23 |
| PRKCZ | 5.625055 | 0.255684 | 22 |
| SKI | 8.432147 | 0.401531 | 21 |
| FRMD4A | 5.518485 | 0.275924 | 20 |
| SDK1 | 4.798074 | 0.239904 | 20 |
| ABR | 3.574142 | 0.178707 | 20 |
| MAD1L1 | 9.960365 | 0.52423 | 19 |
| ZNF423 | 5.497898 | 0.289363 | 19 |
| SMG1P2 | 4.80028 | 0.252646 | 19 |
| BOLA2 | 4.80028 | 0.252646 | 19 |
| LOC613038 | 4.80028 | 0.252646 | 19 |
| KCNQ1 | 4.395199 | 0.231326 | 19 |
| CASZ1 | 3.608576 | 0.189925 | 19 |
| FOXK1 | 8.166915 | 0.453717 | 18 |
| ANKRD11 | 6.129595 | 0.340533 | 18 |
| TBC1D16 | 3.452645 | 0.191814 | 18 |
| OPCML | 5.462946 | 0.32135 | 17 |
| PAX6-AS1 | 4.304029 | 0.253178 | 17 |
| RCN1 | 4.304029 | 0.253178 | 17 |
| TBX15 | 3.435127 | 0.202066 | 17 |
| FOXP1 | 5.410888 | 0.338181 | 16 |
| NAV2 | 4.808997 | 0.300562 | 16 |
| EBF3 | 4.764121 | 0.297758 | 16 |
| GLI2 | 6.997879 | 0.466525 | 15 |
| BAIAP2 | 5.692046 | 0.37947 | 15 |
| KNDC1 | 4.077211 | 0.271814 | 15 |
| EMX2OS | 3.885562 | 0.259037 | 15 |
| SLX1B- | 3.659946 | 0.243996 | 15 |
| SULT1A4 | | | |
| SLX1A | 3.659946 | 0.243996 | 15 |
| LOC606724 | 3.659946 | 0.243996 | 15 |
| RPS6KA2 | 6.638682 | 0.474192 | 14 |
| PRKAG2 | 6.132531 | 0.438038 | 14 |
| ARHGEF10 | 4.643365 | 0.331669 | 14 |
| C7orf50 | 4.411775 | 0.315127 | 14 |
| IQSEC1 | 3.399586 | 0.242828 | 14 |
| MIR548F5 | 3.376316 | 0.241165 | 14 |
| MSI2 | 6.528839 | 0.502218 | 13 |
| RFX4 | 5.217316 | 0.401332 | 13 |
| MYT1L | 4.046081 | 0.311237 | 13 |
| GSE1 | 4.011884 | 0.308606 | 13 |
| SPTBN4 | 3.601558 | 0.277043 | 13 |
| CMIP | 6.117375 | 0.509781 | 12 |
| ZC3H3 | 5.444204 | 0.453684 | 12 |
| TNS3 | 5.354996 | 0.44625 | 12 |
| ADGRD1 | 5.26842 | 0.439035 | 12 |
| FBRSL1 | 4.25555 | 0.354629 | 12 |
| GNA12 | 3.503295 | 0.291941 | 12 |
| ZC3H12D | 4.218637 | 0.383512 | 11 |
| SORCS2 | 3.698609 | 0.336237 | 11 |
| AKAP13 | 4.70569 | 0.470569 | 10 |
| ACOT7 | 3.971765 | 0.397176 | 10 |
| TSPAN4 | 3.701377 | 0.370138 | 10 |
| GAS7 | 3.366629 | 0.336663 | 10 |
| ATP11A | 5.825838 | 0.647315 | 9 |
| SND1 | 5.535797 | 0.615089 | 9 |
| ADAMTS2 | 5.045606 | 0.560623 | 9 |
| TSPAN9 | 4.213473 | 0.468164 | 9 |
| KCNH2 | 3.969071 | 0.441008 | 9 |
| AXIN2 | 3.460817 | 0.384535 | 9 |
| ASAP1 | 3.383619 | 0.375958 | 9 |
| SLC22A18 | 3.362796 | 0.373644 | 9 |
| PRDM8 | 8.49027 | 1.061284 | 8 |
| VRK2 | 4.955177 | 0.619397 | 8 |
| MSRA | 4.39264 | 0.54908 | 8 |
| AFF3 | 4.035116 | 0.50439 | 8 |
| TRAPPC9 | 3.46805 | 0.433506 | 8 |
| RXRA | 3.794134 | 0.542019 | 7 |
| MIR548H4 | 3.691354 | 0.527336 | 7 |
| GAK | 3.459276 | 0.494182 | 7 |
| TACC2 | 3.360077 | 0.480011 | 7 |
| CRADD | 3.897166 | 0.649528 | 6 |
| FBXL18 | 3.662146 | 0.610358 | 6 |
| TSNAX-DISC1 | 4.760379 | 0.952076 | 5 |
| AP2A2 | 4.038805 | 0.807761 | 5 |
| GSG1 | 3.372484 | 0.843121 | 4 |
| DAGLB | 3.99515 | 1.331717 | 3 |
| CHTF18 | 3.713627 | 1.856814 | 2 |
| ANKLE2 | 3.494424 | 1.747212 | 2 |

TABLE 154
Cancer Type PITAD_TSH

| Gene site | imp_sum | imp_mean | n |
|---|---|---|---|
| PTPRN2 | 9.40886 | 0.114742 | 82 |
| PRDM16 | 8.15208 | 0.114818 | 71 |
| PCDHGA1 | 3.588337 | 0.060819 | 59 |
| PCDHGA2 | 3.588337 | 0.062953 | 57 |
| PCDHGA3 | 3.588337 | 0.066451 | 54 |
| PCDHGB1 | 3.588337 | 0.067704 | 53 |
| PCDHGA4 | 3.271951 | 0.064156 | 51 |
| PCDHGB2 | 2.955565 | 0.060318 | 49 |
| PCDHGA5 | 2.639179 | 0.056153 | 47 |
| PCDHGB3 | 2.758601 | 0.064154 | 43 |
| PCDHGA6 | 2.758601 | 0.068965 | 40 |
| HDAC4 | 10.52559 | 0.284475 | 37 |
| PCDHGA7 | 2.442215 | 0.066006 | 37 |
| PAX6 | 6.486982 | 0.185342 | 35 |
| RBFOX3 | 3.830891 | 0.109454 | 35 |
| PCDHGB4 | 2.442215 | 0.069778 | 35 |
| PCDHGA8 | 2.442215 | 0.069778 | 35 |
| DIP2C | 7.394914 | 0.231091 | 32 |
| SHANK2 | 3.225038 | 0.12404 | 26 |
| ADARB2 | 2.658934 | 0.102267 | 26 |
| AGAP1 | 7.263333 | 0.290533 | 25 |
| CAMTA1 | 2.501118 | 0.100045 | 25 |
| SATB2 | 2.786999 | 0.116125 | 24 |
| NXN | 5.136839 | 0.223341 | 23 |
| NCOR2 | 5.129748 | 0.223033 | 23 |
| RPTOR | 4.39311 | 0.191005 | 23 |
| HOXB3 | 2.82018 | 0.122617 | 23 |
| PRKCZ | 3.016776 | 0.137126 | 22 |
| SKI | 6.751464 | 0.321498 | 21 |
| SDK1 | 4.373052 | 0.218653 | 20 |
| FRMD4A | 3.314172 | 0.165709 | 20 |
| ABR | 2.657323 | 0.132866 | 20 |
| MAD1L1 | 6.086807 | 0.320358 | 19 |
| CASZ1 | 3.663955 | 0.19284 | 19 |
| CFAP46 | 2.797395 | 0.147231 | 19 |
| MCF2L | 4.413719 | 0.245207 | 18 |
| ANKRD11 | 2.864419 | 0.159134 | 18 |
| FOXK1 | 2.683913 | 0.149106 | 18 |
| TBC1D16 | 2.389987 | 0.132777 | 18 |
| OPCML | 4.165582 | 0.245034 | 17 |
| HBG2 | 2.690066 | 0.158239 | 17 |
| FOXP1 | 4.589209 | 0.286826 | 16 |
| NAV2 | 2.811994 | 0.17575 | 16 |
| EBF3 | 2.623072 | 0.163942 | 16 |
| GLI2 | 3.237879 | 0.215859 | 15 |
| KIRREL3 | 2.622052 | 0.174803 | 15 |
| ARHGEF10 | 4.635274 | 0.331091 | 14 |
| C7orf50 | 2.702027 | 0.193002 | 14 |
| TBX5 | 2.650681 | 0.189334 | 14 |
| PRKAG2 | 2.608078 | 0.186291 | 14 |
| MOB2 | 2.462272 | 0.175877 | 14 |
| MIR548F5 | 2.406059 | 0.171861 | 14 |
| MSI2 | 3.551726 | 0.27321 | 13 |
| GSE1 | 3.496661 | 0.268974 | 13 |
| RFX4 | 3.356876 | 0.258221 | 13 |
| CMIP | 4.937844 | 0.411487 | 12 |
| FBRSL1 | 4.458035 | 0.371503 | 12 |
| ZC3H3 | 3.146758 | 0.26223 | 12 |
| ANAPC16 | 2.795207 | 0.25411 | 11 |
| CTBP2 | 2.687582 | 0.244326 | 11 |
| TSPAN4 | 3.957528 | 0.395753 | 10 |
| ACOT7 | 2.81231 | 0.281231 | 10 |
| RGS12 | 2.686067 | 0.268607 | 10 |
| CHST11 | 2.678145 | 0.267815 | 10 |
| LMF1 | 2.640024 | 0.264002 | 10 |
| GAS7 | 2.375665 | 0.237566 | 10 |
| ATP11A | 3.874103 | 0.430456 | 9 |
| CACNA2D4 | 3.353338 | 0.372593 | 9 |
| AXIN2 | 3.323844 | 0.369316 | 9 |
| SND1 | 3.224096 | 0.358233 | 9 |
| TRAPPC12 | 3.075952 | 0.341772 | 9 |
| SLC22A18 | 2.797384 | 0.31082 | 9 |
| TSPAN9 | 2.676189 | 0.297354 | 9 |
| PRDM8 | 6.328073 | 0.791009 | 8 |
| AFF3 | 3.212441 | 0.401555 | 8 |
| SYNJ2 | 3.208876 | 0.40111 | 8 |
| VRK2 | 2.968834 | 0.371104 | 8 |
| TMEM132D | 2.829233 | 0.353654 | 8 |
| MSRA | 2.729491 | 0.341186 | 8 |
| DNMT3A | 2.627419 | 0.328427 | 8 |
| DLEU1 | 2.465536 | 0.308192 | 8 |
| RGS20 | 2.391527 | 0.298941 | 8 |
| MIR548H4 | 3.555513 | 0.50793 | 7 |
| GAK | 3.04005 | 0.434293 | 7 |
| NAV1 | 2.746391 | 0.392342 | 7 |
| WWOX | 2.399897 | 0.342842 | 7 |
| CRADD | 3.84197 | 0.640328 | 6 |
| MYO16 | 3.041736 | 0.506956 | 6 |
| C10orf90 | 2.747828 | 0.457971 | 6 |
| CCDC177 | 2.686978 | 0.44783 | 6 |
| FBXL18 | 2.558178 | 0.426363 | 6 |
| SLC22A18AS | 2.501483 | 0.416914 | 6 |
| FMNL2 | 2.451875 | 0.408646 | 6 |
| TSNAX-DISC1 | 3.926508 | 0.785302 | 5 |
| RUNDC3A | 2.731088 | 0.546218 | 5 |
| VAV2 | 2.390701 | 0.47814 | 5 |
| TRIM65 | 2.9884 | 1.4942 | 2 |
| ERI3 | 2.800313 | 1.400157 | 2 |
| DISC1 | 2.716734 | 1.358367 | 2 |
| SLC25A10 | 2.528998 | 1.264499 | 2 |

TABLE 155
Cancer Type PITUI

| Gene site | imp_sum | imp_mean | n |
|---|---|---|---|
| PTPRN2 | 16.35368 | 0.199435 | 82 |
| PRDM16 | 17.93226 | 0.252567 | 71 |
| PCDHGA1 | 5.085676 | 0.086198 | 59 |
| PCDHGA2 | 4.76929 | 0.083672 | 57 |
| PCDHGA3 | 4.452904 | 0.082461 | 54 |
| PCDHGB1 | 4.452904 | 0.084017 | 53 |
| PCDHGA4 | 4.452904 | 0.087312 | 51 |
| HDAC4 | 14.25155 | 0.385177 | 37 |
| PAX6 | 9.270981 | 0.264885 | 35 |
| RBFOX3 | 7.115698 | 0.203306 | 35 |
| DIP2C | 13.48333 | 0.421354 | 32 |
| SOX2-OT | 8.123976 | 0.280137 | 29 |
| GALNT9 | 4.640102 | 0.171856 | 27 |
| SHANK2 | 4.865952 | 0.187152 | 26 |
| AGAP1 | 11.49114 | 0.459645 | 25 |
| CAMTA1 | 7.897637 | 0.315905 | 25 |
| PDGFRA | 7.691037 | 0.307641 | 25 |
| MEIS1 | 4.320301 | 0.180013 | 24 |
| RPTOR | 12.62394 | 0.548867 | 23 |
| INPP5A | 5.879629 | 0.255636 | 23 |
| NXN | 5.407584 | 0.235112 | 23 |
| NCOR2 | 4.989473 | 0.216934 | 23 |
| HOXB3 | 4.541869 | 0.197473 | 23 |
| PRKCZ | 6.302859 | 0.286494 | 22 |
| SKI | 11.24166 | 0.535317 | 21 |
| SDK1 | 6.244901 | 0.312245 | 20 |
| FRMD4A | 5.904146 | 0.295207 | 20 |
| ABR | 5.17257 | 0.258628 | 20 |
| MAD1L1 | 11.27934 | 0.593649 | 19 |
| ZNF423 | 7.31106 | 0.384793 | 19 |
| CASZ1 | 7.082702 | 0.372774 | 19 |
| SMG1P2 | 4.913495 | 0.258605 | 19 |
| BOLA2 | 4.913495 | 0.258605 | 19 |
| LOC613038 | 4.913495 | 0.258605 | 19 |
| CFAP46 | 4.129305 | 0.217332 | 19 |
| TBC1D16 | 6.475237 | 0.359735 | 18 |
| FOXK1 | 6.437992 | 0.357666 | 18 |
| ANKRD11 | 6.218053 | 0.345447 | 18 |
| SEPTIN9 | 5.672606 | 0.315145 | 18 |
| MCF2L | 5.129604 | 0.284978 | 18 |
| HOXA3 | 4.503527 | 0.250196 | 18 |
| OPCML | 4.540251 | 0.267074 | 17 |
| FOXP1 | 7.982608 | 0.498913 | 16 |
| EBF3 | 4.580607 | 0.286288 | 16 |
| NAV2 | 4.297127 | 0.26857 | 16 |
| GLI2 | 7.704142 | 0.513609 | 15 |
| KIRREL3 | 6.256932 | 0.417129 | 15 |
| SLX1B- | 4.782061 | 0.318804 | 15 |
| SULT1A4 | | | |
| SLX1A | 4.782061 | 0.318804 | 15 |
| LOC606724 | 4.782061 | 0.318804 | 15 |
| NFIX | 4.600342 | 0.306689 | 15 |
| LRMDA | 4.532995 | 0.3022 | 15 |
| ZBTB20 | 4.05497 | 0.270331 | 15 |
| RPS6KA2 | 7.382522 | 0.527323 | 14 |
| CUX1 | 6.962169 | 0.497298 | 14 |
| IQSEC1 | 6.392684 | 0.45662 | 14 |
| PRKAG2 | 5.315705 | 0.379693 | 14 |
| C7orf50 | 4.96574 | 0.354696 | 14 |
| MIR548F5 | 4.911218 | 0.350801 | 14 |
| MSI2 | 6.700335 | 0.51541 | 13 |
| MYT1L | 5.452084 | 0.419391 | 13 |
| KIF26B | 4.344524 | 0.334194 | 13 |
| RASA3 | 5.80698 | 0.483915 | 12 |
| ZC3H3 | 5.498845 | 0.458237 | 12 |
| TNS3 | 5.471934 | 0.455995 | 12 |
| MIRLET7BHG | 5.35895 | 0.446579 | 12 |
| ADGRD1 | 4.977938 | 0.414828 | 12 |
| MEGF6 | 4.348627 | 0.362386 | 12 |
| FBRSL1 | 4.31256 | 0.35938 | 12 |
| CMIP | 4.105199 | 0.3421 | 12 |
| GNA12 | 4.057769 | 0.338147 | 12 |
| TBCD | 5.109895 | 0.464536 | 11 |
| SPON2 | 4.76136 | 0.432851 | 11 |
| CTBP2 | 4.157937 | 0.377994 | 11 |
| ANAPC16 | 4.073549 | 0.370323 | 11 |
| TSPAN4 | 4.648571 | 0.464857 | 10 |
| SND1 | 7.283474 | 0.809275 | 9 |
| TSPAN9 | 6.014893 | 0.668321 | 9 |
| ATP11A | 5.609787 | 0.62331 | 9 |
| ADAMTS2 | 5.269587 | 0.58551 | 9 |
| AXIN2 | 5.174351 | 0.574928 | 9 |
| TRAPPC12 | 5.121161 | 0.569018 | 9 |
| NOTCH1 | 4.106032 | 0.456226 | 9 |
| APBA2 | 4.026487 | 0.447387 | 9 |
| MSRA | 4.601965 | 0.575246 | 8 |
| DLEU1 | 4.408934 | 0.551117 | 8 |
| LINC00311 | 4.229846 | 0.528731 | 8 |
| NAV1 | 4.588824 | 0.655546 | 7 |
| LHPP | 4.53367 | 0.647667 | 7 |
| ITPK1 | 4.415617 | 0.630802 | 7 |
| GAK | 4.379344 | 0.625621 | 7 |
| MIR548H4 | 4.350271 | 0.621467 | 7 |
| CXXC5 | 4.263329 | 0.609047 | 7 |
| FBXL18 | 5.388879 | 0.898147 | 6 |
| KDM4B | 4.607895 | 0.767983 | 6 |
| CRADD | 4.43432 | 0.739053 | 6 |
| SLC22A18AS | 4.289809 | 0.714968 | 6 |
| RUNDC3A | 5.516918 | 1.103384 | 5 |
| TSNAX-DISC1 | 5.126587 | 1.025317 | 5 |
| ARHGEF7 | 4.647192 | 0.929438 | 5 |

TABLE 156
Cancer Type PLASMACYT

| Gene site | imp_sum | imp_mean | n |
|---|---|---|---|
| PTPRN2 | 8.246297 | 0.100565 | 82 |
| PRDM16 | 5.021667 | 0.070728 | 71 |
| PCDHGA1 | 2.531088 | 0.0429 | 59 |
| PCDHGA2 | 2.214702 | 0.038854 | 57 |
| PCDHGA3 | 2.214702 | 0.041013 | 54 |
| PCDHGB1 | 2.214702 | 0.041787 | 53 |
| PCDHGA4 | 2.214702 | 0.043426 | 51 |
| PCDHGB2 | 2.214702 | 0.045198 | 49 |
| PCDHGA5 | 2.214702 | 0.047121 | 47 |
| PCDHGB3 | 1.898316 | 0.044147 | 43 |
| HDAC4 | 6.778115 | 0.183192 | 37 |
| RBFOX3 | 2.794424 | 0.079841 | 35 |
| DIP2C | 2.766692 | 0.086459 | 32 |
| ADARB2 | 2.563395 | 0.098592 | 26 |
| SHANK2 | 2.42321 | 0.0932 | 26 |
| AGAP1 | 3.322519 | 0.132901 | 25 |
| CAMTA1 | 1.999995 | 0.08 | 25 |
| PDGFRA | 1.744295 | 0.069772 | 25 |
| NCOR2 | 5.251438 | 0.228323 | 23 |
| RPTOR | 4.188742 | 0.182119 | 23 |
| RIMBP2 | 2.680694 | 0.116552 | 23 |
| NXN | 1.627722 | 0.070771 | 23 |
| SKI | 4.880693 | 0.232414 | 21 |
| SDK1 | 3.198217 | 0.159911 | 20 |
| FRMD4A | 1.928019 | 0.096401 | 20 |
| MAD1L1 | 6.103592 | 0.321242 | 19 |
| ZNF423 | 2.655007 | 0.139737 | 19 |
| CFAP46 | 2.078795 | 0.10941 | 19 |
| FOXK1 | 3.750882 | 0.208382 | 18 |
| RBFOX1 | 3.393021 | 0.188501 | 18 |
| ANKRD11 | 2.943663 | 0.163537 | 18 |
| OPCML | 3.435498 | 0.202088 | 17 |
| FOXP1 | 3.530632 | 0.220665 | 16 |
| GLI2 | 4.521672 | 0.301445 | 15 |
| KIRREL3 | 2.842758 | 0.189517 | 15 |
| COL23A1 | 1.801013 | 0.120068 | 15 |
| RPS6KA2 | 4.061507 | 0.290108 | 14 |
| IQSEC1 | 2.897213 | 0.206944 | 14 |
| CUX1 | 2.586123 | 0.184723 | 14 |
| C7orf50 | 2.041189 | 0.145799 | 14 |
| PPP2R2A | 1.710245 | 0.12216 | 14 |
| MOB2 | 1.619517 | 0.11568 | 14 |
| GSE1 | 4.175492 | 0.321192 | 13 |
| MSI2 | 3.493614 | 0.26874 | 13 |
| KIF26B | 1.842195 | 0.141707 | 13 |
| MYT1L | 1.787706 | 0.137516 | 13 |
| CMIP | 3.406765 | 0.283897 | 12 |
| FBRSL1 | 2.78353 | 0.231961 | 12 |
| ZC3H3 | 2.696535 | 0.224711 | 12 |
| CTNNA2 | 1.966395 | 0.163866 | 12 |
| RASA3 | 1.810327 | 0.150861 | 12 |
| ZC3H12D | 2.712185 | 0.246562 | 11 |
| COL4A1 | 2.341256 | 0.212841 | 11 |
| WNT5A | 2.017909 | 0.183446 | 11 |
| TSPAN4 | 2.697755 | 0.269776 | 10 |
| AKAP13 | 1.847862 | 0.184786 | 10 |
| ACOT7 | 1.832347 | 0.183235 | 10 |
| SND1 | 4.433875 | 0.492653 | 9 |
| TSPAN9 | 2.937856 | 0.326428 | 9 |
| TRAPPC12 | 2.580023 | 0.286669 | 9 |
| ATP11A | 2.491575 | 0.276842 | 9 |
| SLC22A18 | 2.371564 | 0.263507 | 9 |
| CACNA2D4 | 1.97832 | 0.219813 | 9 |
| NOTCH1 | 1.954531 | 0.21717 | 9 |
| VRK2 | 3.179022 | 0.397378 | 8 |
| PPP2R2B | 2.486706 | 0.310838 | 8 |
| AFF3 | 2.243318 | 0.280415 | 8 |
| LMX1B | 2.190566 | 0.273821 | 8 |
| TENM2 | 1.774757 | 0.221845 | 8 |
| CXXC5 | 2.699262 | 0.385609 | 7 |
| VPS13D | 2.384939 | 0.340706 | 7 |
| GAK | 2.216817 | 0.316688 | 7 |
| PTPN20 | 2.158241 | 0.30832 | 7 |
| SBNO2 | 1.747097 | 0.249585 | 7 |
| C19orf25 | 1.722623 | 0.246089 | 7 |
| NRG1 | 1.701523 | 0.243075 | 7 |
| RXRA | 1.669708 | 0.23853 | 7 |
| GALNT2 | 1.659583 | 0.237083 | 7 |
| RADIL | 3.252262 | 0.542044 | 6 |
| SLC22A18AS | 2.353238 | 0.392206 | 6 |
| COQ8A | 2.030139 | 0.338356 | 6 |
| C10orf90 | 1.902737 | 0.317123 | 6 |
| ANKS1A | 1.82408 | 0.304013 | 6 |
| LRRFIP1 | 1.753638 | 0.292273 | 6 |
| GPR39 | 1.713 | 0.2855 | 6 |
| RERE | 1.686278 | 0.281046 | 6 |
| GRK5 | 1.631163 | 0.27186 | 6 |
| TSNAX-DISC1 | 3.625664 | 0.725133 | 5 |
| RUNDC3A | 3.259257 | 0.651851 | 5 |
| SDK2 | 2.180742 | 0.436148 | 5 |
| CADM1 | 1.836276 | 0.367255 | 5 |
| AGAP2 | 1.816382 | 0.363276 | 5 |
| EXT1 | 1.638349 | 0.409587 | 4 |
| DICER1 | 2.158844 | 0.719615 | 3 |
| TBC1D7 | 2.089024 | 0.696341 | 3 |
| SLC25A22 | 1.787343 | 0.595781 | 3 |
| SLC25A10 | 2.297623 | 1.148812 | 2 |
| SOX10 | 1.903551 | 0.951776 | 2 |
| ANKLE2 | 1.717654 | 0.858827 | 2 |
| CHTF18 | 1.680153 | 0.840077 | 2 |

TABLE 157
Cancer Type PLNTY

| Gene site | imp_sum | imp_mean | n |
|---|---|---|---|
| PTPRN2 | 4.592259 | 0.056003 | 82 |
| PRDM16 | 10.5896 | 0.149149 | 71 |
| PCDHGA1 | 2.614902 | 0.04432 | 59 |
| PCDHGA2 | 2.614902 | 0.045875 | 57 |
| PCDHGA3 | 2.931288 | 0.054283 | 54 |
| PCDHGB1 | 2.931288 | 0.055307 | 53 |
| PCDHGA4 | 2.931288 | 0.057476 | 51 |
| PCDHGB2 | 2.931288 | 0.059822 | 49 |
| PCDHGA5 | 2.614902 | 0.055636 | 47 |
| PCDHGB3 | 2.298516 | 0.053454 | 43 |
| PCDHGA6 | 2.298516 | 0.057463 | 40 |
| HDAC4 | 3.59828 | 0.097251 | 37 |
| PCDHGA7 | 2.298516 | 0.062122 | 37 |
| PAX6 | 6.015438 | 0.17187 | 35 |
| RBFOX3 | 3.828772 | 0.109393 | 35 |
| PCDHGB4 | 2.298516 | 0.065672 | 35 |
| PCDHGA8 | 2.298516 | 0.065672 | 35 |
| DIP2C | 4.939448 | 0.154358 | 32 |
| PCDHGB5 | 2.298516 | 0.071829 | 32 |
| PCDHGA9 | 2.298516 | 0.074146 | 31 |
| SOX2-OT | 3.593428 | 0.123911 | 29 |
| ADARB2 | 3.330645 | 0.128102 | 26 |
| CAMTA1 | 4.272184 | 0.170887 | 25 |
| AGAP1 | 3.630501 | 0.14522 | 25 |
| SATB2 | 3.604525 | 0.150189 | 24 |
| RPTOR | 5.262184 | 0.228791 | 23 |
| INPP5A | 3.839962 | 0.166955 | 23 |
| NXN | 2.55193 | 0.110953 | 23 |
| NCOR2 | 2.510179 | 0.109138 | 23 |
| SKI | 4.587922 | 0.218472 | 21 |
| FRMD4A | 4.040872 | 0.202044 | 20 |
| ABR | 3.338525 | 0.166926 | 20 |
| SDK1 | 2.746142 | 0.137307 | 20 |
| MAD1L1 | 6.361444 | 0.334813 | 19 |
| ZNF423 | 4.483254 | 0.235961 | 19 |
| SMG1P2 | 3.957845 | 0.208308 | 19 |
| BOLA2 | 3.957845 | 0.208308 | 19 |
| LOC613038 | 3.957845 | 0.208308 | 19 |
| CASZ1 | 2.704101 | 0.142321 | 19 |
| FOXK1 | 4.424514 | 0.245806 | 18 |
| MCF2L | 2.873774 | 0.159654 | 18 |
| TBC1D16 | 2.564648 | 0.14248 | 18 |
| SEPTIN9 | 2.303752 | 0.127986 | 18 |
| OPCML | 3.49484 | 0.205579 | 17 |
| NAV2 | 2.375735 | 0.148483 | 16 |
| GLI2 | 3.829269 | 0.255285 | 15 |
| BAIAP2 | 2.233153 | 0.148877 | 15 |
| ZBTB20 | 2.214702 | 0.147647 | 15 |
| IQSEC1 | 2.635744 | 0.188267 | 14 |
| RPS6KA2 | 2.547296 | 0.18195 | 14 |
| CUX1 | 2.349358 | 0.167811 | 14 |
| MSI2 | 4.667992 | 0.359076 | 13 |
| MYT1L | 3.166894 | 0.243607 | 13 |
| GSE1 | 3.007342 | 0.231334 | 13 |
| RFX4 | 2.54279 | 0.195599 | 13 |
| SPTBN4 | 2.137458 | 0.16442 | 13 |
| CMIP | 3.542088 | 0.295174 | 12 |
| ADGRD1 | 3.000292 | 0.250024 | 12 |
| TNS3 | 2.650311 | 0.220859 | 12 |
| RAD51B | 3.031553 | 0.275596 | 11 |
| ZC3H12D | 2.559618 | 0.232693 | 11 |
| VGLLA | 2.433622 | 0.221238 | 11 |
| IGF1R | 3.313095 | 0.33131 | 10 |
| ACOT7 | 2.988113 | 0.298811 | 10 |
| LBX1-AS1 | 2.149892 | 0.214989 | 10 |
| GRID1 | 2.12101 | 0.212101 | 10 |
| KCNH2 | 3.479583 | 0.38662 | 9 |
| ATP11A | 3.173518 | 0.352613 | 9 |
| SND1 | 3.141462 | 0.349051 | 9 |
| AXIN2 | 2.811114 | 0.312346 | 9 |
| ASAP1 | 2.576206 | 0.286245 | 9 |
| ADAMTS2 | 2.44998 | 0.27222 | 9 |
| ADGRB1 | 2.384403 | 0.264934 | 9 |
| TSPAN9 | 2.143241 | 0.238138 | 9 |
| DLEU1 | 3.024339 | 0.378042 | 8 |
| ASPSCR1 | 2.599788 | 0.324973 | 8 |
| LHX4 | 2.444245 | 0.305531 | 8 |
| RORA | 2.327736 | 0.290967 | 8 |
| DNMT3A | 2.232974 | 0.279122 | 8 |
| LINC00311 | 2.168563 | 0.27107 | 8 |
| GDF6 | 2.15933 | 0.269916 | 8 |
| MSRA | 2.123309 | 0.265414 | 8 |
| ESRRG | 2.106696 | 0.263337 | 8 |
| DUSP6 | 3.533096 | 0.504728 | 7 |
| C19orf25 | 2.548903 | 0.364129 | 7 |
| NAV1 | 2.374574 | 0.339225 | 7 |
| LINC01140 | 2.203162 | 0.314737 | 7 |
| GLI3 | 2.193183 | 0.313312 | 7 |
| CXXC5 | 2.112419 | 0.301774 | 7 |
| FBXL18 | 3.23133 | 0.538555 | 6 |
| KIFC3 | 2.434479 | 0.486896 | 5 |
| BACH2 | 2.375159 | 0.475032 | 5 |
| PRR5L | 2.340852 | 0.46817 | 5 |
| ARHGEF7 | 2.295883 | 0.459177 | 5 |
| UNQ6494 | 2.974765 | 0.743691 | 4 |
| SASH1 | 2.875664 | 0.718916 | 4 |
| GRIN2B | 2.509571 | 0.836524 | 3 |
| SOX10 | 2.661932 | 1.330966 | 2 |
| SLC25A10 | 2.5237 | 1.26185 | 2 |
| MAP3K3 | 2.450964 | 1.225482 | 2 |

TABLE 158
Cancer Type PPTID_A

| Gene site | imp_sum | imp_mean | n |
|---|---|---|---|
| PTPRN2 | 8.648116 | 0.105465 | 82 |
| PRDM16 | 7.928549 | 0.11167 | 71 |
| PCDHGA1 | 3.106457 | 0.052652 | 59 |
| PCDHGA2 | 3.106457 | 0.054499 | 57 |
| PCDHGA6 | 3.106457 | 0.077661 | 40 |
| HDAC4 | 11.75065 | 0.317585 | 37 |
| PAX6 | 5.665158 | 0.161862 | 35 |
| RBFOX3 | 4.977408 | 0.142212 | 35 |
| DIP2C | 7.142101 | 0.223191 | 32 |
| GALNT9 | 3.925303 | 0.145382 | 27 |
| SHANK2 | 5.177983 | 0.199153 | 26 |
| AGAP1 | 6.640154 | 0.265606 | 25 |
| CAMTA1 | 5.470891 | 0.218836 | 25 |
| MEIS1 | 3.424578 | 0.142691 | 24 |
| PCDHGB7 | 3.106457 | 0.129436 | 24 |
| RPTOR | 9.444429 | 0.410627 | 23 |
| NXN | 6.62009 | 0.28783 | 23 |
| NCOR2 | 6.27054 | 0.272632 | 23 |
| INPP5A | 5.072765 | 0.220555 | 23 |
| PCDHGA11 | 3.106457 | 0.135063 | 23 |
| RIMBP2 | 3.094265 | 0.134533 | 23 |
| PRKCZ | 4.55387 | 0.206994 | 22 |
| SKI | 8.101099 | 0.385767 | 21 |
| ABR | 2.948097 | 0.147405 | 20 |
| MAD1L1 | 13.62232 | 0.716964 | 19 |
| CASZ1 | 5.498024 | 0.28937 | 19 |
| ZNF423 | 4.953023 | 0.260685 | 19 |
| SMG1P2 | 4.178841 | 0.219939 | 19 |
| BOLA2 | 4.178841 | 0.219939 | 19 |
| LOC613038 | 4.178841 | 0.219939 | 19 |
| KCNQ1 | 4.015099 | 0.211321 | 19 |
| FOXK1 | 5.225656 | 0.290314 | 18 |
| TBC1D16 | 4.093026 | 0.22739 | 18 |
| SEPTIN9 | 3.318672 | 0.184371 | 18 |
| ANKRD11 | 3.091681 | 0.17176 | 18 |
| PAX6-AS1 | 3.842142 | 0.226008 | 17 |
| RCN1 | 3.842142 | 0.226008 | 17 |
| FOXP1 | 5.118198 | 0.319887 | 16 |
| NAV2 | 3.377477 | 0.211092 | 16 |
| KNDC1 | 4.38695 | 0.292463 | 15 |
| ZBTB20 | 3.861839 | 0.257456 | 15 |
| GLI2 | 3.446048 | 0.229737 | 15 |
| BAIAP2 | 3.396298 | 0.22642 | 15 |
| NFATC1 | 3.386909 | 0.225794 | 15 |
| KIRREL3 | 2.94463 | 0.196309 | 15 |
| ARHGEF10 | 5.205047 | 0.371789 | 14 |
| MOB2 | 4.696577 | 0.33547 | 14 |
| CUX1 | 4.484666 | 0.320333 | 14 |
| IQSEC1 | 3.452896 | 0.246635 | 14 |
| C7orf50 | 3.327407 | 0.237672 | 14 |
| GNG7 | 3.253313 | 0.23238 | 14 |
| MYT1L | 5.567428 | 0.428264 | 13 |
| MSI2 | 4.478131 | 0.344472 | 13 |
| ZC3H3 | 5.773265 | 0.481105 | 12 |
| CMIP | 3.940051 | 0.328338 | 12 |
| FBRSL1 | 3.777821 | 0.314818 | 12 |
| MEGF6 | 3.331258 | 0.277605 | 12 |
| ADGRD1 | 3.207913 | 0.267326 | 12 |
| TNS3 | 3.131242 | 0.260937 | 12 |
| RASA3 | 3.062385 | 0.255199 | 12 |
| TBX4 | 3.004938 | 0.250412 | 12 |
| WNT5A | 4.500214 | 0.40911 | 11 |
| ZC3H12D | 3.281566 | 0.298324 | 11 |
| VGLL4 | 3.164956 | 0.287723 | 11 |
| RAD51B | 2.972988 | 0.270272 | 11 |
| GRID1 | 3.841244 | 0.384124 | 10 |
| AKAP13 | 3.603546 | 0.360355 | 10 |
| ACOT7 | 3.424298 | 0.34243 | 10 |
| SKOR1 | 3.26378 | 0.326378 | 10 |
| SPPL2B | 2.959423 | 0.295942 | 10 |
| ASIC2 | 2.928988 | 0.292899 | 10 |
| SND1 | 6.042522 | 0.671391 | 9 |
| ATP11A | 5.278739 | 0.586527 | 9 |
| ADAMTS2 | 4.97865 | 0.553183 | 9 |
| CACNA2D4 | 4.332074 | 0.481342 | 9 |
| PACS2 | 3.237413 | 0.359713 | 9 |
| GPC6 | 3.168188 | 0.352021 | 9 |
| TSPAN9 | 2.999866 | 0.333318 | 9 |
| SSBP3 | 2.969011 | 0.32989 | 9 |
| VRK2 | 6.574839 | 0.821855 | 8 |
| TRAPPC9 | 3.850618 | 0.481327 | 8 |
| DNMT3A | 3.237578 | 0.404697 | 8 |
| PPP2R2B | 3.190039 | 0.398755 | 8 |
| MIR548H4 | 3.731732 | 0.533105 | 7 |
| CXXC5 | 3.725549 | 0.532221 | 7 |
| TENM3 | 3.387221 | 0.483889 | 7 |
| GAK | 3.332254 | 0.476036 | 7 |
| RXRA | 2.978021 | 0.425432 | 7 |
| PITPNC1 | 2.95111 | 0.421587 | 7 |
| FBXL18 | 3.449678 | 0.574946 | 6 |
| TRAK1 | 3.390001 | 0.565 | 6 |
| CCDC85C | 3.026196 | 0.504366 | 6 |
| TSNAX-DISC1 | 4.501816 | 0.900363 | 5 |
| ARHGEF7 | 3.06617 | 0.613234 | 5 |
| SDK2 | 2.942077 | 0.588415 | 5 |
| PWWP2B | 3.23489 | 0.808722 | 4 |
| GSG1 | 3.157531 | 0.789383 | 4 |
| SLC25A22 | 3.273268 | 1.091089 | 3 |
| CHTF18 | 4.393304 | 2.196652 | 2 |
| KCNV2 | 3.002687 | 3.002687 | 1 |

TABLE 159
Cancer Type PPTID_B

| Gene site | imp_sum | imp_mean | n |
|---|---|---|---|
| PTPRN2 | 8.484208 | 0.103466 | 82 |
| PRDM16 | 6.943077 | 0.09779 | 71 |
| HDAC4 | 8.404246 | 0.227142 | 37 |
| RBFOX3 | 6.997953 | 0.199942 | 35 |
| PAX6 | 3.67728 | 0.105065 | 35 |
| DIP2C | 3.475297 | 0.108603 | 32 |
| GALNT9 | 3.870262 | 0.143343 | 27 |
| ADARB2 | 3.612563 | 0.138945 | 26 |
| SHANK2 | 3.330041 | 0.128079 | 26 |
| CAMTA1 | 6.690953 | 0.267638 | 25 |
| AGAP1 | 5.593718 | 0.223749 | 25 |
| RPTOR | 5.735448 | 0.249367 | 23 |
| NXN | 4.622589 | 0.200982 | 23 |
| NCOR2 | 4.485016 | 0.195001 | 23 |
| RIMBP2 | 3.27382 | 0.14234 | 23 |
| INPP5A | 2.682003 | 0.116609 | 23 |
| PRKCZ | 3.291448 | 0.149611 | 22 |
| SKI | 4.675435 | 0.22264 | 21 |
| FRMD4A | 2.973194 | 0.14866 | 20 |
| MAD1L1 | 12.50555 | 0.658187 | 19 |
| CASZ1 | 5.302585 | 0.279083 | 19 |
| SMG1P2 | 4.394225 | 0.231275 | 19 |
| BOLA2 | 4.394225 | 0.231275 | 19 |
| LOC613038 | 4.394225 | 0.231275 | 19 |
| CFAP46 | 2.656597 | 0.139821 | 19 |
| KCNQ1 | 2.480621 | 0.130559 | 19 |
| ZNF423 | 2.454238 | 0.12917 | 19 |
| FOXK1 | 3.026596 | 0.168144 | 18 |
| TBC1D16 | 2.546024 | 0.141446 | 18 |
| SEPTIN9 | 2.507428 | 0.139302 | 18 |
| FOXP1 | 5.314247 | 0.33214 | 16 |
| EBF3 | 3.263849 | 0.203991 | 16 |
| KNDC1 | 3.293924 | 0.219595 | 15 |
| BAIAP2 | 2.481642 | 0.165443 | 15 |
| CUX1 | 4.417765 | 0.315555 | 14 |
| ARHGEF10 | 3.118517 | 0.222751 | 14 |
| IQSEC1 | 2.944971 | 0.210355 | 14 |
| MIR548F5 | 2.813738 | 0.200981 | 14 |
| MSI2 | 4.724375 | 0.363413 | 13 |
| RFX4 | 3.458651 | 0.26605 | 13 |
| GSE1 | 3.364669 | 0.258821 | 13 |
| MYT1L | 2.990422 | 0.230032 | 13 |
| TBX4 | 3.882401 | 0.323533 | 12 |
| FBRSL1 | 3.045172 | 0.253764 | 12 |
| ZC3H3 | 2.82838 | 0.235698 | 12 |
| TNS3 | 2.557913 | 0.213159 | 12 |
| CMIP | 2.288377 | 0.190698 | 12 |
| CTBP2 | 2.788195 | 0.253472 | 11 |
| ZC3H12D | 2.239715 | 0.20361 | 11 |
| AKAP13 | 3.237211 | 0.323721 | 10 |
| GRID1 | 3.106122 | 0.310612 | 10 |
| AUTS2 | 2.828559 | 0.282856 | 10 |
| CHST11 | 2.687753 | 0.268775 | 10 |
| ACOT7 | 2.607843 | 0.260784 | 10 |
| RGS12 | 2.553201 | 0.25532 | 10 |
| SH3RF3 | 2.431616 | 0.243162 | 10 |
| BCL11B | 2.284903 | 0.22849 | 10 |
| SND1 | 5.532557 | 0.614729 | 9 |
| CACNA2D4 | 4.192445 | 0.465827 | 9 |
| ATP11A | 4.069455 | 0.452162 | 9 |
| ADAMTS2 | 4.05582 | 0.450647 | 9 |
| SSBP3 | 3.069115 | 0.341013 | 9 |
| AXIN2 | 3.020683 | 0.335631 | 9 |
| GPC6 | 2.724216 | 0.302691 | 9 |
| MGMT | 2.711353 | 0.301261 | 9 |
| TSPAN9 | 2.675168 | 0.297241 | 9 |
| VRK2 | 5.368419 | 0.671052 | 8 |
| PPP2R2B | 4.094538 | 0.511817 | 8 |
| DNMT3A | 3.275917 | 0.40949 | 8 |
| TRAPPC9 | 2.865515 | 0.358189 | 8 |
| ASPSCR1 | 2.363132 | 0.295392 | 8 |
| RORA | 2.300871 | 0.287609 | 8 |
| PITPNC1 | 2.553579 | 0.364797 | 7 |
| MIR548H4 | 2.484623 | 0.354946 | 7 |
| TRAK1 | 3.108244 | 0.518041 | 6 |
| COLEC11 | 2.68768 | 0.447947 | 6 |
| CRADD | 2.675599 | 0.445933 | 6 |
| ARHGAP18 | 2.507719 | 0.417953 | 6 |
| MYO16 | 2.22252 | 0.37042 | 6 |
| TSNAX-DISC1 | 4.85897 | 0.971794 | 5 |
| ARHGEF7 | 2.83885 | 0.56777 | 5 |
| CPEB1-AS1 | 2.454983 | 0.490997 | 5 |
| SDK2 | 2.210224 | 0.442045 | 5 |
| GSG1 | 2.669005 | 0.667251 | 4 |
| EXT1 | 2.617463 | 0.654366 | 4 |
| RGL3 | 2.907137 | 0.969046 | 3 |
| SLC25A22 | 2.866456 | 0.955485 | 3 |
| SLC1A7 | 2.483699 | 0.8279 | 3 |
| ANKRD33B | 2.320262 | 0.773421 | 3 |
| DICER1 | 2.311872 | 0.770624 | 3 |
| CHTF18 | 4.241545 | 2.120773 | 2 |
| UHRF1 | 2.699139 | 1.34957 | 2 |
| UTRN | 2.618679 | 1.309339 | 2 |
| KIF21B | 2.540768 | 1.270384 | 2 |
| TRIM65 | 2.452721 | 1.226361 | 2 |
| DISC1 | 2.234015 | 1.117008 | 2 |
| KCNV2 | 2.919489 | 2.919489 | 1 |
| ARL6IP6 | 2.893929 | 2.893929 | 1 |
| DDT | 2.784336 | 2.784336 | 1 |
| DNAJC27 | 2.448671 | 2.448671 | 1 |

TABLE 160
Cancer Type PTPR_A

| Gene site | imp_sum | imp_mean | n |
|---|---|---|---|
| PTPRN2 | 6.431058 | 0.078428 | 82 |
| PRDM16 | 6.406972 | 0.090239 | 71 |
| HDAC4 | 4.815664 | 0.130153 | 37 |
| RBFOX3 | 4.732637 | 0.135218 | 35 |
| PAX6 | 3.06234 | 0.087495 | 35 |
| DIP2C | 1.560496 | 0.048765 | 32 |
| AGAP1 | 3.830952 | 0.153238 | 25 |
| PDGFRA | 2.657855 | 0.106314 | 25 |
| CAMTA1 | 2.622421 | 0.104897 | 25 |
| SATB2 | 1.957909 | 0.08158 | 24 |
| NXN | 4.055782 | 0.176338 | 23 |
| INPP5A | 3.642302 | 0.158361 | 23 |
| RIMBP2 | 2.060349 | 0.08958 | 23 |
| RPTOR | 1.800764 | 0.078294 | 23 |
| PRKCZ | 2.333896 | 0.106086 | 22 |
| SKI | 2.951222 | 0.140534 | 21 |
| ZIC4 | 1.708484 | 0.081356 | 21 |
| SDK1 | 2.579709 | 0.128985 | 20 |
| FRMD4A | 2.401239 | 0.120062 | 20 |
| MAD1L1 | 3.63752 | 0.191448 | 19 |
| CASZ1 | 3.147355 | 0.16565 | 19 |
| ZNF423 | 1.860218 | 0.097906 | 19 |
| SEPTIN9 | 2.497207 | 0.138734 | 18 |
| FOXK1 | 1.89308 | 0.105171 | 18 |
| ANKRD11 | 1.55778 | 0.086543 | 18 |
| OPCML | 2.030878 | 0.119463 | 17 |
| NAV2 | 1.69002 | 0.105626 | 16 |
| GLI2 | 3.175797 | 0.21172 | 15 |
| NFIX | 2.470268 | 0.164685 | 15 |
| DLX6-AS1 | 1.898316 | 0.126554 | 15 |
| LRMDA | 1.835344 | 0.122356 | 15 |
| COL23A1 | 1.58193 | 0.105462 | 15 |
| SLX1B-SULT1A4 | 1.58193 | 0.105462 | 15 |
| SLX1A | 1.58193 | 0.105462 | 15 |
| LOC606724 | 1.58193 | 0.105462 | 15 |
| RPS6KA2 | 3.344509 | 0.238894 | 14 |
| CUX1 | 3.268432 | 0.233459 | 14 |
| MYT1L | 3.692749 | 0.284058 | 13 |
| GSE1 | 2.119264 | 0.16302 | 13 |
| ZC3H3 | 2.388201 | 0.199017 | 12 |
| MIRLET7BHG | 2.292468 | 0.191039 | 12 |
| FBRSL1 | 2.218248 | 0.184854 | 12 |
| CMIP | 1.53067 | 0.127556 | 12 |
| ZC3H12D | 2.136626 | 0.194239 | 11 |
| CTBP2 | 1.69002 | 0.153638 | 11 |
| OTX1 | 1.953174 | 0.195317 | 10 |
| BCL11B | 1.950789 | 0.195079 | 10 |
| NR2F1-AS1 | 1.892998 | 0.1893 | 10 |
| CHST11 | 1.58193 | 0.158193 | 10 |
| ATP11A | 3.986085 | 0.442898 | 9 |
| SND1 | 2.730913 | 0.303435 | 9 |
| CACNA2D4 | 2.522718 | 0.280302 | 9 |
| KAZN | 2.258768 | 0.250974 | 9 |
| ASAP1 | 1.875856 | 0.208428 | 9 |
| AXIN2 | 1.840427 | 0.204492 | 9 |
| RUNX1 | 1.767827 | 0.196425 | 9 |
| TRAPPC12 | 1.712675 | 0.190297 | 9 |
| KCNH2 | 1.708484 | 0.189832 | 9 |
| VRK2 | 2.221373 | 0.277672 | 8 |
| DLEU1 | 1.917547 | 0.239693 | 8 |
| AFF3 | 1.715766 | 0.214471 | 8 |
| PPP2R2B | 1.570035 | 0.196254 | 8 |
| LHX2 | 2.101609 | 0.30023 | 7 |
| NAV1 | 1.77072 | 0.25296 | 7 |
| PACRG | 1.681042 | 0.240149 | 7 |
| PITPNC1 | 1.670551 | 0.23865 | 7 |
| RXRA | 1.564443 | 0.223492 | 7 |
| ANKS1A | 2.930102 | 0.48835 | 6 |
| COLEC11 | 2.887782 | 0.481297 | 6 |
| MYO16 | 1.966721 | 0.327787 | 6 |
| LRRFIP1 | 1.686953 | 0.281159 | 6 |
| FBXL18 | 1.684368 | 0.280728 | 6 |
| RUNDC3A | 2.696328 | 0.539266 | 5 |
| VAV2 | 2.04255 | 0.40851 | 5 |
| TSNAX-DISC1 | 1.952279 | 0.390456 | 5 |
| PRR5L | 1.570697 | 0.314139 | 5 |
| TK1 | 1.518714 | 0.303743 | 5 |
| ZBTB16 | 1.493677 | 0.298735 | 5 |
| RBMS3 | 2.001273 | 0.500318 | 4 |
| VOPP1 | 1.77671 | 0.444177 | 4 |
| PPM1H | 1.669106 | 0.417277 | 4 |
| MDM4 | 1.521963 | 0.380491 | 4 |
| CRB2 | 1.50801 | 0.377002 | 4 |
| RREB1 | 1.501624 | 0.375406 | 4 |
| NUDT1 | 2.223731 | 0.741244 | 3 |
| BFSP2 | 2.189251 | 0.72975 | 3 |
| SLC6A9 | 1.727698 | 0.575899 | 3 |
| KCNIP1 | 1.709047 | 0.569682 | 3 |
| GRIN2B | 1.553661 | 0.517887 | 3 |
| SLC25A22 | 1.487383 | 0.495794 | 3 |
| TRIM65 | 2.703379 | 1.351689 | 2 |
| SLC7A5 | 2.459291 | 1.229645 | 2 |
| CYTH1 | 1.918087 | 0.959043 | 2 |
| DENND11 | 1.903764 | 0.951882 | 2 |
| SLC25A10 | 1.708904 | 0.854452 | 2 |
| PDE4D | 1.688655 | 0.844328 | 2 |
| EXT2 | 1.667987 | 0.833993 | 2 |
| ANKLE2 | 1.623952 | 0.811976 | 2 |
| RNF216 | 1.498119 | 0.74906 | 2 |
| GTF2E2 | 1.912954 | 1.912954 | 1 |

TABLE 161
Cancer Type PTPR_B

| Gene site | imp_sum | imp_mean | n |
|---|---|---|---|
| PTPRN2 | 18.55999 | 0.226341 | 82 |
| PRDM16 | 13.61668 | 0.191784 | 71 |
| PCDHGA1 | 4.135023 | 0.070085 | 59 |
| PCDHGA2 | 3.688052 | 0.064703 | 57 |
| HDAC4 | 16.42095 | 0.443809 | 37 |
| RBFOX3 | 7.485864 | 0.213882 | 35 |
| PAX6 | 5.608833 | 0.160252 | 35 |
| DIP2C | 9.689409 | 0.302794 | 32 |
| SOX2-OT | 4.770368 | 0.164495 | 29 |
| GALNT9 | 5.415977 | 0.200592 | 27 |
| SHANK2 | 7.102857 | 0.273187 | 26 |
| ADARB2 | 4.593242 | 0.176663 | 26 |
| AGAP1 | 11.12632 | 0.445053 | 25 |
| CAMTA1 | 7.763658 | 0.310546 | 25 |
| PDGFRA | 5.687196 | 0.227488 | 25 |
| SATB2 | 5.259094 | 0.219129 | 24 |
| RPTOR | 11.15487 | 0.484994 | 23 |
| NXN | 7.122185 | 0.30966 | 23 |
| NCOR2 | 5.254821 | 0.22847 | 23 |
| INPP5A | 5.161147 | 0.224398 | 23 |
| RIMBP2 | 4.389689 | 0.190856 | 23 |
| PRKCZ | 5.665208 | 0.257509 | 22 |
| SKI | 6.496584 | 0.309361 | 21 |
| SIM2 | 4.620253 | 0.220012 | 21 |
| ZIC4 | 4.306227 | 0.205058 | 21 |
| ABR | 5.388896 | 0.269445 | 20 |
| FRMD4A | 4.694034 | 0.234702 | 20 |
| SDK1 | 3.941165 | 0.197058 | 20 |
| ZNF423 | 6.394277 | 0.336541 | 19 |
| MAD1L1 | 5.88838 | 0.309915 | 19 |
| SMG1P2 | 5.428921 | 0.285733 | 19 |
| BOLA2 | 5.428921 | 0.285733 | 19 |
| LOC613038 | 5.428921 | 0.285733 | 19 |
| KCNQ1 | 5.30451 | 0.279185 | 19 |
| CASZ1 | 4.145031 | 0.21816 | 19 |
| FOXK1 | 7.353913 | 0.408551 | 18 |
| SEPTIN9 | 5.788672 | 0.321593 | 18 |
| MCF2L | 4.622146 | 0.256786 | 18 |
| ANKRD11 | 3.704187 | 0.205788 | 18 |
| TBC1D16 | 3.524561 | 0.195809 | 18 |
| OPCML | 6.572972 | 0.386645 | 17 |
| FOXP1 | 5.653943 | 0.353371 | 16 |
| NAV2 | 4.61417 | 0.288386 | 16 |
| GLI2 | 6.422342 | 0.428156 | 15 |
| KIRREL3 | 5.718362 | 0.381224 | 15 |
| LRMDA | 4.481352 | 0.298757 | 15 |
| BAIAP2 | 4.371077 | 0.291405 | 15 |
| KNDC1 | 4.080509 | 0.272034 | 15 |
| ZBTB20 | 3.991421 | 0.266095 | 15 |
| DLX6-AS1 | 3.544562 | 0.236304 | 15 |
| RPS6KA2 | 7.537867 | 0.538419 | 14 |
| CUX1 | 6.525536 | 0.46611 | 14 |
| IQSEC1 | 4.926658 | 0.351904 | 14 |
| C7orf50 | 3.627468 | 0.259105 | 14 |
| CACNA1H | 3.439488 | 0.245678 | 14 |
| MYT1L | 5.823839 | 0.447988 | 13 |
| GSE1 | 5.04051 | 0.387732 | 13 |
| MSI2 | 4.337492 | 0.333653 | 13 |
| RFX4 | 3.999428 | 0.307648 | 13 |
| HOXC4 | 3.809413 | 0.293032 | 13 |
| MAML3 | 5.628857 | 0.469071 | 12 |
| ZC3H3 | 5.147971 | 0.428998 | 12 |
| CMIP | 4.897106 | 0.408092 | 12 |
| FBRSL1 | 4.625681 | 0.385473 | 12 |
| ADGRD1 | 3.982114 | 0.331843 | 12 |
| ZC3H12D | 4.02877 | 0.366252 | 11 |
| SLC38A10 | 3.986959 | 0.362451 | 11 |
| ANAPC16 | 3.5516 | 0.322873 | 11 |
| CTBP2 | 3.407661 | 0.309787 | 11 |
| TSPAN4 | 4.745661 | 0.474566 | 10 |
| AKAP13 | 3.975967 | 0.397597 | 10 |
| LBX1-AS1 | 3.623374 | 0.362337 | 10 |
| SND1 | 5.018913 | 0.557657 | 9 |
| ATP11A | 4.871857 | 0.541317 | 9 |
| SSBP3 | 4.321963 | 0.480218 | 9 |
| ADAMTS2 | 4.314706 | 0.479412 | 9 |
| ASAP1 | 4.019661 | 0.446629 | 9 |
| CACNA2D4 | 3.893763 | 0.43264 | 9 |
| KCNH2 | 3.800532 | 0.422281 | 9 |
| AXIN2 | 3.775791 | 0.419532 | 9 |
| RUNX1 | 3.624731 | 0.402748 | 9 |
| VRK2 | 6.313109 | 0.789139 | 8 |
| DLEU1 | 5.319829 | 0.664979 | 8 |
| PPP2R2B | 4.572386 | 0.571548 | 8 |
| DNMT3A | 3.907375 | 0.488422 | 8 |
| SYNJ2 | 3.601273 | 0.450159 | 8 |
| CXXC5 | 4.054631 | 0.579233 | 7 |
| MIR548H4 | 3.684494 | 0.526356 | 7 |
| RXRA | 3.553296 | 0.507614 | 7 |
| PLEC | 3.466331 | 0.49519 | 7 |
| VPS13D | 3.431918 | 0.490274 | 7 |
| COLEC11 | 3.717555 | 0.619593 | 6 |
| FBXL18 | 3.690005 | 0.615001 | 6 |
| SLC22A18AS | 3.658081 | 0.60968 | 6 |
| RUNDC3A | 4.428237 | 0.885647 | 5 |
| VAV2 | 3.785684 | 0.757137 | 5 |
| TSNAX-DISC1 | 3.404829 | 0.680966 | 5 |
| AP2A2 | 3.400921 | 0.680184 | 5 |
| ANKLE2 | 3.509638 | 1.754819 | 2 |
| TRIM65 | 3.451435 | 1.725717 | 2 |

TABLE 162
Cancer Type PXA

| Gene site | imp_sum | imp_mean | n |
|---|---|---|---|
| PTPRN2 | 20.26125 | 0.247088 | 82 |
| PRDM16 | 19.38353 | 0.273007 | 71 |
| PCDHGA1 | 4.002326 | 0.067836 | 59 |
| HDAC4 | 14.11703 | 0.381541 | 37 |
| PAX6 | 9.525175 | 0.272148 | 35 |
| RBFOX3 | 6.963974 | 0.198971 | 35 |
| DIP2C | 11.88264 | 0.371333 | 32 |
| SOX2-OT | 5.857559 | 0.201985 | 29 |
| GALNT9 | 4.077147 | 0.151005 | 27 |
| CAMTA1 | 8.413322 | 0.336533 | 25 |
| PDGFRA | 7.680209 | 0.307208 | 25 |
| AGAP1 | 5.894966 | 0.235799 | 25 |
| SATB2 | 7.42217 | 0.309257 | 24 |
| MEIS1 | 4.695101 | 0.195629 | 24 |
| RPTOR | 12.58887 | 0.547342 | 23 |
| NXN | 7.073047 | 0.307524 | 23 |
| INPP5A | 6.55427 | 0.284968 | 23 |
| NCOR2 | 5.953292 | 0.258839 | 23 |
| PRKCZ | 7.531474 | 0.34234 | 22 |
| SKI | 7.788973 | 0.370903 | 21 |
| FRMD4A | 6.41236 | 0.320618 | 20 |
| SDK1 | 6.399034 | 0.319952 | 20 |
| ABR | 5.681297 | 0.284065 | 20 |
| MAD1L1 | 11.5667 | 0.608774 | 19 |
| ZNF423 | 6.335363 | 0.33344 | 19 |
| CASZ1 | 5.397979 | 0.284104 | 19 |
| SMG1P2 | 4.917543 | 0.258818 | 19 |
| BOLA2 | 4.917543 | 0.258818 | 19 |
| LOC613038 | 4.917543 | 0.258818 | 19 |
| FOXK1 | 7.718463 | 0.428803 | 18 |
| TBC1D16 | 5.120114 | 0.284451 | 18 |
| ANKRD11 | 4.25437 | 0.236354 | 18 |
| HOXA3 | 3.97575 | 0.220875 | 18 |
| PAX6-AS1 | 5.228992 | 0.307588 | 17 |
| RCN1 | 5.228992 | 0.307588 | 17 |
| TBX15 | 5.186025 | 0.30506 | 17 |
| FOXP1 | 6.348768 | 0.396798 | 16 |
| NAV2 | 5.44581 | 0.340363 | 16 |
| SORBS2 | 5.172554 | 0.323285 | 16 |
| GLI2 | 8.08092 | 0.538728 | 15 |
| ZBTB20 | 6.828758 | 0.455251 | 15 |
| LRMDA | 5.159864 | 0.343991 | 15 |
| BAIAP2 | 4.856771 | 0.323785 | 15 |
| EMX2OS | 4.686864 | 0.312458 | 15 |
| NFIX | 4.573463 | 0.304898 | 15 |
| KIRREL3 | 4.522711 | 0.301514 | 15 |
| KNDC1 | 3.907792 | 0.260519 | 15 |
| PRKAG2 | 5.613557 | 0.400968 | 14 |
| RPS6KA2 | 5.561453 | 0.397247 | 14 |
| CUX1 | 5.005901 | 0.357564 | 14 |
| C7orf50 | 4.775226 | 0.341088 | 14 |
| CACNA1H | 4.104379 | 0.29317 | 14 |
| IQSEC1 | 3.912602 | 0.279472 | 14 |
| ARHGEF10 | 3.803718 | 0.271694 | 14 |
| MIR548F5 | 3.773457 | 0.269533 | 14 |
| MSI2 | 6.204519 | 0.477271 | 13 |
| SPTBN4 | 5.489224 | 0.422248 | 13 |
| MYT1L | 4.504388 | 0.346491 | 13 |
| RFX4 | 4.274853 | 0.328835 | 13 |
| ZC3H3 | 6.241606 | 0.520134 | 12 |
| MIRLET7BHG | 6.222207 | 0.518517 | 12 |
| CMIP | 4.766455 | 0.397205 | 12 |
| ISLR2 | 4.365895 | 0.363825 | 12 |
| FBRSL1 | 4.273014 | 0.356084 | 12 |
| ADGRD1 | 4.122763 | 0.343564 | 12 |
| MAML3 | 4.109295 | 0.342441 | 12 |
| CTNNA2 | 3.944939 | 0.328745 | 12 |
| RASA3 | 3.937396 | 0.328116 | 12 |
| RAD51B | 4.84344 | 0.440313 | 11 |
| ZC3H12D | 4.806616 | 0.436965 | 11 |
| CTBP2 | 4.244572 | 0.38587 | 11 |
| TBCD | 3.967836 | 0.360712 | 11 |
| VGLL4 | 3.936592 | 0.357872 | 11 |
| AUTS2 | 4.110377 | 0.411038 | 10 |
| KLHL29 | 4.033775 | 0.403377 | 10 |
| SH3RF3 | 3.825704 | 0.38257 | 10 |
| SND1 | 5.693729 | 0.632637 | 9 |
| TRAPPC12 | 4.834168 | 0.53713 | 9 |
| ADAMTS2 | 4.623229 | 0.513692 | 9 |
| RUNX1 | 4.543854 | 0.504873 | 9 |
| SSBP3 | 4.42173 | 0.491303 | 9 |
| CACNA2D4 | 4.382012 | 0.48689 | 9 |
| KAZN | 4.311313 | 0.479035 | 9 |
| KCNMA1 | 4.033786 | 0.448198 | 9 |
| NEAT1 | 3.908167 | 0.434241 | 9 |
| EGFR | 3.820696 | 0.424522 | 9 |
| TSPAN9 | 3.772676 | 0.419186 | 9 |
| SLC22A18 | 3.769861 | 0.418873 | 9 |
| MCC | 4.523935 | 0.565492 | 8 |
| AFF3 | 4.40779 | 0.550974 | 8 |
| LINC00311 | 4.102662 | 0.512833 | 8 |
| DLEU1 | 3.844641 | 0.48058 | 8 |
| DUSP6 | 5.719013 | 0.817002 | 7 |
| CRADD | 4.168197 | 0.694699 | 6 |
| SLC22A18AS | 4.007575 | 0.667929 | 6 |
| FBXL18 | 3.850436 | 0.641739 | 6 |
| TSNAX-DISC1 | 4.344618 | 0.868924 | 5 |
| ARHGEF7 | 3.753659 | 0.750732 | 5 |
| STAP2 | 3.92153 | 0.980383 | 4 |
| SLC25A10 | 3.852625 | 1.926312 | 2 |

TABLE 163
Cancer Type RB

| Gene site | imp_sum | imp_mean | n |
|---|---|---|---|
| PTPRN2 | 4.901971 | 0.05978 | 82 |
| PRDM16 | 8.704295 | 0.122596 | 71 |
| HDAC4 | 9.898104 | 0.267516 | 37 |
| RBFOX3 | 4.910006 | 0.140286 | 35 |
| PAX6 | 2.413042 | 0.068944 | 35 |
| DIP2C | 5.273425 | 0.164795 | 32 |
| GALNT9 | 5.441205 | 0.201526 | 27 |
| SHANK2 | 5.317331 | 0.204513 | 26 |
| AGAP1 | 6.973388 | 0.278936 | 25 |
| CAMTA1 | 5.24227 | 0.209691 | 25 |
| NCOR2 | 5.797198 | 0.252052 | 23 |
| NXN | 5.140158 | 0.223485 | 23 |
| RIMBP2 | 4.585475 | 0.199368 | 23 |
| INPP5A | 4.454718 | 0.193683 | 23 |
| RPTOR | 3.447995 | 0.149913 | 23 |
| PRKCZ | 4.444889 | 0.20204 | 22 |
| SKI | 5.546912 | 0.264139 | 21 |
| ZIC4 | 2.592634 | 0.123459 | 21 |
| SDK1 | 3.813111 | 0.190656 | 20 |
| ABR | 3.572512 | 0.178626 | 20 |
| MAD1L1 | 10.37545 | 0.546076 | 19 |
| SMG1P2 | 4.341857 | 0.228519 | 19 |
| BOLA2 | 4.341857 | 0.228519 | 19 |
| LOC613038 | 4.341857 | 0.228519 | 19 |
| CASZ1 | 3.823251 | 0.201224 | 19 |
| ZNF423 | 3.358649 | 0.176771 | 19 |
| KCNQ1 | 2.699977 | 0.142104 | 19 |
| ANKRD11 | 3.737851 | 0.207658 | 18 |
| TBC1D16 | 2.700736 | 0.150041 | 18 |
| FOXK1 | 2.346755 | 0.130375 | 18 |
| OPCML | 5.968518 | 0.351089 | 17 |
| PAX6-AS1 | 3.503387 | 0.206082 | 17 |
| RCN1 | 3.503387 | 0.206082 | 17 |
| FOXP1 | 5.755484 | 0.359718 | 16 |
| EBF3 | 3.313564 | 0.207098 | 16 |
| SLX1B-SULT1A4 | 3.1196 | 0.207973 | 15 |
| SLX1A | 3.1196 | 0.207973 | 15 |
| LOC606724 | 3.1196 | 0.207973 | 15 |
| LRMDA | 3.00295 | 0.200197 | 15 |
| KNDC1 | 2.790788 | 0.186053 | 15 |
| CUX1 | 3.751913 | 0.267994 | 14 |
| PRKAG2 | 3.03044 | 0.21646 | 14 |
| ARHGEF10 | 2.916299 | 0.208307 | 14 |
| MOB2 | 2.684732 | 0.191767 | 14 |
| IQSEC1 | 2.533911 | 0.180994 | 14 |
| MYT1L | 4.702899 | 0.361761 | 13 |
| MSI2 | 4.178197 | 0.3214 | 13 |
| GSE1 | 2.787183 | 0.214399 | 13 |
| MIRLET7BHG | 4.585815 | 0.382151 | 12 |
| FBRSL1 | 3.606563 | 0.300547 | 12 |
| ZC3H3 | 3.079863 | 0.256655 | 12 |
| CMIP | 2.793971 | 0.232831 | 12 |
| RAD51B | 2.416006 | 0.219637 | 11 |
| RGS12 | 3.158603 | 0.31586 | 10 |
| AKAP13 | 2.677057 | 0.267706 | 10 |
| FMN1 | 2.601988 | 0.260199 | 10 |
| ADGRA1 | 2.36914 | 0.236914 | 10 |
| SH3RF3 | 2.355094 | 0.235509 | 10 |
| ADAMTS2 | 4.911167 | 0.545685 | 9 |
| ATP11A | 4.712607 | 0.523623 | 9 |
| SND1 | 4.524242 | 0.502694 | 9 |
| TSPAN9 | 3.336084 | 0.370676 | 9 |
| CACNA2D4 | 2.887287 | 0.32081 | 9 |
| MGMT | 2.880248 | 0.320028 | 9 |
| AXIN2 | 2.525171 | 0.280575 | 9 |
| VRK2 | 4.160478 | 0.52006 | 8 |
| ABLIM2 | 3.597908 | 0.449739 | 8 |
| PPP2R2B | 3.516886 | 0.439611 | 8 |
| AFF3 | 2.643811 | 0.330476 | 8 |
| DNMT3A | 2.571322 | 0.321415 | 8 |
| ASPSCR1 | 2.46467 | 0.308084 | 8 |
| MSRA | 2.456027 | 0.307003 | 8 |
| DLEU1 | 2.425934 | 0.303242 | 8 |
| HOXB-AS3 | 2.749782 | 0.392826 | 7 |
| SOX6 | 2.533076 | 0.361868 | 7 |
| NAV1 | 2.501446 | 0.357349 | 7 |
| MIR548H4 | 2.427279 | 0.346754 | 7 |
| ARHGAP45 | 3.888732 | 0.648122 | 6 |
| CRADD | 3.279068 | 0.546511 | 6 |
| MYO16 | 2.502379 | 0.417063 | 6 |
| PRKN | 2.450354 | 0.408392 | 6 |
| COLEC11 | 2.353995 | 0.392332 | 6 |
| TSNAX-DISC1 | 4.482762 | 0.896552 | 5 |
| ARHGEF7 | 3.244894 | 0.648979 | 5 |
| SDK2 | 2.972038 | 0.594408 | 5 |
| EXT1 | 2.383674 | 0.595919 | 4 |
| CCND2 | 3.257018 | 1.085673 | 3 |
| SLC25A22 | 3.094645 | 1.031548 | 3 |
| CCDC167 | 2.502263 | 0.834088 | 3 |
| DICER1 | 2.371142 | 0.790381 | 3 |
| CHTF18 | 4.258503 | 2.129251 | 2 |
| ANKLE2 | 3.009641 | 1.504821 | 2 |
| TRIM65 | 2.683372 | 1.341686 | 2 |
| KIF21B | 2.646695 | 1.323348 | 2 |
| UHRF1 | 2.60598 | 1.30299 | 2 |
| GNB5 | 2.408241 | 1.204121 | 2 |
| KCNV2 | 2.913913 | 2.913913 | 1 |
| DDT | 2.827667 | 2.827667 | 1 |
| ARL6IP6 | 2.792841 | 2.792841 | 1 |
| DNAJC27 | 2.353962 | 2.353962 | 1 |

TABLE 164
Cancer Type RB_MYCN

| Gene site | imp_sum | imp_mean | n |
|---|---|---|---|
| PTPRN2 | 7.195324 | 0.087748 | 82 |
| PRDM16 | 4.382494 | 0.061725 | 71 |
| HDAC4 | 8.272875 | 0.223591 | 37 |
| PAX6 | 5.111473 | 0.146042 | 35 |
| RBFOX3 | 4.800351 | 0.137153 | 35 |
| DIP2C | 5.428499 | 0.169641 | 32 |
| GALNT9 | 3.318927 | 0.122923 | 27 |
| SHANK2 | 3.188553 | 0.122637 | 26 |
| CAMTA1 | 9.759744 | 0.39039 | 25 |
| AGAP1 | 7.47166 | 0.298866 | 25 |
| PDGFRA | 2.523211 | 0.100928 | 25 |
| RPTOR | 5.980657 | 0.260029 | 23 |
| NCOR2 | 5.458186 | 0.237312 | 23 |
| INPP5A | 5.290319 | 0.230014 | 23 |
| RIMBP2 | 3.048244 | 0.132532 | 23 |
| HOXB3 | 2.345977 | 0.101999 | 23 |
| NXN | 2.30479 | 0.100208 | 23 |
| PRKCZ | 4.998182 | 0.22719 | 22 |
| SKI | 5.721301 | 0.272443 | 21 |
| MAD1L1 | 11.286 | 0.594 | 19 |
| SMG1P2 | 4.790748 | 0.252145 | 19 |
| BOLA2 | 4.790748 | 0.252145 | 19 |
| LOC613038 | 4.790748 | 0.252145 | 19 |
| CASZ1 | 2.627735 | 0.138302 | 19 |
| FOXK1 | 2.847926 | 0.158218 | 18 |
| TBC1D16 | 2.641408 | 0.146745 | 18 |
| PAX6-AS1 | 5.304462 | 0.312027 | 17 |
| RCN1 | 5.304462 | 0.312027 | 17 |
| HBG2 | 3.274533 | 0.19262 | 17 |
| TBX15 | 2.751941 | 0.161879 | 17 |
| FOXP1 | 5.574482 | 0.348405 | 16 |
| EBF3 | 3.503737 | 0.218984 | 16 |
| NAV2 | 3.411115 | 0.213195 | 16 |
| LRMDA | 3.450637 | 0.230042 | 15 |
| KNDC1 | 3.081972 | 0.205465 | 15 |
| BAIAP2 | 2.981749 | 0.198783 | 15 |
| IQSEC1 | 3.484644 | 0.248903 | 14 |
| ARHGEF10 | 3.254416 | 0.232458 | 14 |
| MIR548F5 | 2.976081 | 0.212577 | 14 |
| GNG7 | 2.94744 | 0.210531 | 14 |
| MOB2 | 2.765342 | 0.197524 | 14 |
| C7orf50 | 2.647253 | 0.18909 | 14 |
| PPP2R2A | 2.380527 | 0.170038 | 14 |
| MSI2 | 6.174824 | 0.474986 | 13 |
| MYT1L | 4.461313 | 0.343178 | 13 |
| FBRSL1 | 4.266439 | 0.355537 | 12 |
| MIRLET7BHG | 3.926465 | 0.327205 | 12 |
| ZC3H3 | 3.870611 | 0.322551 | 12 |
| VGLL4 | 2.825087 | 0.256826 | 11 |
| GLUD1P2 | 2.322585 | 0.211144 | 11 |
| LBX1-AS1 | 3.264628 | 0.326463 | 10 |
| ETS1 | 2.722256 | 0.272226 | 10 |
| AKAP13 | 2.48025 | 0.248025 | 10 |
| AUTS2 | 2.349618 | 0.234962 | 10 |
| NBEA | 2.335896 | 0.23359 | 10 |
| SND1 | 5.29855 | 0.588728 | 9 |
| TSPAN9 | 4.693493 | 0.521499 | 9 |
| ATP11A | 3.860071 | 0.428897 | 9 |
| ADAMTS2 | 3.566091 | 0.396232 | 9 |
| AXIN2 | 3.420051 | 0.380006 | 9 |
| MGMT | 3.342588 | 0.371399 | 9 |
| CACNA2D4 | 3.219986 | 0.357776 | 9 |
| GPC6 | 3.118737 | 0.346526 | 9 |
| PPP2R2B | 4.045886 | 0.505736 | 8 |
| TRAPPC9 | 3.484088 | 0.435511 | 8 |
| VRK2 | 3.126736 | 0.390842 | 8 |
| DNMT3A | 3.056051 | 0.382006 | 8 |
| AFF3 | 2.644018 | 0.330502 | 8 |
| TRIM6-TRIM34 | 3.253256 | 0.464751 | 7 |
| VPS13D | 2.927376 | 0.418197 | 7 |
| MIR548H4 | 2.505199 | 0.357886 | 7 |
| CCDC85C | 4.449552 | 0.741592 | 6 |
| TRAK1 | 3.16209 | 0.527015 | 6 |
| CRADD | 2.834375 | 0.472396 | 6 |
| PBX1 | 2.718575 | 0.453096 | 6 |
| TRIM34 | 2.707714 | 0.451286 | 6 |
| MYO16 | 2.67766 | 0.446277 | 6 |
| TSNAX-DISC1 | 4.532751 | 0.90655 | 5 |
| SDK2 | 3.207546 | 0.641509 | 5 |
| ARHGEF7 | 2.946983 | 0.589397 | 5 |
| SNX29 | 2.567895 | 0.513579 | 5 |
| CACNA2D2 | 2.316446 | 0.463289 | 5 |
| GSG1 | 2.796905 | 0.699226 | 4 |
| EXT1 | 2.782114 | 0.695529 | 4 |
| DGKD | 2.413085 | 0.603271 | 4 |
| TULP4 | 3.428444 | 1.142815 | 3 |
| SLC25A22 | 2.87053 | 0.956843 | 3 |
| EPAS1 | 2.488338 | 0.829446 | 3 |
| DAGLB | 2.487952 | 0.829317 | 3 |
| CHID1 | 2.437806 | 0.812602 | 3 |
| ANKRD33B | 2.360123 | 0.786708 | 3 |
| CHTF18 | 4.257121 | 2.128561 | 2 |
| KIF21B | 2.723222 | 1.361611 | 2 |
| UHRF1 | 2.656527 | 1.328264 | 2 |
| TRIM65 | 2.587965 | 1.293982 | 2 |
| ATG4B | 2.378033 | 1.189016 | 2 |
| KCNV2 | 2.844112 | 2.844112 | 1 |
| ARL6IP6 | 2.692015 | 2.692015 | 1 |
| DDT | 2.610675 | 2.610675 | 1 |
| DNAJC27 | 2.459424 | 2.459424 | 1 |

TABLE 165
Cancer Type RGNT

| Gene site | imp_sum | imp_mean | n |
|---|---|---|---|
| PTPRN2 | 28.35935 | 0.345846 | 82 |
| PRDM16 | 18.3351 | 0.258241 | 71 |
| PCDHGA1 | 4.71592 | 0.079931 | 59 |
| PCDHGA2 | 4.71592 | 0.082735 | 57 |
| PCDHGA3 | 4.71592 | 0.087332 | 54 |
| PCDHGB1 | 4.71592 | 0.08898 | 53 |
| PCDHGA4 | 4.71592 | 0.092469 | 51 |
| PCDHGB2 | 5.032306 | 0.1027 | 49 |
| HDAC4 | 12.65834 | 0.342117 | 37 |
| PAX6 | 11.53394 | 0.329541 | 35 |
| RBFOX3 | 9.405788 | 0.268737 | 35 |
| DIP2C | 8.505616 | 0.265801 | 32 |
| SOX2-OT | 11.7201 | 0.404141 | 29 |
| GALNT9 | 4.717065 | 0.174706 | 27 |
| SHANK2 | 7.435439 | 0.285978 | 26 |
| ADARB2 | 4.672043 | 0.179694 | 26 |
| AGAP1 | 11.2714 | 0.450856 | 25 |
| CAMTA1 | 9.239245 | 0.36957 | 25 |
| PDGFRA | 7.122884 | 0.284915 | 25 |
| SATB2 | 7.173512 | 0.298896 | 24 |
| MEIS1 | 6.522382 | 0.271766 | 24 |
| RPTOR | 10.93966 | 0.475637 | 23 |
| NCOR2 | 8.649125 | 0.376049 | 23 |
| INPP5A | 6.930626 | 0.301332 | 23 |
| HOXB3 | 6.642556 | 0.288807 | 23 |
| NXN | 5.837885 | 0.253821 | 23 |
| PRKCZ | 7.999369 | 0.363608 | 22 |
| SKI | 11.84054 | 0.563835 | 21 |
| SIM2 | 9.07104 | 0.431954 | 21 |
| FRMD4A | 8.287969 | 0.414398 | 20 |
| ABR | 6.945064 | 0.347253 | 20 |
| SDK1 | 5.84499 | 0.292249 | 20 |
| MAD1L1 | 13.51159 | 0.711136 | 19 |
| SMG1P2 | 9.561161 | 0.503219 | 19 |
| BOLA2 | 9.561161 | 0.503219 | 19 |
| LOC613038 | 9.561161 | 0.503219 | 19 |
| ZNF423 | 8.580089 | 0.451584 | 19 |
| CASZ1 | 6.041944 | 0.317997 | 19 |
| KCNQ1 | 4.706689 | 0.24772 | 19 |
| MCF2L | 9.160776 | 0.508932 | 18 |
| FOXK1 | 7.883264 | 0.437959 | 18 |
| ANKRD11 | 6.391641 | 0.355091 | 18 |
| TBC1D16 | 5.996482 | 0.333138 | 18 |
| SEPTIN9 | 5.99005 | 0.332781 | 18 |
| OPCML | 9.744459 | 0.573203 | 17 |
| NAV2 | 6.679508 | 0.417469 | 16 |
| FOXP1 | 5.694375 | 0.355898 | 16 |
| SORBS2 | 4.846608 | 0.302913 | 16 |
| EBF3 | 4.526261 | 0.282891 | 16 |
| GLI2 | 12.80633 | 0.853756 | 15 |
| ZBTB20 | 6.33536 | 0.422357 | 15 |
| EMX2OS | 5.934061 | 0.395604 | 15 |
| LRMDA | 4.801419 | 0.320095 | 15 |
| BAIAP2 | 4.424395 | 0.29496 | 15 |
| IQSEC1 | 6.656421 | 0.475459 | 14 |
| RPS6KA2 | 6.340967 | 0.452926 | 14 |
| CUX1 | 6.335945 | 0.452568 | 14 |
| PRKAG2 | 5.634796 | 0.402485 | 14 |
| C7orf50 | 4.816359 | 0.344026 | 14 |
| ARHGEF10 | 4.794289 | 0.342449 | 14 |
| MSI2 | 7.173944 | 0.551842 | 13 |
| MYT1L | 6.796579 | 0.522814 | 13 |
| RFX4 | 5.610106 | 0.431547 | 13 |
| MIR9-3HG | 4.546077 | 0.349698 | 13 |
| CMIP | 6.03703 | 0.503086 | 12 |
| MIRLET7BHG | 5.241599 | 0.4368 | 12 |
| ZC3H3 | 4.856416 | 0.404701 | 12 |
| TNS3 | 4.479188 | 0.373266 | 12 |
| VGLL4 | 5.726971 | 0.520634 | 11 |
| RAD51B | 5.633707 | 0.512155 | 11 |
| CCDC140 | 5.44346 | 0.49486 | 11 |
| ZC3H12D | 5.207577 | 0.473416 | 11 |
| FGFR2 | 4.749396 | 0.431763 | 11 |
| SH3RF3 | 5.116472 | 0.511647 | 10 |
| KLHL29 | 4.973237 | 0.497324 | 10 |
| NTM | 4.777075 | 0.477708 | 10 |
| MAML2 | 4.754856 | 0.475486 | 10 |
| CHST11 | 4.634003 | 0.4634 | 10 |
| AKAP13 | 4.481869 | 0.448187 | 10 |
| ATP11A | 6.542237 | 0.726915 | 9 |
| SND1 | 6.464573 | 0.718286 | 9 |
| ASAP1 | 6.008052 | 0.667561 | 9 |
| ADAMTS2 | 5.236207 | 0.581801 | 9 |
| NOTCH1 | 5.15284 | 0.572538 | 9 |
| AXIN2 | 4.595346 | 0.510594 | 9 |
| ADGRB1 | 4.587885 | 0.509765 | 9 |
| TRAPPC12 | 4.519644 | 0.502183 | 9 |
| LINC00311 | 6.528932 | 0.816116 | 8 |
| MSRA | 4.541659 | 0.567707 | 8 |
| BAHCC1 | 4.471947 | 0.558993 | 8 |
| DUSP6 | 7.783034 | 1.111862 | 7 |
| NAV1 | 5.24062 | 0.74866 | 7 |
| LINC00461 | 4.893859 | 0.699123 | 7 |
| FBXL18 | 4.979822 | 0.82997 | 6 |
| RUNDC3A | 5.492642 | 1.098528 | 5 |
| VAV2 | 4.711378 | 0.942276 | 5 |
| TSNAX-DISC1 | 4.625445 | 0.925089 | 5 |
| STAP2 | 5.101563 | 1.275391 | 4 |
| RBMS3 | 4.78651 | 1.196628 | 4 |
| SOX10 | 5.438382 | 2.719191 | 2 |

TABLE 166
Cancer Type SCHW

| Gene site | imp_sum | imp_mean | n |
|---|---|---|---|
| PTPRN2 | 18.12891 | 0.221084 | 82 |
| PRDM16 | 17.27083 | 0.243251 | 71 |
| PCDHGA1 | 4.622623 | 0.07835 | 59 |
| PCDHGA2 | 4.622623 | 0.081099 | 57 |
| PCDHGA3 | 3.922562 | 0.07264 | 54 |
| PCDHGB1 | 3.922562 | 0.074011 | 53 |
| PCDHGA4 | 3.922562 | 0.076913 | 51 |
| PCDHGB2 | 4.238948 | 0.086509 | 49 |
| PCDHGA5 | 3.922562 | 0.083459 | 47 |
| HDAC4 | 14.71199 | 0.397621 | 37 |
| PAX6 | 12.27248 | 0.350642 | 35 |
| RBFOX3 | 6.903027 | 0.197229 | 35 |
| DIP2C | 11.14531 | 0.348291 | 32 |
| SOX2-OT | 9.275725 | 0.319853 | 29 |
| SHANK2 | 5.840376 | 0.22463 | 26 |
| ADARB2 | 4.148071 | 0.159541 | 26 |
| AGAP1 | 9.096533 | 0.363861 | 25 |
| CAMTA1 | 6.895361 | 0.275814 | 25 |
| PDGFRA | 6.799302 | 0.271972 | 25 |
| SATB2 | 4.169054 | 0.173711 | 24 |
| RPTOR | 11.85899 | 0.515608 | 23 |
| INPP5A | 7.671982 | 0.333564 | 23 |
| NCOR2 | 6.603778 | 0.287121 | 23 |
| PRKCZ | 6.016055 | 0.273457 | 22 |
| SKI | 13.01664 | 0.61984 | 21 |
| FRMD4A | 7.580493 | 0.379025 | 20 |
| SDK1 | 5.778566 | 0.288928 | 20 |
| ABR | 5.296441 | 0.264822 | 20 |
| MAD1L1 | 11.97168 | 0.630088 | 19 |
| ZNF423 | 7.148908 | 0.376258 | 19 |
| SMG1P2 | 6.66403 | 0.350738 | 19 |
| BOLA2 | 6.66403 | 0.350738 | 19 |
| LOC613038 | 6.66403 | 0.350738 | 19 |
| CASZ1 | 5.936643 | 0.312455 | 19 |
| FOXK1 | 8.515619 | 0.47309 | 18 |
| TBC1D16 | 7.090589 | 0.393922 | 18 |
| SEPTIN9 | 6.76469 | 0.375816 | 18 |
| ANKRD11 | 4.752093 | 0.264005 | 18 |
| MCF2L | 4.090501 | 0.22725 | 18 |
| PAX6-AS1 | 7.6399 | 0.449406 | 17 |
| RCN1 | 7.6399 | 0.449406 | 17 |
| FOXP1 | 6.437553 | 0.402347 | 16 |
| NAV2 | 6.150183 | 0.384386 | 16 |
| GLI2 | 7.068317 | 0.471221 | 15 |
| ZBTB20 | 4.663726 | 0.310915 | 15 |
| BAIAP2 | 4.607747 | 0.307183 | 15 |
| KIRREL3 | 4.381034 | 0.292069 | 15 |
| NFIX | 3.930406 | 0.262027 | 15 |
| CUX1 | 6.776737 | 0.484053 | 14 |
| RPS6KA2 | 5.766261 | 0.411876 | 14 |
| C7orf50 | 4.866972 | 0.347641 | 14 |
| CACNA1H | 4.858249 | 0.347018 | 14 |
| IQSEC1 | 4.78237 | 0.341598 | 14 |
| ARHGEF10 | 4.535499 | 0.323964 | 14 |
| MIR548F5 | 3.867145 | 0.276225 | 14 |
| MSI2 | 6.901005 | 0.530847 | 13 |
| MYT1L | 4.843067 | 0.372544 | 13 |
| CMIP | 6.485181 | 0.540432 | 12 |
| ZC3H3 | 5.697761 | 0.474813 | 12 |
| TNS3 | 5.012632 | 0.417719 | 12 |
| ADGRD1 | 4.211266 | 0.350939 | 12 |
| FBRSL1 | 4.155268 | 0.346272 | 12 |
| VGLL4 | 4.828727 | 0.438975 | 11 |
| FGFR2 | 4.826384 | 0.438762 | 11 |
| RAD51B | 4.779676 | 0.434516 | 11 |
| CTBP2 | 4.41779 | 0.401617 | 11 |
| SPON2 | 4.072423 | 0.37022 | 11 |
| ANAPC16 | 3.97173 | 0.361066 | 11 |
| ZC3H12D | 3.883146 | 0.353013 | 11 |
| TSPAN4 | 4.781925 | 0.478193 | 10 |
| ACOT7 | 4.757242 | 0.475724 | 10 |
| AKAP13 | 4.524347 | 0.452435 | 10 |
| SH3RF3 | 4.35329 | 0.435329 | 10 |
| GAS7 | 4.327703 | 0.43277 | 10 |
| NR2F1-AS1 | 3.88907 | 0.388907 | 10 |
| SND1 | 6.696641 | 0.744071 | 9 |
| ATP11A | 6.204406 | 0.689378 | 9 |
| TRAPPC12 | 5.123195 | 0.569244 | 9 |
| ADAMTS2 | 4.999018 | 0.555446 | 9 |
| SPECC1 | 3.979139 | 0.442127 | 9 |
| KCNH2 | 3.875947 | 0.430661 | 9 |
| LINC00311 | 5.825952 | 0.728244 | 8 |
| MSRA | 5.302974 | 0.662872 | 8 |
| GRIK2 | 4.49141 | 0.561426 | 8 |
| DNMT3A | 4.206901 | 0.525863 | 8 |
| DLEU1 | 3.939931 | 0.492491 | 8 |
| MIR548H4 | 4.554369 | 0.650624 | 7 |
| LINC00461 | 4.541013 | 0.648716 | 7 |
| DUSP6 | 3.932552 | 0.561793 | 7 |
| C19orf25 | 3.930343 | 0.561478 | 7 |
| RXRA | 3.880434 | 0.554348 | 7 |
| FBXL18 | 5.204025 | 0.867338 | 6 |
| CCDC177 | 4.889198 | 0.814866 | 6 |
| SLC22A18AS | 3.930148 | 0.655025 | 6 |
| RUNDC3A | 5.719208 | 1.143842 | 5 |
| TSNAX-DISC1 | 4.920333 | 0.984067 | 5 |
| ARHGEF7 | 4.223877 | 0.844775 | 5 |
| TBC1D7 | 3.852973 | 1.284324 | 3 |
| SOX10 | 4.443244 | 2.221622 | 2 |
| SLC25A10 | 3.978218 | 1.989109 | 2 |

TABLE 167
Cancer Type SEGA

| Gene site | imp_sum | imp_mean | n |
|---|---|---|---|
| PTPRN2 | 29.02048 | 0.353908 | 82 |
| PRDM16 | 26.6926 | 0.375952 | 71 |
| PCDHGA1 | 8.996433 | 0.152482 | 59 |
| PCDHGA2 | 8.680047 | 0.152282 | 57 |
| PCDHGA3 | 8.034496 | 0.148787 | 54 |
| PCDHGB1 | 7.71811 | 0.145625 | 53 |
| PCDHGA4 | 7.71811 | 0.151335 | 51 |
| PCDHGB2 | 7.401724 | 0.151056 | 49 |
| PCDHGA5 | 6.994791 | 0.148825 | 47 |
| PCDHGB3 | 6.269448 | 0.145801 | 43 |
| PCDHGA6 | 6.269448 | 0.156736 | 40 |
| HDAC4 | 19.58775 | 0.529399 | 37 |
| PCDHGA7 | 5.953062 | 0.160894 | 37 |
| PAX6 | 14.09937 | 0.402839 | 35 |
| RBFOX3 | 9.517654 | 0.271933 | 35 |
| PCDHGB4 | 5.636676 | 0.161048 | 35 |
| PCDHGA8 | 5.636676 | 0.161048 | 35 |
| DIP2C | 13.04091 | 0.407528 | 32 |
| PCDHGB5 | 5.636676 | 0.176146 | 32 |
| SOX2-OT | 10.00762 | 0.34509 | 29 |
| GALNT9 | 8.426724 | 0.312101 | 27 |
| SHANK2 | 8.662506 | 0.333173 | 26 |
| ADARB2 | 7.09401 | 0.272847 | 26 |
| AGAP1 | 13.3909 | 0.535636 | 25 |
| CAMTA1 | 10.94498 | 0.437799 | 25 |
| PDGFRA | 7.666178 | 0.306647 | 25 |
| SATB2 | 8.571828 | 0.357159 | 24 |
| MEIS1 | 6.573848 | 0.27391 | 24 |
| RPTOR | 16.42404 | 0.714089 | 23 |
| NCOR2 | 12.07995 | 0.525215 | 23 |
| NXN | 7.265405 | 0.315887 | 23 |
| HOXB3 | 5.758261 | 0.250359 | 23 |
| INPP5A | 5.558288 | 0.241665 | 23 |
| PRKCZ | 8.292005 | 0.376909 | 22 |
| SKI | 11.23111 | 0.534815 | 21 |
| ZIC4 | 6.017229 | 0.286535 | 21 |
| FRMD4A | 8.362341 | 0.418117 | 20 |
| SDK1 | 7.144768 | 0.357238 | 20 |
| ABR | 6.229435 | 0.311472 | 20 |
| MAD1L1 | 14.39206 | 0.757477 | 19 |
| ZNF423 | 11.2155 | 0.59029 | 19 |
| CASZ1 | 7.8292 | 0.412063 | 19 |
| SMG1P2 | 7.050443 | 0.371076 | 19 |
| BOLA2 | 7.050443 | 0.371076 | 19 |
| LOC613038 | 7.050443 | 0.371076 | 19 |
| FOXK1 | 9.55413 | 0.530785 | 18 |
| ANKRD11 | 7.699424 | 0.427746 | 18 |
| MCF2L | 7.344672 | 0.408037 | 18 |
| TBC1D16 | 6.84073 | 0.380041 | 18 |
| SEPTIN9 | 6.522388 | 0.362355 | 18 |
| OPCML | 7.410812 | 0.43593 | 17 |
| TBX15 | 6.290804 | 0.370047 | 17 |
| PAX6-AS1 | 5.799636 | 0.341155 | 17 |
| RCN1 | 5.799636 | 0.341155 | 17 |
| NAV2 | 6.981482 | 0.436343 | 16 |
| FOXP1 | 6.970221 | 0.435639 | 16 |
| SORBS2 | 6.046814 | 0.377926 | 16 |
| GLI2 | 9.618994 | 0.641266 | 15 |
| ZBTB20 | 7.555842 | 0.503723 | 15 |
| LRMDA | 6.710239 | 0.447349 | 15 |
| SLX1B-SULT1A4 | 6.386947 | 0.425796 | 15 |
| SLX1A | 6.386947 | 0.425796 | 15 |
| LOC606724 | 6.386947 | 0.425796 | 15 |
| KIRREL3 | 6.201228 | 0.413415 | 15 |
| NFIX | 6.051682 | 0.403445 | 15 |
| KNDC1 | 5.465558 | 0.364371 | 15 |
| RPS6KA2 | 8.600181 | 0.614299 | 14 |
| MIR548F5 | 6.434363 | 0.459597 | 14 |
| CUX1 | 6.083478 | 0.434534 | 14 |
| ARHGEF10 | 6.002265 | 0.428733 | 14 |
| PRKAG2 | 5.718673 | 0.408477 | 14 |
| MSI2 | 10.13503 | 0.779618 | 13 |
| MYT1L | 6.429776 | 0.494598 | 13 |
| SPTBN4 | 5.741059 | 0.44162 | 13 |
| RFX4 | 5.600712 | 0.430824 | 13 |
| ZC3H3 | 7.296484 | 0.60804 | 12 |
| CMIP | 6.604265 | 0.550355 | 12 |
| MIRLET7BHG | 6.154127 | 0.512844 | 12 |
| FBRSL1 | 6.109633 | 0.509136 | 12 |
| TNS3 | 5.780302 | 0.481692 | 12 |
| CTNNA2 | 5.759007 | 0.479917 | 12 |
| TBX4 | 5.550192 | 0.462516 | 12 |
| ZC3H12D | 6.890304 | 0.626391 | 11 |
| VGLL4 | 6.233194 | 0.566654 | 11 |
| SPON2 | 6.144651 | 0.558605 | 11 |
| FGFR2 | 5.607308 | 0.509755 | 11 |
| RAD51B | 5.571527 | 0.506502 | 11 |
| ACOT7 | 5.817013 | 0.581701 | 10 |
| NR2F1-AS1 | 5.500147 | 0.550015 | 10 |
| ATP11A | 7.600119 | 0.844458 | 9 |
| SND1 | 7.195881 | 0.799542 | 9 |
| ADAMTS2 | 6.730098 | 0.747789 | 9 |
| AXIN2 | 6.121065 | 0.680118 | 9 |
| TRAPPC12 | 5.98463 | 0.664959 | 9 |
| MSRA | 6.237314 | 0.779664 | 8 |
| LINC00311 | 5.4446 | 0.680575 | 8 |
| NAV1 | 5.966218 | 0.852317 | 7 |
| VPS13D | 5.545241 | 0.792177 | 7 |
| TSNAX-DISC1 | 5.601673 | 1.120335 | 5 |
| RUNDC3A | 5.495706 | 1.099141 | 5 |

TABLE 168
Cancer Type SFT_HMPC

| Gene site | imp_sum | imp_mean | n |
|---|---|---|---|
| PTPRN2 | 12.24457 | 0.149324 | 82 |
| PRDM16 | 8.735533 | 0.123036 | 71 |
| PCDHGA1 | 2.896052 | 0.049086 | 59 |
| PCDHGA2 | 3.212438 | 0.056359 | 57 |
| HDAC4 | 15.42218 | 0.416816 | 37 |
| RBFOX3 | 5.849642 | 0.167133 | 35 |
| PAX6 | 4.371199 | 0.124891 | 35 |
| DIP2C | 7.825877 | 0.244559 | 32 |
| SOX2-OT | 3.668157 | 0.126488 | 29 |
| GALNT9 | 3.100134 | 0.11482 | 27 |
| SHANK2 | 4.732856 | 0.182033 | 26 |
| ADARB2 | 3.034991 | 0.11673 | 26 |
| AGAP1 | 9.403838 | 0.376154 | 25 |
| PDGFRA | 5.60567 | 0.224227 | 25 |
| CAMTA1 | 3.06187 | 0.122475 | 25 |
| RPTOR | 8.730063 | 0.379568 | 23 |
| NXN | 4.785711 | 0.208074 | 23 |
| NCOR2 | 3.654354 | 0.158885 | 23 |
| INPP5A | 2.705938 | 0.117649 | 23 |
| PRKCZ | 5.284244 | 0.240193 | 22 |
| SKI | 5.042624 | 0.240125 | 21 |
| FRMD4A | 4.644678 | 0.232234 | 20 |
| SDK1 | 4.376963 | 0.218848 | 20 |
| MAD1L1 | 8.270841 | 0.435307 | 19 |
| ZNF423 | 4.948134 | 0.260428 | 19 |
| KCNQ1 | 3.124892 | 0.164468 | 19 |
| SMG1P2 | 2.74439 | 0.144442 | 19 |
| BOLA2 | 2.74439 | 0.144442 | 19 |
| LOC613038 | 2.74439 | 0.144442 | 19 |
| FOXK1 | 5.302466 | 0.294581 | 18 |
| TBC1D16 | 4.312583 | 0.239588 | 18 |
| SEPTIN9 | 3.934468 | 0.218582 | 18 |
| MCF2L | 3.924385 | 0.218021 | 18 |
| ANKRD11 | 3.412792 | 0.1896 | 18 |
| TBX15 | 3.145523 | 0.185031 | 17 |
| OPCML | 2.788615 | 0.164036 | 17 |
| FOXP1 | 6.145645 | 0.384103 | 16 |
| NAV2 | 5.405925 | 0.33787 | 16 |
| EBF3 | 4.332831 | 0.270802 | 16 |
| NFIX | 4.838829 | 0.322589 | 15 |
| ZBTB20 | 4.600342 | 0.306689 | 15 |
| GLI2 | 4.120826 | 0.274722 | 15 |
| SLX1B-SULT1A4 | 3.41389 | 0.227593 | 15 |
| SLX1A | 3.41389 | 0.227593 | 15 |
| LOC606724 | 3.41389 | 0.227593 | 15 |
| RPS6KA2 | 6.101722 | 0.435837 | 14 |
| IQSEC1 | 5.106277 | 0.364734 | 14 |
| C7orf50 | 4.751788 | 0.339413 | 14 |
| PRKAG2 | 3.580027 | 0.255716 | 14 |
| CUX1 | 3.278226 | 0.234159 | 14 |
| MSI2 | 4.156053 | 0.319696 | 13 |
| MYT1L | 3.817407 | 0.293647 | 13 |
| RFX4 | 3.072925 | 0.236379 | 13 |
| HOXC4 | 2.635727 | 0.202748 | 13 |
| CMIP | 5.84176 | 0.486813 | 12 |
| FBRSL1 | 4.394747 | 0.366229 | 12 |
| ADGRD1 | 4.266942 | 0.355578 | 12 |
| MIRLET7BHG | 3.586183 | 0.298849 | 12 |
| MAML3 | 2.631919 | 0.219327 | 12 |
| COL4A1 | 3.672924 | 0.333902 | 11 |
| PCDHGC3 | 2.896052 | 0.263277 | 11 |
| SLC38A10 | 2.870792 | 0.260981 | 11 |
| TSPAN4 | 4.515049 | 0.451505 | 10 |
| GAS7 | 3.967262 | 0.396726 | 10 |
| AKAP13 | 3.756983 | 0.375698 | 10 |
| ACOT7 | 3.560002 | 0.356 | 10 |
| KLHL29 | 3.262059 | 0.326206 | 10 |
| BCL11B | 2.961893 | 0.296189 | 10 |
| SH3RF3 | 2.812441 | 0.281244 | 10 |
| CHST11 | 2.709323 | 0.270932 | 10 |
| SND1 | 4.516105 | 0.501789 | 9 |
| AXIN2 | 3.578296 | 0.397588 | 9 |
| ADAMTS2 | 3.089809 | 0.343312 | 9 |
| SSBP3 | 2.952884 | 0.328098 | 9 |
| MGMT | 2.887198 | 0.3208 | 9 |
| EGFR | 2.665465 | 0.296163 | 9 |
| DLEU1 | 3.117279 | 0.38966 | 8 |
| VEPH1 | 2.998216 | 0.374777 | 8 |
| C19orf25 | 4.207244 | 0.601035 | 7 |
| VPS13D | 3.727292 | 0.53247 | 7 |
| MIR548H4 | 3.215443 | 0.459349 | 7 |
| PCCA | 3.061603 | 0.437372 | 7 |
| LINC01140 | 2.728831 | 0.389833 | 7 |
| LINC00461 | 2.705385 | 0.386484 | 7 |
| TACC2 | 2.680219 | 0.382888 | 7 |
| NAV1 | 2.666223 | 0.380889 | 7 |
| CRADD | 3.201265 | 0.533544 | 6 |
| FBXL18 | 3.084465 | 0.514077 | 6 |
| STRA6 | 3.051614 | 0.508602 | 6 |
| SLC22A18AS | 2.968643 | 0.494774 | 6 |
| FMNL2 | 2.839545 | 0.473257 | 6 |
| TSNAX-DISC1 | 4.482228 | 0.896446 | 5 |
| RUNDC3A | 4.415637 | 0.883127 | 5 |
| BCAR1 | 2.89008 | 0.578016 | 5 |
| ARHGEF7 | 2.633655 | 0.526731 | 5 |
| DAGLB | 3.082435 | 1.027478 | 3 |
| DICER1 | 2.741322 | 0.913774 | 3 |
| SLC25A10 | 3.081614 | 1.540807 | 2 |
| CHTF18 | 2.836534 | 1.418267 | 2 |
| RALGAPA2 | 2.792279 | 1.39614 | 2 |

TABLE 169
Cancer Type SNUC_IDH2

| Gene site | imp_sum | imp_mean | n |
|---|---|---|---|
| PTPRN2 | 1.943547 | 0.023702 | 82 |
| PCDHGA1 | 1.997666 | 0.033859 | 59 |
| PCDHGA2 | 1.997666 | 0.035047 | 57 |
| PCDHGA3 | 1.997666 | 0.036994 | 54 |
| PCDHGB1 | 1.997666 | 0.037692 | 53 |
| PCDHGA4 | 1.997666 | 0.03917 | 51 |
| PCDHGB2 | 1.997666 | 0.040769 | 49 |
| PCDHGA5 | 1.997666 | 0.042504 | 47 |
| PCDHGB3 | 1.997666 | 0.046457 | 43 |
| HDAC4 | 6.857323 | 0.185333 | 37 |
| PAX6 | 2.847474 | 0.081356 | 35 |
| DIP2C | 4.269002 | 0.133406 | 32 |
| SOX2-OT | 2.93842 | 0.101325 | 29 |
| SHANK2 | 1.912098 | 0.073542 | 26 |
| AGAP1 | 5.525905 | 0.221036 | 25 |
| PDGFRA | 2.284215 | 0.091369 | 25 |
| RPTOR | 4.514173 | 0.196268 | 23 |
| RIMBP2 | 2.847474 | 0.123803 | 23 |
| NCOR2 | 2.500333 | 0.10871 | 23 |
| INPP5A | 2.413317 | 0.104927 | 23 |
| PRKCZ | 2.569685 | 0.116804 | 22 |
| SKI | 5.805435 | 0.276449 | 21 |
| SIM2 | 1.898316 | 0.090396 | 21 |
| FRMD4A | 3.44193 | 0.172097 | 20 |
| MAD1L1 | 4.732794 | 0.249094 | 19 |
| SMG1P2 | 3.661984 | 0.192736 | 19 |
| BOLA2 | 3.661984 | 0.192736 | 19 |
| LOC613038 | 3.661984 | 0.192736 | 19 |
| KCNQ1 | 3.422943 | 0.180155 | 19 |
| ZNF423 | 1.898316 | 0.099911 | 19 |
| FOXK1 | 6.056056 | 0.336448 | 18 |
| HOXA3 | 2.782692 | 0.154594 | 18 |
| FOXP1 | 4.921271 | 0.307579 | 16 |
| BAIAP2 | 2.430132 | 0.162009 | 15 |
| ZBTB20 | 2.120404 | 0.14136 | 15 |
| RPS6KA2 | 3.714062 | 0.26529 | 14 |
| CUX1 | 3.528898 | 0.252064 | 14 |
| SYCP2L | 2.657751 | 0.189839 | 14 |
| IQSEC1 | 2.574887 | 0.18392 | 14 |
| PRKAG2 | 2.135232 | 0.152517 | 14 |
| HOXA10-HOXA9 | 2.543701 | 0.195669 | 13 |
| MSI2 | 1.916386 | 0.147414 | 13 |
| CMIP | 3.489611 | 0.290801 | 12 |
| FBRSL1 | 2.473605 | 0.206134 | 12 |
| MAML3 | 2.226349 | 0.185529 | 12 |
| TNS3 | 2.066662 | 0.172222 | 12 |
| GLUD1P2 | 2.424013 | 0.220365 | 11 |
| RAD51B | 1.840497 | 0.167318 | 11 |
| TSPAN4 | 3.382803 | 0.33828 | 10 |
| ACOT7 | 3.110649 | 0.311065 | 10 |
| SPPL2B | 3.037791 | 0.303779 | 10 |
| AKAP13 | 2.417812 | 0.241781 | 10 |
| BCL11B | 2.215527 | 0.221553 | 10 |
| ATP11A | 5.310308 | 0.590034 | 9 |
| SND1 | 3.85585 | 0.428428 | 9 |
| ADAMTS2 | 3.107474 | 0.345275 | 9 |
| AXIN2 | 2.218268 | 0.246474 | 9 |
| SLC22A18 | 2.2033 | 0.244811 | 9 |
| TSPAN9 | 2.069869 | 0.229985 | 9 |
| LHX4 | 4.005276 | 0.500659 | 8 |
| LINC00311 | 3.115602 | 0.38945 | 8 |
| DLEU1 | 2.856946 | 0.357118 | 8 |
| MSRA | 2.169484 | 0.271186 | 8 |
| TRAPPC9 | 1.898316 | 0.237289 | 8 |
| MIR548H4 | 2.378158 | 0.339737 | 7 |
| ITPK1 | 2.179421 | 0.311346 | 7 |
| NAV1 | 2.020792 | 0.288685 | 7 |
| VPS13D | 1.986051 | 0.283722 | 7 |
| CXXC5 | 1.916586 | 0.273798 | 7 |
| FBXL18 | 3.390413 | 0.565069 | 6 |
| COQ8A | 2.523787 | 0.420631 | 6 |
| CRADD | 2.414877 | 0.40248 | 6 |
| ANKS1A | 2.243284 | 0.373881 | 6 |
| CASP8 | 3.74288 | 0.748576 | 5 |
| RUNDC3A | 2.976877 | 0.595375 | 5 |
| ARHGEF7 | 2.906795 | 0.581359 | 5 |
| ATP2B4 | 2.576039 | 0.515208 | 5 |
| TSNAX-DISC1 | 2.401902 | 0.48038 | 5 |
| GAREM2 | 2.047481 | 0.409496 | 5 |
| BCAR1 | 1.962986 | 0.392597 | 5 |
| GRIP1 | 1.962096 | 0.392419 | 5 |
| CADM1 | 1.882871 | 0.376574 | 5 |
| TUBA1C | 3.333471 | 0.833368 | 4 |
| NHSL1 | 2.851141 | 0.712785 | 4 |
| STAP2 | 2.843336 | 0.710834 | 4 |
| GSG1 | 2.639775 | 0.659944 | 4 |
| RAI1 | 2.44892 | 0.61223 | 4 |
| LINC00856 | 2.153666 | 0.538417 | 4 |
| ZMIZ1 | 2.070196 | 0.517549 | 4 |
| DTNA | 2.010819 | 0.502705 | 4 |
| DICER1 | 2.424191 | 0.808064 | 3 |
| SLC6A9 | 2.405465 | 0.801822 | 3 |
| TMBIM1 | 1.95763 | 0.652543 | 3 |
| DAGLB | 1.900425 | 0.633475 | 3 |
| RALGAPA2 | 2.676986 | 1.338493 | 2 |
| SFXN5 | 2.155911 | 1.077956 | 2 |
| CHTF18 | 2.137129 | 1.068564 | 2 |
| ERI3 | 1.891715 | 0.945857 | 2 |
| TRIP6 | 1.846681 | 0.923341 | 2 |
| TOM1L2 | 1.848306 | 1.848306 | 1 |

TABLE 170
Cancer Type ST_EPN_RELA_A

| Gene site | imp_sum | imp_mean | n |
|---|---|---|---|
| PTPRN2 | 17.2971 | 0.21094 | 82 |
| PRDM16 | 19.37879 | 0.272941 | 71 |
| PCDHGA1 | 4.72789 | 0.080134 | 59 |
| PCDHGA2 | 4.739979 | 0.083158 | 57 |
| PCDHGA3 | 5.056365 | 0.093636 | 54 |
| PCDHGB1 | 5.056365 | 0.095403 | 53 |
| PCDHGA4 | 5.056365 | 0.099144 | 51 |
| PCDHGB2 | 4.739979 | 0.096734 | 49 |
| PCDHGA5 | 4.423593 | 0.094119 | 47 |
| HDAC4 | 14.85662 | 0.40153 | 37 |
| RBFOX3 | 11.18775 | 0.31965 | 35 |
| PAX6 | 10.94274 | 0.31265 | 35 |
| DIP2C | 9.369048 | 0.292783 | 32 |
| SOX2-OT | 7.508662 | 0.258919 | 29 |
| SHANK2 | 6.785761 | 0.260991 | 26 |
| ADARB2 | 5.195607 | 0.199831 | 26 |
| AGAP1 | 10.34313 | 0.413725 | 25 |
| CAMTA1 | 8.581708 | 0.343268 | 25 |
| PDGFRA | 4.889735 | 0.195589 | 25 |
| SATB2 | 6.065678 | 0.252737 | 24 |
| MEIS1 | 4.400045 | 0.183335 | 24 |
| RPTOR | 10.77007 | 0.468264 | 23 |
| NCOR2 | 7.261868 | 0.315733 | 23 |
| HOXB3 | 6.289484 | 0.273456 | 23 |
| RIMBP2 | 6.108486 | 0.265586 | 23 |
| INPP5A | 5.45339 | 0.237104 | 23 |
| NXN | 4.543369 | 0.197538 | 23 |
| SKI | 13.41231 | 0.638682 | 21 |
| FRMD4A | 7.713994 | 0.3857 | 20 |
| ABR | 6.297255 | 0.314863 | 20 |
| SDK1 | 4.755602 | 0.23778 | 20 |
| MAD1L1 | 12.61895 | 0.664155 | 19 |
| CASZ1 | 9.451384 | 0.497441 | 19 |
| ZNF423 | 9.394324 | 0.494438 | 19 |
| SMG1P2 | 6.725338 | 0.353965 | 19 |
| BOLA2 | 6.725338 | 0.353965 | 19 |
| LOC613038 | 6.725338 | 0.353965 | 19 |
| FOXK1 | 7.081048 | 0.393392 | 18 |
| ANKRD11 | 6.395685 | 0.355316 | 18 |
| MCF2L | 5.828254 | 0.323792 | 18 |
| TBC1D16 | 5.509621 | 0.30609 | 18 |
| SEPTIN9 | 4.832762 | 0.268487 | 18 |
| RBFOX1 | 4.165318 | 0.231407 | 18 |
| OPCML | 8.123436 | 0.477849 | 17 |
| TBX15 | 5.684761 | 0.334398 | 17 |
| PAX6-AS1 | 5.461725 | 0.321278 | 17 |
| RCN1 | 5.461725 | 0.321278 | 17 |
| FOXP1 | 7.261761 | 0.45386 | 16 |
| EBF3 | 5.979732 | 0.373733 | 16 |
| NAV2 | 5.436301 | 0.339769 | 16 |
| SORBS2 | 4.579467 | 0.286217 | 16 |
| GLI2 | 10.33434 | 0.688956 | 15 |
| BAIAP2 | 5.463403 | 0.364227 | 15 |
| NFIX | 4.619551 | 0.30797 | 15 |
| KIRREL3 | 4.424412 | 0.294961 | 15 |
| RPS6KA2 | 8.107066 | 0.579076 | 14 |
| CUX1 | 6.280038 | 0.448574 | 14 |
| MIR548F5 | 6.087254 | 0.434804 | 14 |
| ARHGEF10 | 5.1838 | 0.370271 | 14 |
| PRKAG2 | 4.945042 | 0.353217 | 14 |
| IQSEC1 | 4.481342 | 0.320096 | 14 |
| C7orf50 | 4.389609 | 0.313543 | 14 |
| MSI2 | 5.643963 | 0.434151 | 13 |
| KIF26B | 4.835693 | 0.371976 | 13 |
| MYT1L | 4.631923 | 0.356302 | 13 |
| CMIP | 6.13285 | 0.511071 | 12 |
| TNS3 | 5.978262 | 0.498189 | 12 |
| MIRLET7BHG | 5.291088 | 0.440924 | 12 |
| ZC3H3 | 4.69617 | 0.391347 | 12 |
| MEGF6 | 4.450577 | 0.370881 | 12 |
| ADGRD1 | 4.430574 | 0.369215 | 12 |
| SPON2 | 6.044808 | 0.549528 | 11 |
| ZC3H12D | 5.88004 | 0.534549 | 11 |
| RAD51B | 4.696695 | 0.426972 | 11 |
| VGLL4 | 4.221628 | 0.383784 | 11 |
| ACOT7 | 4.993015 | 0.499302 | 10 |
| TSPAN4 | 4.86048 | 0.486048 | 10 |
| AKAP13 | 4.647912 | 0.464791 | 10 |
| RGS12 | 4.436793 | 0.443679 | 10 |
| TP73 | 4.201124 | 0.420112 | 10 |
| ATP11A | 6.458921 | 0.717658 | 9 |
| SND1 | 6.24855 | 0.694283 | 9 |
| TSPAN9 | 5.107321 | 0.56748 | 9 |
| TRAPPC12 | 4.820956 | 0.535662 | 9 |
| KCNH2 | 4.469588 | 0.496621 | 9 |
| LHX4 | 6.248439 | 0.781055 | 8 |
| DLEU1 | 5.49409 | 0.686761 | 8 |
| ESRRG | 4.802341 | 0.600293 | 8 |
| MCC | 4.536967 | 0.567121 | 8 |
| MSRA | 4.388299 | 0.548537 | 8 |
| NAV1 | 4.705733 | 0.672248 | 7 |
| FBXL18 | 4.375528 | 0.729255 | 6 |
| FAM181A | 4.224451 | 0.704075 | 6 |
| RAPGEF4 | 5.454854 | 1.090971 | 5 |
| RUNDC3A | 5.18667 | 1.037334 | 5 |
| TSNAX-DISC1 | 4.485901 | 0.89718 | 5 |
| CACNA1I | 4.452073 | 0.890415 | 5 |
| RBMS3 | 4.961287 | 1.240322 | 4 |
| AIRE | 5.495247 | 1.831749 | 3 |
| SOX10 | 4.277515 | 2.138757 | 2 |

TABLE 171
Cancer Type ST_EPN_RELA_B

| Gene site | imp_sum | imp_mean | n |
|---|---|---|---|
| PTPRN2 | 6.970855 | 0.08501 | 82 |
| PRDM16 | 11.41428 | 0.160765 | 71 |
| HDAC4 | 7.48412 | 0.202274 | 37 |
| PAX6 | 5.459408 | 0.155983 | 35 |
| RBFOX3 | 3.248363 | 0.09281 | 35 |
| DIP2C | 5.933432 | 0.18542 | 32 |
| SOX2-OT | 2.742155 | 0.094557 | 29 |
| GALNT9 | 2.788617 | 0.103282 | 27 |
| SHANK2 | 5.004528 | 0.192482 | 26 |
| ADARB2 | 2.645506 | 0.10175 | 26 |
| AGAP1 | 5.146507 | 0.20586 | 25 |
| CAMTA1 | 3.906327 | 0.156253 | 25 |
| PDGFRA | 2.738299 | 0.109532 | 25 |
| MEIS1 | 2.669315 | 0.111221 | 24 |
| RPTOR | 6.480226 | 0.281749 | 23 |
| NXN | 3.638481 | 0.158195 | 23 |
| PRKCZ | 3.711455 | 0.168703 | 22 |
| SKI | 7.203011 | 0.343001 | 21 |
| FRMD4A | 5.16313 | 0.258157 | 20 |
| MAD1L1 | 6.181267 | 0.32533 | 19 |
| ZNF423 | 4.906818 | 0.258254 | 19 |
| SMG1P2 | 3.801968 | 0.200104 | 19 |
| BOLA2 | 3.801968 | 0.200104 | 19 |
| LOC613038 | 3.801968 | 0.200104 | 19 |
| CFAP46 | 3.182928 | 0.167523 | 19 |
| CASZ1 | 2.943001 | 0.154895 | 19 |
| ANKRD11 | 3.682395 | 0.204577 | 18 |
| TBC1D16 | 3.537223 | 0.196512 | 18 |
| FOXK1 | 2.351994 | 0.130666 | 18 |
| OPCML | 3.719092 | 0.21877 | 17 |
| FOXP1 | 4.956949 | 0.309809 | 16 |
| NAV2 | 2.942074 | 0.18388 | 16 |
| GLI2 | 8.384025 | 0.558935 | 15 |
| EMX2OS | 4.11018 | 0.274012 | 15 |
| NFIX | 3.229254 | 0.215284 | 15 |
| SLX1B-SULT1A4 | 2.887604 | 0.192507 | 15 |
| SLX1A | 2.887604 | 0.192507 | 15 |
| LOC606724 | 2.887604 | 0.192507 | 15 |
| LRMDA | 2.745954 | 0.183064 | 15 |
| BAIAP2 | 2.742197 | 0.182813 | 15 |
| RPS6KA2 | 5.374521 | 0.383894 | 14 |
| PPP2R2A | 3.042989 | 0.217356 | 14 |
| C7orf50 | 2.841244 | 0.202946 | 14 |
| MSI2 | 3.957011 | 0.304385 | 13 |
| GSE1 | 3.15414 | 0.242626 | 13 |
| RFX4 | 2.746025 | 0.211233 | 13 |
| MIR9-3HG | 2.662139 | 0.20478 | 13 |
| KIF26B | 2.395133 | 0.184241 | 13 |
| MYT1L | 2.379207 | 0.183016 | 13 |
| ZC3H3 | 4.9008 | 0.4084 | 12 |
| CMIP | 3.312897 | 0.276075 | 12 |
| MIRLET7BHG | 3.241903 | 0.270159 | 12 |
| MEGF6 | 2.898242 | 0.24152 | 12 |
| VGLL4 | 5.431527 | 0.493775 | 11 |
| ZC3H12D | 3.427563 | 0.311597 | 11 |
| CTBP2 | 2.874648 | 0.261332 | 11 |
| FGFR2 | 2.788321 | 0.253484 | 11 |
| BCL11B | 2.935288 | 0.293529 | 10 |
| ACOT7 | 2.739333 | 0.273933 | 10 |
| TSPAN4 | 2.616147 | 0.261615 | 10 |
| CBFA2T3 | 2.411994 | 0.241199 | 10 |
| TP73 | 2.352828 | 0.235283 | 10 |
| ASAP1 | 5.023262 | 0.55814 | 9 |
| ATP11A | 4.541166 | 0.504574 | 9 |
| SND1 | 3.976947 | 0.441883 | 9 |
| TSPAN9 | 3.27575 | 0.363972 | 9 |
| MGMT | 2.518999 | 0.279889 | 9 |
| KCNMA1 | 2.49215 | 0.276906 | 9 |
| GPC6 | 2.304978 | 0.256109 | 9 |
| SSBP3 | 2.286095 | 0.254011 | 9 |
| DLEU1 | 3.149543 | 0.393693 | 8 |
| MSRA | 2.999965 | 0.374996 | 8 |
| RGS20 | 2.536688 | 0.317086 | 8 |
| PPP2R2B | 2.440601 | 0.305075 | 8 |
| RORA | 2.42611 | 0.303264 | 8 |
| CXXC5 | 3.429377 | 0.489911 | 7 |
| NAV1 | 2.688131 | 0.384019 | 7 |
| C19orf25 | 2.569401 | 0.367057 | 7 |
| RXRA | 2.485559 | 0.35508 | 7 |
| LRRFIP1 | 2.88193 | 0.480322 | 6 |
| FBXL18 | 2.636018 | 0.439336 | 6 |
| PTPRG | 2.557336 | 0.426223 | 6 |
| TSPEAR | 2.483097 | 0.41385 | 6 |
| FMNL2 | 2.451128 | 0.408521 | 6 |
| FAM181A | 2.388272 | 0.398045 | 6 |
| ROR1 | 2.295268 | 0.382545 | 6 |
| RUNDC3A | 4.666214 | 0.933243 | 5 |
| ARHGEF7 | 3.127367 | 0.625473 | 5 |
| CACNA1I | 2.879023 | 0.575805 | 5 |
| BACH2 | 2.637348 | 0.52747 | 5 |
| KLHL25 | 2.629848 | 0.52597 | 5 |
| VAV2 | 2.287829 | 0.457566 | 5 |
| CRB2 | 2.916757 | 0.729189 | 4 |
| RBMS3 | 2.754591 | 0.688648 | 4 |
| STAP2 | 2.431634 | 0.607909 | 4 |
| VOPP1 | 2.371361 | 0.59284 | 4 |
| NDST1 | 2.286881 | 0.57172 | 4 |
| DAGLB | 2.907537 | 0.969179 | 3 |
| SOX10 | 2.807608 | 1.403804 | 2 |
| ANKLE2 | 2.601542 | 1.300771 | 2 |

TABLE 172
Cancer Type VGLL

| Gene site | imp_sum | imp_mean | n |
|---|---|---|---|
| PTPRN2 | 8.129568 | 0.099141 | 82 |
| PRDM16 | 5.586161 | 0.078678 | 71 |
| PCDHGA1 | 3.18076 | 0.053911 | 59 |
| PCDHGA2 | 2.864374 | 0.050252 | 57 |
| PCDHGA3 | 2.864374 | 0.053044 | 54 |
| PCDHGB1 | 2.864374 | 0.054045 | 53 |
| PCDHGA4 | 3.18076 | 0.062368 | 51 |
| PCDHGB2 | 3.497146 | 0.07137 | 49 |
| PCDHGA5 | 3.497146 | 0.074407 | 47 |
| PCDHGB3 | 2.864374 | 0.066613 | 43 |
| PCDHGA6 | 2.547988 | 0.0637 | 40 |
| HDAC4 | 5.164737 | 0.139587 | 37 |
| PCDHGA7 | 2.231602 | 0.060314 | 37 |
| PAX6 | 4.799113 | 0.137118 | 35 |
| PCDHGB4 | 2.547988 | 0.0728 | 35 |
| PCDHGA8 | 2.547988 | 0.0728 | 35 |
| RBFOX3 | 1.94682 | 0.055623 | 35 |
| DIP2C | 4.353201 | 0.136038 | 32 |
| PCDHGB5 | 2.864374 | 0.089512 | 32 |
| PCDHGA9 | 2.864374 | 0.092399 | 31 |
| SOX2-OT | 2.601665 | 0.089713 | 29 |
| PCDHGB6 | 2.337064 | 0.080588 | 29 |
| PCDHGA10 | 2.337064 | 0.083467 | 28 |
| CAMTA1 | 2.968054 | 0.118722 | 25 |
| AGAP1 | 2.343429 | 0.093737 | 25 |
| SATB2 | 3.133869 | 0.130578 | 24 |
| PCDHGB7 | 2.337064 | 0.097378 | 24 |
| RPTOR | 6.717009 | 0.292044 | 23 |
| INPP5A | 3.589923 | 0.156084 | 23 |
| PCDHGA11 | 2.020678 | 0.087856 | 23 |
| PRKCZ | 1.896197 | 0.086191 | 22 |
| SKI | 6.018103 | 0.286576 | 21 |
| FRMD4A | 3.907012 | 0.195351 | 20 |
| MAD1L1 | 4.300474 | 0.226341 | 19 |
| SMG1P2 | 3.091146 | 0.162692 | 19 |
| BOLA2 | 3.091146 | 0.162692 | 19 |
| LOC613038 | 3.091146 | 0.162692 | 19 |
| ZNF423 | 2.608954 | 0.137313 | 19 |
| CASZ1 | 2.143041 | 0.112792 | 19 |
| SEPTIN9 | 3.568942 | 0.198275 | 18 |
| FOXK1 | 2.279568 | 0.126643 | 18 |
| MCF2L | 1.973949 | 0.109664 | 18 |
| SORBS2 | 3.428588 | 0.214287 | 16 |
| NAV2 | 2.842011 | 0.177626 | 16 |
| GLI2 | 3.321443 | 0.22143 | 15 |
| ZBTB20 | 3.16892 | 0.211261 | 15 |
| KIRREL3 | 2.682165 | 0.178811 | 15 |
| RPS6KA2 | 2.333337 | 0.166667 | 14 |
| CUX1 | 1.883684 | 0.134549 | 14 |
| ZC3H3 | 3.189378 | 0.265781 | 12 |
| CMIP | 2.961735 | 0.246811 | 12 |
| GNA12 | 2.147446 | 0.178954 | 12 |
| MIRLET7BHG | 2.0589 | 0.171575 | 12 |
| FBRSL1 | 2.046613 | 0.170551 | 12 |
| RAD51B | 2.403676 | 0.218516 | 11 |
| CTBP2 | 2.309302 | 0.209937 | 11 |
| ZC3H12D | 2.282122 | 0.207466 | 11 |
| AKAP13 | 3.166309 | 0.316631 | 10 |
| NR2F1-AS1 | 2.231467 | 0.223147 | 10 |
| TSPAN4 | 2.168185 | 0.216819 | 10 |
| SH3RF3 | 2.088737 | 0.208874 | 10 |
| RGS12 | 2.080292 | 0.208029 | 10 |
| ATP11A | 3.240776 | 0.360086 | 9 |
| NOTCH1 | 3.133691 | 0.348188 | 9 |
| RUNX1 | 3.124978 | 0.34722 | 9 |
| KCNMA1 | 3.046948 | 0.33855 | 9 |
| TRAPPC12 | 2.487117 | 0.276346 | 9 |
| SND1 | 2.33234 | 0.259149 | 9 |
| ASAP1 | 2.204126 | 0.244903 | 9 |
| AXIN2 | 2.039296 | 0.226588 | 9 |
| LINC00311 | 3.314817 | 0.414352 | 8 |
| MSRA | 2.891438 | 0.36143 | 8 |
| NRXN1 | 2.7291 | 0.341137 | 8 |
| RORA | 2.435753 | 0.304469 | 8 |
| MCC | 2.30493 | 0.288116 | 8 |
| BAHCC1 | 2.268006 | 0.283501 | 8 |
| DLEUI | 2.029465 | 0.253683 | 8 |
| LINC00461 | 3.59814 | 0.51402 | 7 |
| DUSP6 | 3.172866 | 0.453267 | 7 |
| NAV1 | 2.787893 | 0.39827 | 7 |
| CXXC5 | 2.268509 | 0.324073 | 7 |
| PRKCA | 2.199418 | 0.314203 | 7 |
| ITPK1 | 2.124622 | 0.303517 | 7 |
| GAK | 1.916057 | 0.273722 | 7 |
| SLC22A18AS | 2.826172 | 0.471029 | 6 |
| RADIL | 1.977831 | 0.329638 | 6 |
| ARHGEF7 | 2.019588 | 0.403918 | 5 |
| TSNAX-DISC1 | 1.943715 | 0.388743 | 5 |
| RBMS3 | 2.803228 | 0.700807 | 4 |
| SASH1 | 1.943826 | 0.485956 | 4 |
| PARD3B | 1.914289 | 0.478572 | 4 |
| GRIN2B | 3.556806 | 1.185602 | 3 |
| DAGLB | 2.499239 | 0.83308 | 3 |
| TBC1D7 | 2.400705 | 0.800235 | 3 |
| ANKRD33B | 2.062176 | 0.687392 | 3 |
| SOX10 | 4.385587 | 2.192794 | 2 |
| MTHFR | 2.260277 | 1.130139 | 2 |
| SLC25A10 | 2.107022 | 1.053511 | 2 |
| PLEKHO2 | 2.755423 | 2.755423 | 1 |
| ZNF280D | 1.907871 | 1.907871 | 1 |

1. A computer-implemented method for the diagnostic classification of cancer, the method comprising:
classifying a cancer using a classification algorithm trained using at least data pertaining to biological states of all gene sites in Table 1 (SEQ ID No. 1 to SEQ ID No. 688), wherein the biological states are derived from classified cancer types, wherein classifying the cancer comprises applying the classification algorithm to data pertaining to biological states of a set of gene sites of a cancer sample, wherein the set of gene sites comprises at least 3 gene sites of the cancer sample genome selected from the gene sites in Table 1 (SEQ ID No. 1 to SEQ ID No. 688).

2. The computer-implemented method of claim 1, wherein the classification algorithm is based on at least one of: discriminant analysis, discriminant functional analysis, a kernel method, multidimensional scaling, a nonparametric method, Partial Least Squares, a tree-based method, a generalized linear model, a principal components based method, a generalized additive model, a fuzzy logic based method, a neural network, and a genetic algorithm based method.

3. The computer-implemented method of claim 1 or 2, further comprising:
determining a biological state pertaining to each of the at least 3 gene sites of the cancer sample genome; and
determining a biological state pattern of the set of gene sites based on the determined biological states of the at least 3 gene sites.

4. The computer-implemented method of claims 1 to 3, wherein the biological state is selected from a group consisting of epigenetic state, mutation state, copy number and RNA expression, in particular wherein the epigenetic state is a methylation state.

5. The computer-implemented method of any one of claims 1 to 4, wherein the set of gene sites comprises at least 10, preferably at least 20 or at least 30 or at least 40 or at least 50 or at least 60 or at least 70 or at least 80 or at least 90 or at least 100 gene sites or all gene sites in Table 1 (SEQ ID No. 1 to SEQ ID No. 688).

6. The computer-implemented method of any one of claims 1 to 5, wherein the gene sites are the gene sites with the highest values of variable importance in Tables 3 to 172, respectively.

7. The computer-implemented method of any one of claims 1 to 6, wherein the biological states of the gene sites comprise the biological states of the gene sites as listed in Table 1 (SEQ ID No. 1 to SEQ ID No. 688) and up to 12 kb, preferably up to 10 kb or up to 8 kb or up to 6 kb or up to 4 kb or up to 2 kb, upstream and/or downstream of the genes.

8. The computer-implemented method of any one of claims 1 to 6, wherein the biological states of the gene sites comprise exclusively the biological states of the gene sites as listed in Table 1 (SEQ ID No. 1 to SEQ ID No. 688) without any bases upstream and/or downstream of the gene sites.

9. The computer-implemented method of any one of claims 1 to 8, wherein the biological state is a methylation state and/or the biological state pattern is a methylation state pattern.

10. The computer-implemented method of any one of claims 1 to 9, wherein the cancer is selected from the group consisting of carcinomas, sarcomas, myelomas, neural crest lineage tumors including melanoma, leukemia, lymphoma and mixed types.

11. The computer-implemented method of any one of claims 1 to 10, wherein the cancer is a cancer listed in Table 2.

12. The computer-implemented method of any one of claims 1 to 11, further comprising:
determining a further biological state different from the biological states and pertaining to at least one of the gene sites pertaining to the cancer sample genome, wherein the further biological state is selected from the group consisting of epigenetic state, mutation state, RNA expression and copy number; and
correlating the further biological state of the at least one gene site pertaining to the cancer sample genome with the classified cancer type.

13. The computer-implemented method of any one of claims 1 to 12, wherein the at least 3 gene sites include one or more of: PTPRN2 (SEQ ID No. 491), PRDM16 (SEQ ID No.477), HDAC4 (SEQ ID No.249), PAX6 (SEQ ID No. 431) and MAD1L1 (SEQ ID No. 349).

14. A computer-readable storage medium having computer-executable instructions stored, that, when executed, cause a computer to perform a method according to claim 1.

15. A system for diagnosing cancer, comprising:
one or more processors; and
a memory coupled to the one or more processors and comprising instructions executable by the one or more processors to implement the method according to claim 1.

The application's sequence listing, which the Patent Office published only in electronic form, follows.

SEQUENCE LISTING (688 sequences)

SEQ ID NO: 1 - DNA, 112988 bp, Homo sapiens
  source 1..112988: mol_type = genomic DNA
caagttcctcaagcaaggtgacaatcacccaggctagagtgcagtggtgccatctcacctcagtgcaaccactgcctctccattcaagcgattctcatgtctcagcctcccaggtagctgggattacaggcaggtgccaccatgccaggctaatttttgtatttttaatagaaagggggtttccccatgatggccaggctggtctcgagctctgggcatcaagtgatctgcctgcctcggcctcccaaagtgctggaattacaggcgtaagccactgtgccaggcctcaattattcttatttactgctctgtgtgtgtgtgtgtgtgtgtgtgtgtgtgtgtgtgtgtgtgttgggggggagggtccccagaggtgacactaggaggtgaatgatttgtttggcagctttctatttatctatgtgtttactttatcttaattctttaattgcaaggactatagcgcttgtgtaatcagagatagggcagcctggattcctggacagcaggaggagagacctcagggttctacaagactccacagaccaagttatcagtgatcagggtgagtggggagaaccaagctgaactctttctctgcctttaaggtctgtactctccatccatccattcattcattatgaggacttggtgatcgcctgttgtcttgatgagcagttctttgtgtctttgattttgtcactgaaagattgcatcctctttccaaatacctctagaaagctgtgggggggctatccatccgtcacacctgagtattaattatcttccacacagcattttatacaacggtagaaaggcaccttcatcatatctagggtctcgtttatacccacgaaggaggtacaatctctgttgtcccaatttcaggaaattgaggatcaggaggcgcagtgacctgctccaggtcatgcagaaggaaccacctctgactcccagcgccctgtttgtcttccggagcgctggggccaggcggaggaaagtagctgggagcaagaagggctggcagggccctgagcgccgagatggggagtgaggtggggagggcgggatgctccttcccttctccgcaaaggaaccccttctgattccgactctggagctccagagaccggatccgagacgcgggtggaggtggagttacactcgcctgcagccctgagggtgtaaatggcccattaagatccaggttaaatcaacctatggagctgccccccagagggtcagggtccccacaacttgacgggggtcctcagccgtctcctccccagtcccaggactccctcccagccctcgcggtccctctggtgggtcccgccccagcccccgtctcccccgcccccggaggctggactctgcccccgccccgcctgccacctccctcctgggggcggtggcccgtggcgggcgcacccattggctgtggcgaaagcgagggccggggctggcggcgctgattggccgggacgctcggcggagccagggagtccggcgagtcgctgggggaagtcgagcagacacccagcgctgccggaactcggggcgcgcatcccgcaagtcggaacccggcggatcggatcccgcagatcggagacggggcctggaggtgagcgcgaggcgccgggtggcttgggacgggcccttccgaggggagccgagaggaggtccttctgccctgcccccaggagcaaaacctgggcatcttctcctggaaacggagccctcatcttcccaagacgcggggccctcccccgaaaagacaggggctcccaccccccagagagcaaaataccttcctttctccttcagaaatgggcccttcctcctggctccagctctagacagaagtcctctcccttttaccgcttgaaatagaatgcggccccaaaaagtggtctccaggtctctagagccccctcacctcttgggagactgatgccccttccccatccttagaaaactaagtttgggtgtcttccttctcccctctctttcggaataatgggggtcttctcagcttataaattacagtgacctccccctccatgacaaatggaagctctccccccatcataagacaaggaaatcccggagcagagactctgcaagtcaccctcccaccccagatactgggctctggagagatagatgattcacccttagccctgccggagacccctccctacccgtcagagaggcagggtggcctctgacaccaccacattaaaggcttttggggatttcccctctcctccccagtaaagatgtaaaatgagggaccttcatactcaggagcagggcaaaggtctggccacccctccaagtcatccacctccctccactccacccaagccctttcacacaaaccccatcctagtaaccccctgcaccatcctcccaccgctcccaatcccatccttctccacctcaccccaactccactcccacacctggctgccccacctatttcacatcctctcacctttcctcacccaccctggccaaggtaagactagagggggttcagcgagatttagtaagactggagctcttaaaactgggatctggggcctagaggcccttccaggagtcttcaaactctgacaacagagatggcctctgaggcagcaggaccagcagagaccacccgccacctctcccccgctccctgccccaacacacgcacaaaggctgtgttcaatgcattctctcttgcagtctgggaggacagctggccctcttccaagagggcccgcatttcccccctaaagtgtgcacccccgcaagcgcctgtggacattgcctggtggaattccctgggcactcagccaagagaaatgggtgctgctgggcccatccactggggaggagacagtgttggctttgctgctttgatgaagctagactaagggacaggatgttggtgacctgggggtggggagggggtgggaagagctcttctctggtgggtcaggttgggaggcaggagagagggaggcagtgagttgtgtcttgctctttggagcctgtgttgcggcgtggagtcatagagaaatgtgttttctcgaggcccaaagaggttagccacggggagaggtaaatggtccagtctggagtcctaagacctaaaagggcttctgcattaaagacgtggccccttcatttgacagttaaacacacagaggcacaaaaggggaagagacttgctcaaggtcacccagcctgtgggagacagctggccccaacccctccaggacccttaaggtgctaggatccctgacacaagccccagtcctcacatttacaatggggacttggggactgctgggtcccaagtccccacttgtcagaggaagcgccaaggctctgcaaaggtcatgaagccaggaaggggcagagctggaactcaatgccatcccccagcaggctgcctcgtggaatccattcctgggtgtcagcgcatccctgcttaccccgtgcgatctttgtgttgaggccattgccaaatctaggcttgccaaaatccaaactgacccaggatagctaataagatcagttgcagctaatgagaatgagatgctggagtggaggctactgcaggaacctcacttgcatagctgggtttgctccaagaactttggacaggtcctgaggatgtcatattccttccctccaaggtcccctccctcttagcccctgcccacgccctctggctttgagttccctgcacattgtctcatctctgttcagaggcctgcgtcttttctcctggggcattgcatgggaaaagagctgaaattctggcagattctctaggaccacccagctgggcagcatggtctgaagtagaggctctctctgtttctgcccccacccagttcccagctaaaggattggttgttgtgccccaactttgccaaggcgaagttcaaagcatgaggaggaccacggtagagaggccgagaggttggtccctggagacctcttatctgggtcgagagcacaaatctgccacttagtgtctgatcttaacctctctgtgacatatccttggggtaaaatgagttaatcctcataaaatgtttagcacacagcaaaatgagcagaaacaatgattacaagtgcaaagtcataaaacctctaatcatgaagtggggaggtgcttatgccttaaggcaaaacttgtaacccttgccgtagataatctgccagggccaaggtgcctggggacaaggggatgtcttcctagagagacagtgtagtatgtggaatggaccacagaccctgaagccagatggagtagagagttggccactggtagtggctgtctatggaaacttaggcaagtcattcatgtctctgaacctcagttcctcgtctttgaatgaggtttgttggggttggacatcagaaaagagacaggtctagatgaggggttctcattttgggcactgttgacagttgggtcagaggattctttgttgtgggactcccctgtgtattgtaggatattcagcagcgcctctggtctctacccactagatgccagtgacactccctaccccatgagtcatgtccatcagaaatgtctgcagacattgccagatgtgccctggggagcaaaatcatccttttccttcgctattgagaactgctggtctaatacatggccttaaacatagttgatacttaatataaaacagcttcctagctgaggcgggtggatggcttgagcccaggagtttgagaccagcgtgggcaacatggcaaaaccccatctctgtaaaatacaggaaaaaaaaaatcagctggtcatggtggcatgcgcctgtagtcctagcaacctgggaggctgaggtggggggattgcttgagcccggggaggtcgaagctgcagtgagccatgatcacaccactgcattccagcctgggtgacagagtgagacactgtctccaaaaaaaaacaaaataaaaaccaaaaacagcttctttcttgcacaagctcctcgttttggtttctgtgtaatgaggagaaggagatgtgtctagctgtggagccttccaatattaataacaatttttaatttctcacatttacacaagactttcttgtctggtttttgtttttctctttagtagagacagagtcgggtggtctctaactcctaggcttaagcgatcctcccgccttggcttcccaaagcactggggttacaagtgtgagttacaaccaaagcgctggggttacaagtgtgagttacaggaataagccacagcacccaacctacacaggaccttatcatctccaaagcactgttgtgtctatgacactgtttctcactctacagataagcaaactaagcctcacaaaggttaaaagacttgtctaagaccatcacccgcttctccaccaggcatcagagaaacatccatgccagaaattgtttgagaaacaactgagttctgggccttcttcagattagttatcagggtctttcgaaacttcaatggcatgctctttggtccagcaatcccactttgaaaaatctcacacagaaatgctcacacttgcactgacataacataaaaatgtccatggcagagcttgcaacactggtatgggaagggattacagtatatgcattcatgtgggagaatgagtagattttagatgaatgaggtggatccacattcctgaccttgaaaggttcctgagtcatattatttagtgaaaaagataaagtcacagaatcaacatagccagtatgatcctatttttttttaaatgtaaatatgcatgaacatggatagttagggaagtggggaattaaaaggacctagatagtatgtatgtatgagaacatattcctgggggaagaagaagaaaataaatctccgccagcttcccatgcattaaaaatgagcaaagtgggctggccaccttgtctcacgtctgcgatcccagcactttgggaggctgaggcggcagaatcacttgagcccaggagtttgaggctgcagtgagttgtgagtgagccactgcactccaacctgggcaacaaagggacactgtaaataattaatcataagataaaaattaaaatgaatagagcacaacccacagaggttgagagacttgctaacaccagaagttgccagtggtgaaattcagctttgagtttgctgatagttacggggccaagagacaggaatctgaggctcatctcagcaggccaagcctccttccttactgtggggaaattccttctctgagcacctagagggatcctggtgtcagactgacctcacctgaatcaggcttccacccacgtgatgacctcaggccagccactttaactctcagtgcctcatttctctaactttaaaatagctaaaaggcaaaggaaaaaacatgaaagccaaaaaaaaaaaaaaaggtagaaggaggaggcaatagtagaacctctctcattgggccgctgtgaggattacataaaaccatgtgttccgacccccagtacttagtaggtgcttaattaacacgagccctggtctctcctgcctttttctctgcttgcctgctccttgccaggatgcagaagacaaaagcctcagaaaggacagtgggggctcctgaggccccaagaatgcttagcaggctgaatcagttgtcctcacttcttcactttgccctctgatccaccatgaccactctgctgcaggagcttttaacagaaagcctgggagagcattctgagggggtctgtgctatagctcttcctccctggggtctaaccatccttgctttctctagacactccacacattaaactgtcttgcccgttgcagggatgggatggcatcatgtggcctctaattacacatcccttcaataataagattgactctccaagggcaagttttcctcctccttcaaaagctatctcacattgcgtcttttacaggtagtcttccccgaccctcccccacctccagccaggaaaaccatttctcctcctcccaactcctgtcatccacatcctagacttcctgggtctgccacatcctattcttcctgggtccatcacatcctagatttcttgggtccatcactgtttgctggatttcttcccaatccataattgcctggaagcagccatcacatccatcacatttattcttgtgtcttaaatgcatagcacacttccctatgcacacagtagatattcaaggagcattgactgaatgcagaaaagtattttttaaattggggtaaaatacacataacatgaaattgaccattttcatcattttatttttatgtatttttttggggggcagggggaatcttgctctgtcacccaggctggagtgcagtggtgtgatctcggcttactgcaacctctgcctcctgggttcaggcaattctgactcagcctcccaagtagctgggattacatgtgtgggccacaaccacgcccggctaatttttttgtatttttagtagagacggggtttcaccatgttggccaggctggtcttgaactactgacctcaagtgatccgcctgcctcggcttcccaaagtgctgggattactggcatgagccactgcgcccgacctccattttttgattattatcattggggtcactgtggcaggtgtgaagcaataccacattgtggttttgatttgcatttccctaatgactgatggcattgagcatcttatgtgtttgttgcttatttgtatattatcttcagagaaatgtctactcaagttctttgcccatttttgaattgagttgtctttttgtctttttgttcttgagctgtaagagttcttcttttctctttttctttttctttttatttatctatttttttttttgagacagagtctcaccctgtctgtcacccaagctggagtgcagtggcatgatcatagcttactgcagccttgacttcccaagctcaaacaatccttctgcctcagtcttccaagtaactggcacaacaggtgccaccacacctggctaattttttaaaaagcatttttttgttgttgttgagatggagtctccctatgtagcccaggctggttttgaactcctaggatcaagcgattctcccacctcggcctcccaaagtgctgggattacaagtgtgaactgcctcgcctggcccagagttctttatataaataaatgtttctttgtgtcactatttcttcatccacttaaatatttgctcagctcctgtaggtcacacactatcttgtgatcctgggaataccaccagttcctgcctatcaggaactcacagtctactgcaaagtttctcagcctctacacttttttttttttttttgagagggagtcttgctctgttgcccaggctggagtgcagtggcatgatcatgtttacctggaacctatgaataggacctaatttggaaatagagactttgcagaaatagttaggttgaaatgaggtctttctgcattagagtggcccctaatccaatgactgctatcttttttttttttttttttgagatggagtcttgctctgttgcccaggctggggtgcagtggtgcaatctcagctcactgcaacttctgcctcccgggttcaagcgattctcctgcctcagcatcctgagtagctgggattacaggcacccgccaccacactcagctaatttttgtatttttagtggagacagggtttcaccatgttggccaggctggtcttgaacttgtgacctcaggtgatccacccgcctcggcctcccaaagtgctgggattacaggctgagccacctctcctggcccacctctatactactgacgtggaagcgaggctgtcctgtgccggatgtttagcagcattcttggcctccacccaccagacgctggcaacataccttcctccacgttgtgacagccagaaatgtctccaggcattatgaagtgtcccctggggaacaagattgcccctggttgagaatcaccggttagaggctaagacagccgtgtatatctataatttcaatcagattgcttgtgcctaacaggatacacacacacacacacacacacacacacacacacacacacagaggaggcattcaggatgtatttgttggatgttggatggctgggggtgtagatggatgcatggatggacagacacaacccctttgttggttggctagattgatggatacatgtgtgaatgaatggatgaataaatgaatccaatttacaaattccactgtgggaaaacagaacgctattcttccaaccagagtagcctgcccctttatctctgtctagcacagtgtttttcaaactttagcatcagaatcccctcaagagcttgttaaaacacagattgatgcccctgcccaccagaattatgatttagtagaatcaccggcggccagaatgctcccaactctatttccatgttctctaggaatcctggaccagcccccgacccctgccaaccttgtccttgtccagaggtcccgtaatcttcactgccagcatctcccatttaggtgctaacatctattatcttggatatcagcaacttgccagcactctgtccctgggctgcactgagaattccttcaaaggtgggacccactgtattctagtaccttactactgaaagtgtggtccagcggccagcagcattgcatcttctaggagctagctagaaatgcagaatcttgggccccacccagaactacagaatgtgaatctgcgttttaacaatatcccctggggtgatttgtgtgcacttttaagtttgagaagcgtattttagacagatctgtaaaccccacactcagagctaagctagggatagctttgctgataagttacattgacagcatctgttaccatgtaattggtgcctgagctgaagcatctttcaggcattactggccatttgtacctttgcctgacgttatctcttgaaatgtctacactggcctcgctttacccgtgggaaaccagaagcccagaggagcagtgccttgcccaaggtcacacgatgaccatgaaagcagagtggagatcactctccactccttaaagggaatgggatcaagaggattgaaatgctgtatccactgagcagggcggcacatgcctgtagtcccagctactcgggaggctgaggcaagaggattgcttgaacccaggagttctgggccgtactgtactataccagtcaggtgtctgcattagttcggcatcaatatggtgacctcctgggagtggaggaccaccagcttgcctaagaaggggtgaaccagcccaggtcagaaacagagcaggtcaaaactcctgtgctgatcggtagtggaattatgcctgtaaatagctactgcactccagcctgggcaacatagtggaaccctgtttctaaaaaaaaaaaagagagagagagagagagaaaagaactgaaatgctgctatgatactgaaaatatggggtgtagggggagcattctgaagctacttaggtctgtcctctgaaactggagaaaggggagatgacttgaaagtgatgcaagaacaagaacttaagttgtattcttttgttcatccaaccagtgtttattgagtacttactagactccaggcatggttgtctggtatctatagtattgaacaagaaaagccaggcctcccttttgatggcttatctggagtggacagacgtagccatctggcattcattcgtcaatgagtgtgttcatttattgcatgatttccatgtgctgtgtacagtagtaggggtgtgtgcgtgtctatgtgtctgtgtgtgtgagagagacagagagagagagagagatggagggagagacaaagactcagctactacaccagcgcctcttctagactagccatgcggaaacaggccccaaaacaaggaccacacagtgaggagagtgccgaaggtgtgtgggagtgaatacaggttcaagctcaaagtaaaaagaggttaccactccctgttcctggggattctagggaagaaatttcaggaggaaaaggcagaaaagaagagaaagagactctgtgcagggagagcatcatgaacaggcccagagagttcataggaagccgttccaagaaaatcgcaggggaaaaaggaaggatagacagcgtatggtggctcgcacctgcaatcccagcgctttgagaggccgaggtgggtggatcacttgaacccaggagttcaagaccagcctggccaacatggccaaaccccgcctctacaaaaaatactaaaattagccgggcatggtgatgcatgcttgtagtcccaactactcaggaagctgaggcaggaagattacttgagcccaggagtttgagaccagcctgggcaacatagcaagacccctcaagaccccttctctacaaaaaattttaaaaattagccaggtgtggtaatgtgcacctgtagtcccagctactcaggaggctgaggcaggagggtcgcttgagtcaaggaggccgagccaggctgcactgagccataatcatgccactgcactccagcgtggacaacagagtgagatcctgtctcaaaaaaaaaaaaaaaaaggtggagggtaaaatcatgaatctcatacagatacaaaaacactcaatgattttattaggctcattcaatgagggaaccaggcagacattagaaccagttcaaaggaaaagtcaaataaagcacaaatatgtaaagagtaaagggaggtctaaatagattcaaaacagaggcaaacatggttggacaaggcagaatttgcttgtctatcagttttctacaacttacaaaggagtcagcaaagtagtttgaaaataatgaacaaggccaggcatggtggttcatgcctgcaatcctagcactttgggaggccgaggtggacagattgcttgagctcaggagttcgagaccaccttgggcaacatggtgaaaccctgtctctaccaaaaatacaaaaaattggtcaagcatggtggtgcgtgcctatagtgccaactactcgggaggctgaggcacaagaatcacttgagcctgggaaggggaggttgcagtgagccaggatcacgccattgcactccagcttgagcaatggagaccctgtctcaaaataacaataataatgaacaagtgaacaaggctagaatcagataatccaaaaatttgtgttgtaagtaggtagtgcataactctttttctataaaaacaatgttacgccgggtgtggtggctctcgcctgtaatccagcactttgggaggccgaggcaggcagattgcctgagctcaggagttcgcgaccaacttgggcaacacagcgaaaccctgtctctgctaaaaatacaaaaaaaaaaattagcctggcgtggcagcctgcgcctgtagtcccaactacttgggaggctgaggcaggagaatcgcttgaacccgggaggcggaggttgcagtgagccaagattacgccactgcactccagcctgggcaacagagcaaaaccctgtctcaaaacaaaaacaaaaaaacaaacaacagcaacatcgaaaaaacaaaaaaacaaaaaaccaatgttcaagtgatggagaggcatgggtggatgaggagtggcaagaggaggctgtaggaagagtagatcatgtcccgccaggtgacccatgatcttgaatttggacttgactcagagacccatagggaaccatggaagagattaaagcaaggcagtgatgtgattttgttatcacttgagaaagatcctcctggaagctgaatggagagtagacagacaccttctcccactagcctttgagctcagatttccttagggaaacagccaatcccaggggcagattgctgaccttcctgcaaaaggttttagaacgtggaagctccttcagggcaaggttggctgaacaccagccaaaagagcaaggcaccaccccggcaggacagggctgttttgtgcacgggaacaaagcctgcctcctctctctgcccagagctgtaaatagcactctgctggcttcgcaggctgagcgccggtctggggacaggctgaaaatgcacacaccaaggagcatttgtgcaaatgaatgcctgcatgcaaatttgcatgcctggcatcctgccccagccctaagtgtccagtcctgcaaggggctggaagcagggctcaaaaaagagccacacacagaagagtgtggacattctgacctggggacaggttccaggagggattcagaggcaggctggcagggtgagtgggagaaaacatgcagagaaccctggacagagttttggctccagctttacccatgataatgacaatgacccatgagtagtagccactcacattggctgtgtatttgtgtgtagttgctcaccttgtcgctcacaacagccctatgaggaaaggctgatcagatttcagagacaggaaatggaaactcagaaaggatgactgactcgcccagggtctcctactgaagggagcatttctagtgagaaaccgaggcttgaagactctggagccctggtgtctaggactgacccacatggacgcctctgcatatgcccactgctggctctgacctcagtttactcctccatcaaagggtgcaataatgtctttgcacctaatgatcacagcagagtttgggaaatgaactacccctgcaaatgagaaagacttgaaaagtcatcaatgctgaatatgaactgatggtatgtggagaaagtctgaaagtgctttccttagccccagagacagggtgtggagtgcaaggccaaccttgtttgtactcaggggctttggaagtgcagagtggccttggatgggtggaggtgaaggcatgctgaagcttgctgaaccactcccggatcataggtgagccaggttgggtctagtctgttttttttcccttgagaggaagagatggtgggtgcattgtggagagagagggaaacagtgaccctgaggtggggacgcacatctggacggaaagtgtttgccgagagcacttggccgcctgccctcccacggagcaggtgctagtcttgggtcccgctcttccgggttcttcagaagctgagctccggtctgtaatcccagcactttgggaggctgaggcgggcgaatcacgaggtcaggagatggagaccatcctggtcaacacggtgaaaccccgtctctactacaaatacaaaaaaaattagctgggtgttgtggcgcatgcctgtaatcccagccacacgggaggctgaggcaggagaatagcttgaaccagggagtcggaggttgcaatgagccgagatcgcgccaccgcactccagcctggcgacagagtgagactccatctcaaaaaacaaaaaacaaaacaaaaacagaagctgagcagcttgctgtttgtttggactgagcagtccttccagcagcagccacctgtcaacaaatcagatcatttgcgggtcatccatcaggtcccacgcggtgcatcccctgaaaggcctgtggtggggcttgggctgaggcctgtgtcttagacctgtgagatcaggggaaagtcctgagtctggaaagcagctgtgctgctggctccctgagtgcccgggagccagtgatttctgtccaggcctcagtttcctcacctgtaaaatggcaacaacaaaactaccttttgaaacattatatgaatggttgttaaattggaaaactggatgataagagttgaatgctcttttttttttttaagagacaggggtctcactctgttgctcaagctggagtgcactggcaccatcgtagcttactgcagcctcggcctctaggctcaagggatcctcctgcctcagcctccccagtagctggaactataggcccgttccctgccccgctattttacttattttttattttttttgtagaggcaaggtcttgctatgttgccaaggctggtctcaaactcctggcctcaagcaatcctcccaaagtgctgggattataggcatgagccaccgcacccggccaaaagttgaatgcttcctacctacaagacactgggtaacactgggtactacttggactatctcatttttaacctcttagtaaggtgggaaaggtcttcttcttttaagcttcttcaccaaggtcacagaggtagcaagaagttgaaacaggacttgaactaggatctgcctggctccaaaacctaagtctccaaacatggggttattggaggacctcccagggccagggacttagaagccctcctccttcccttcctgtacctttattcctcaagtctgtatagacttactctgtttttttaacaatttactttttgaataggcaatcatggcacgtggtaaaacactcaaacactgcaactcaatctacagaaaaaaaagtaaatttttctccctcatccccatcctgtggacccctttgcctcattagaggcaaatagtcaccaaggccagggtcttactatgttgcccaggctagtctcaaactcttggcctcaagtgatcctcccatctcagcctcctgaagtgccgggattacaggcatgagccaccaagcctggtcttcctttatggttaatgctttttgtgtcctacttaagaagtccagctgggcatggtatctcacacctgtaatcccaacactttgggaggccaaggcaggtggatcacgaggtcaggagttcgagaccagcctggccaccatagtgaaattccatctgtactaaaaatacacaaaaaaattagccgggcgtggtggcaggtgcctttagtcccagctacttgggaggctgaggcaggagaatcacttgaacccagaaggcagaggttgcagtgagccgagattgcaccactgcactccagcctgggtgatagagtgagaccctgtctcaaaaaaaaaaaaaaaaaagttcaacgtcatttgtgttgtttcttctattatcttctggaagctttcatgttttgcctttcatatttatctccagcatccacctagggttgatttttatgtattgtattaggtagaatcatgattaattttttcctacatagatagttcatttggcccagtatcactgcctccattgtcaaaaatcaagtgtccatatatgcatgtatgtgtttctattctctgttcggttctattaatccgtgtgtttaatctttgcccccataccacatcttgactgctgtagccttagaatatgataggcattgcctcgttgccctctaaagagactgcaccaatcaagacttactaacaatttgacaaaaatgtattgggcttccagtacagtgccagatggtatcatgatgggaattcaagtctaatcatatgcacaacttctaccttaaagtgtatagtcttataagtgacaagacatgaaccaaataattccacaaatagaggtaacatatgaatgtgatggggccacaaaggggagctgtgtaggattctgtgctaaaaggaagatttgatctggtgggagaggttcagggaagtcttctctgagaaagtgagtcatgaactgatatcagaagtgtgagtagaaatgaaggaatcagaagcaagggaaaagcattttgggtggtgggaacagcatctgcaaagactgagtagaagccttcccaggacaaacagtagatcctcgtggccaaacccagagtcaggaaggtgctatgcacagaaattggaatggtgatagggaccagacctcaaggcctttaaactacattcaacagctggtttttatacctagaacaactatcctaagaacaataacaagagtcaccttgaatattccagatttagggtagttccaagagccttttcagcacaactagggttgcttcttggcaggagaagaatgtgtatggcaacccctggagtgacacatcagttttattaagcttcatctcccagctcctggcactgaacatttcatttttgctagcagtggaagcaacagttttactgtgcagtcagcccaggttctggcagcagcagcatctgcctggcaccatctcaggtctggaactcttttctccccagcctggcgagtgtcttgcttgctggagtgtcccttaaggtggacctggtgccagccgcagtgctgtgaacttgaactgtttctcctcattcaccatcatctctactcctcacccgtggaggcatgattcctactctatggataagaacacagaagcttagagagcttaagtcacttgcctaagaccacacaccttccaaagggcaaatataaaagtctccaacaatatatttttctacattttttgtggtacttttttccttttcaaaatatagagtgagtcatactcatcaggaattttacgtacagaatgacaacatttctggggagtaggacaggattctgagatgtttccaatctgtgccttgagcggatccgatgatttatccagatctaagaccctcatctcattctcggcagtgccttttaaatttggcagccaacatggggttttggttctttctgcaccaagtggagtaattaagaaggttttcatcaaggtaaatatctgctgggtttctatagaattgtggggaggaagttgaatatacaccagcacccaaaatctcattaaatgggtctgccccttgttccaggacaggagagccaaacatagcggacaggattgatgttgttttcatgaatgtaggtggccgctgtgttctttgtgggttttcaaggtgggaatttgtttgcaaatgaatgtatgaagaagccaggagttaacactgcttcagggaggttttagagcctgggggaaataatgttgttttagaatttttagaataagtattggcagtgtgttgggggaaaaaaaaaaaccctgaaaaatagaatacagatttcagttaagctctcccttcgtcaaaccacacttgcccatattggcacatagcttgatgctacagccacacctcctctgtttattatctacttagtgcttggtaatatactgtgtactatgagtaccctctctgggaaccccacaataaccctttgatgtggtttcaaacccattttacagatgaggggctattacagaacttgcaccaggtcctcagaaaccaagtgagggagttgggatttgaaccccttcacctgaacacttgcacctgcctgcagttaatacatcacattggagcagataacctgccacatttcctggagagcagggttctctgctgcaactgtgctccccagggaacttttttttttttccaagacagactctcactctgttgcctaggttggagtgcagtggcacaattttggctcaatgcaatctctgcctcctgggttcaagcaattctcctgcctcagcttcctgagtagctggaattacagtcgtgcaccaccacactcggcaacatttttgtatttttaatagagagggggtttcgccatgttggccaggcgggtctcaaactcctgatctcaggcgatcctctgccctcagcctcacaaagtgctgggattacaggtgtgagccaccgcgcccagtgccaagggacttttggcaaggtctggagatgcttttggttgttacaactggtgggggaatgaagaatgctactggcatctggtgggcagaggccagggattctgctaaccattctaactcctccctccgcaacaaagaattacctggccccaaaagtcaatagtgctgaggttgcaaaaccctgaataaaagagcacaacttctataccccttccagtgttttcacaggaagtttctgttacgaaccacacctgttttcagtaccttgtccctggtgactggttcttatcgggcttctgaactttccttccagtagagtggcaggacctgggttccatgttagagtcagtaaaacgtgggccagtcgccgtgggctcatgtctgtaatcccagaactttgggacgccaaggtgggaggatcacttaaggccaggagttagagaccagtctgggcaacaaagtaagactttgtccctacagaaaataaaaaaattagccaggcactgtggttcatgcttgtggtcccagctacccgggaggctgagttgggaggataagcccaggaaatcaaggctgcagtgagctgtgatcacaccactgccctccagcttgggcgacaaagcaagaccctatctcaaaaaaatacattataattaataaataagtaaataaataaatagagtccataaaatgctttcggcaacatggctaagaaggaggcagttgagcaggtgaggtttgcctcttggaagctgcattccaggacatttccagtactgcagactcataccttttttgctagggggattgagaggaaaatccccccaaaagggcctgaagctcttagcacttgccatgtcatattttcttcctcctgatgggaatggagcatgctcacaaattcacacctttgctgctgaacatggtatgccaaaggtcactgcactccgctgggctagctatctgcatttctatcttgaaggagcaagcaaacatgcaaatctcttgccttgccctttgtgcgggggttcggctacctggctgactgaaagaacacttcccctactacatttaaggagaactttgcttggctcagacctttgaaggatccaaaggtacctttttcttttttgagatggagcctcactctgttgcccaggctggagtgcagtggtgcaatctcagctcactgcaatctccacctcccaggttcaaatgattctcctgcctcagcctcctgagtagctgggattacaggtgcacaccaccacatctggctaatttttgtatttttagtagagaatggggttttaccatgttggccaggatggtctcgaactcatgacctcaggtgatccacctgcctcagactcccaaagtgttgggattacaggcttgagccacaatgcccagcctccatgtgtaacttttgactccccaaaaactttactactaatagcatccggctaacctgaagcctactagtaacataaacagttaattacaagattagcctctacgtatattttatgcatccatgacatacctagctttttcttaaattttttcaatgtttctaggctacacagtttgtctttgagtttttctagttgtcacaaatctccaaaaaaaattccagtatatttattgaaaaaaatcctcatattagtggagccatgcatttcaaatccatgttattgaagggaatactctttttaggtctttttatttttagttttttgagacagactctgagtgtcgctctgtcacccagactggagtgcagtggcacgatctcagctcactgcaacctccgcctcccgggttcacgtgatcctcatgcctcggcctcctgagtagctgggattataggcatgtgccatgatactgggctaattttggtatgtttagtagagactgggttttgccatgttggccaggctggtcttgaactcctgacctcaagtgatctgcctgcctcagcttcccaaagtgctgggattacgagtataagccaccatgcccagcttgtttttaggtcttgaatttgcttggagggttttattttgtttcactttgcccattcttttaagtaaattttttgttttgagattagtgtagattcacacacagtcataagaaatgatacagagagatcctatgggtccttcatcctattttccccaacggcaccatcttactaacccatagagtacaatatcacaaccaagatactgacattgatacagtccatccattttaattttaatttttttattctttatttttatttatttgtttattttttgagacagaatctcgcactgtcacccaggctggagtacagtggcacgatctccgctcactgcaagctctgcctcccaggttcacgccattctcctgcctcagcttcccgagtagctgggactacaggcgcccgccacaatgcccagattttttttttttttttttcagtagagacagggtttcaccgtgttagccagaatggtctcgatcttctgacccgcccgcctcggccttccaaagtgctaggattacaggcgtgagccaccgcgcccggcccactccatccattttattcagatttccccagctttacatgcattcaccttgcacgttttttgtttgtttgttttgttttgtttttgagacagggtcttgctctgtcacccagactggagtgcagtggtgcaatcaatggctcacaatagccttgagctcctgggcttaagcaattctcccgagcagctgggaccacaggcacatgcctccatgcctggctaccttttttattttttgtagagatggggtctcactatatcgcccaagctggtctggaactcctgggctcaagccatcctcccacctcaacctcccaaagtgctgggattacaggcatgagccaccgcacctggggccagctatgaaagattttgttttgaggttctcagttgccattgccactttgctgaaaaaagcggctcaaattccagtggagtgtggagtcagtcatgatgggtgcattcccaaggctgagacatccctggagtaactttaggtgtctgtcctgggctgtgtcctggcagagaaggaagcacgggagaaggaaggcaggccgccgcatcctaacacctgagttccggtttgggacacacagagaactctgtgctcccgcctacactctgccttccccgacttcctccccattcccgacgtttcacttgattgtcaggcccagctggcagcattctgctggagccactgggccagcaagcctgagaggtgatgaccctttagtacctggggacaagggcatttgaccttgtctgatcagtgactgtccctatgagctcagttctttgttctgggtctcgagtctggagagccccagctttgcttggggacgtcctttgcaagtaagagcagcatgtcaaagctacgcggttttgggagaaagtgctgagtctacaagacatctccccactggagctggcattgtgggagagagaggagaactcttcagagatttctgttgaaagactggaatgagaagcagatggttcatactggttaagaggccagcgccttgctgtagttttaatttcctgcaggatcccaatgattgtaaagattgtgtttctccacctctgcagaatcacccctaagcactgcattcatgattctgcagaaaaactaggcagccagacagacctggttcaaatcccaactgccgcttacttgtggcaagaataggatgagttttgctcaaccttatgtcagcctcagcttctcagtctgcaaactggcactactccactacatcagaagacgtttaaaagcatcagtgatgtctggaaatcagttagcatcgggtgagtgtagataaagcctaatccaccacagggcctttcggctttctttgcctccgttttctcatctgctaagtggaaagaaattttccttgcattggagtgatgttaagtctgaaaatacatagcactcgaagtcagtagagatacagagcagttttcagtggaaactgaacagagtggtttgactccagtacaccagctcaatgccagttcttggggcagagcagttgacccgagggagtggataattaaacaatgcacagaaccttagaacctgggactatgagggatctctgagctgattgggtctaaaccaagtccctttgcctgatgcttaaagcctctctcctgcatcttagacaagaaggcgtccagcctccagagtggatcccgctccaaggcaaggagctttcttagttattgagccaaaatccgccttcgattttgtaacttattgaagattgcagccatagtacaggacagagctgggactcaaacccaggtctgagtgcacagcccatgaccctaacacctgggccccattacctctgtaatccaaggttcctactgttgcactccattctgtccaggactcagcacagcactgggaacccaggaggattaaagaagggccagggtgactgtgcagggggaccctggggaagaaggctgacctctggtcgggaactctcaaaaattttgggatcaggctaggcgtggtggctcactcctgtaatcccaacactttgggaggctgaggcagacggatcacttgaggtcaggtgttcaagaccagcatggccaacatgatgaagccctgtctctactaaaaatacaaaaattagccgtgggtggtgcacgcctgtaatcccagctactcaggagtctgagacaggagaatcacttgaaaggaggcagaggttgcagtgagccgaagctgtggagccactgtactccagcctgggtgacacagcgagactctgtctcaaaaaaaaataaatagagaagtttggtatcagcaacctgactgtggtccctgagctctggccagcccttcttctggcctatagatgctgataggcccatgggaccattacaggagtgaataggaagtgttcccagcagccgggtgcctggggggcagattggagaagcctggtcttggacaggcctcttcaagctgaccccagggcatccacttcccctgtggaggaagctcctcaggttaagtgaacattcattgattttaattttttctcctggaaaactggcttgctgctcccatccccagaggcatccatgtcccagggaattaccaactctcagcatgtaacttacattgcgcgtcgactgtgaaatcaaggagaacaagagacgaggagcttgcgtgctggcggagagggaccgatgaatcatgaacgaatgagaaagagacagataagggtgacaaaaataaaatgtgttggtctgaaagcagtgggactactttaagttggggtcaaggaaggctgttctgagcaggtggtatttgggctgaggaatgagacagccgtttcgggccccgggggaaactcattccaggcagggacacagcagatgcatggcaggtcccacgttgggaggacttgaggtcatcattagaaggttgggttttattctctctgcaattagagatgtttggtaggtttttaactagggagtgacatgatgtgtttcactttaaaataatccctatggctgctccgtgcaaagtggattgaacaagacctcgatgggatcagagagaccatttaggtggctgccacagtcaattacaagtggaagtggcttggattcaggtggagacaggaagagaggatgatctggaaatgcccggaacagtccaggcatgagcaattgcagtcagtgcctgggttcagatccaagcctttggaatcatgtatgaatttgaaactccctttcctcctgtgcaagttaaaggttttttgttgtttgttttttgttttttggttttttttttggagatggggtcttgctctgtcacccaggctggagtacagtggtgtgattgcagctcactgcaacctccacctcccaggttcaagagattctcctgcctcagcctcctgagtagctgggattacaggtacaagcgaccacgcccagctaattttttgtagttttagtagagaaggggtttcaccatgttggccaggctggtcgcaaactcctgacctcaagtgatccacctgcgtcagcctcccaaagtgctgggatcacaggcgtgagccaccgcacctgaccctgtgcaagctttaaattgcaggaggtgatcctttgtacattggaggtggtagtagtaatagctgacatgatcagtaaaaatattcattgagatcatacattcactttctggagctgccgcaaaaaaattgtcacaaactgagtgactcaaaacaatggaagtttattctcttacagttctagaggccagaagtccaaaatccagagatcagtaggactgtactctctctgatggctctagggttccaactttgcctgctgccggaggagtggttgagaataactgagtacatggccctccttcagcaattgctctgttctgttgtgtggagagatcacattttgtttatctgctcatatgctcatggacccttgggtttgtttcccccttctggctcttttttttttttctttgagacggagttccacttttgtcccccaggctagagtgcaatggcacgatctcagctcaccacaacctccgcctcctgggttcaagtgattctcctgcctcagcctcccaagtagctgggattacaggcacctgccgccacacccagctaattcttgtatgtttagtagagatggggtttcaccatgttgtccaggctggtctcgaactcctgacctcaggtgatccacctgcctcagcctcctgaagtgttgggattacaggcgtgagccactgcgcccggccttctggcttttatgaatagtgctgcaattggcagggcacggtggcttatgcctgtaatcccagcactttgggaggccaaggtgggcagatcacgtgaggtcaggagttcaagaccagcctggctaccatgatgaaacccatctctacaaaaaaaatacaaaaattaaccaggcttggtggcacacacctgtaatcccagctactcgagaggctgaggcacaagaatcacttgaaccaaggaggtggaggttgaagtgagccaagattgcgccactgcactccagcctgggcaatagggagaaactctgtctcaaaaagaaaaaacaaacaaacaaaaaataagtagtgctgcaacgaacagcagcagataagtatctgtttcagtccttgctctcagtctttggggtatgtacctaggggtggaattgctgggtcatatggtgattctgtgtctaactttttgaggaaccgcctgttttccactctgtgccacatagttttggttgaagtagttacagaaccgccccagatcaaatgtgggaagagatagatgccacctcccagtgagggactactaggtcacagagggaagagattggggaggggagatgctgttgcggccatctttggaatgtacaaatggccacttgagtagtgattacttcatttatttatttttgcagggaattattttttttaaagggcctcggatcacctaaggtcaggagttcaagaccagcctgggcaacatggtgaaaccctatctctacaaaaattagccaggcatgatagcaggtacgtgcaattccagctacttaggaggttgagtcaggagaatcacttgaacctgggaatcagaggttgcagtgagccgaggtcgtgccattgcaatccagcctgggtgactgactgagactccgtctcaaaaacaataataaaataaaataaaacaggacctcactctgtcacccaggctggagtgcagtggtgtgatctcggctcactgcaaccttggcctcctgggcttaaacgatcctccaaccccatcctcctgagtagctgggactacaggtgtgcaccaccacacctggctgatattttttggtaatttttgtagaggcagggttttgccatgttgcccaggctggtgcagtgaatatttcctcttctcttctcttctctctctttctctttccctctttctttcttttgagacagaacccaggctggagtgcagtggcacgatcacggctgactgcaacctcgacctcttgggctcaggtgattctcccacctcagccttccaagtagctgtgactataggcgtgtgccacctggctaatttttgtatttttttttgtaatttttgtagagactgagttatacgatgttgcccaggctggtcttaaactcctaggctcaagtgatccacccacctctgcctcccaaagtgctgggattacaggtgtgagccaccatgcccagcctgcagtgagtagttcttgatgcttgtcctgaacgcacactgtgctgggtgtaggatacagacatgagtattgcaggtgtggtttttgccctctcacagcttgtggttacttggagaagagccattaactaaaattgcaaaattaattttggggaaagggggctggactttcctgatattctcttcctccttttatctgtaagttgatgaataacttaacatagcaaagtgcactaaacttacatacgcggctccatgaatttttacctgagaatgcaaccatgtaaccagcacctagatcaagatctagaccgtccccagcccccagaaagttccctcataccccagtgggtaactgctatttaacatcttcaccatagattagctgagcctattttagaactttataaacggaatcataccgtagatactccttgatgtcaggcgtctccctctgcactgtttgtgaaatcccacaattaatcccttttttaaagagacattgacttgctgtcacccaggctggagtgctgtggcttgatcatagctcccctgcagccttgaactcctgggatcaagcagtcttcccactcagcttcccaagttgttgggactacaggtgtgcaccactacacctggcgcattttaaaacattttttttttaaatttagagacagagtctcactatgttgctcaggctggtcttgagctccctggctcaagcagtcatcctgcctcagcctcccaaagtgctggcattacaggcatgagccgccatgctggccttaattctttttttttttttttttgctttgttttgttttttctctttgagatggagtgtcactctgtctgtcactcaggctgcagtgcagtgctgcaatcttggctcactgtaacctctgctacccggattcaagcaattatcttgcctcagcctcccaagtagctgggactacaggcacacaccaccacacctggctaatttttgtatttttagtagagacggggtttcaccctgttggccaggctgctctcaaactcctgaactaaagtgatctacctgggcctcccaaagtgcttggattgtaggcgtgagccacaataccagtcttgaccttaattctttaacaacagcagtatggactgtgaaggaaacatgttctgtgccacaggagcatatagtagtgagctgtaatcaaatctgcagtgaataacgtggtagtgagctgtaatcaaatctggagtgaataacgtgaacactgggaagagaagcactcacccttactaagcatgcactattggccaggccctgcccttagaaggagagggtgagacctgcctggccagaggccacaagctctggaacagtccccgatgggttggaccccacctctgctcttcactatccgatgtgactgagcaggtgacttcactttgctgtgcctcagtttttccttttgtataattaaaatactgatggttactgcattattccccaaaccttaatgatcaataaacatggagctctgtaatgagggagcttgcattgttctggggatgctgaggagatagaggtaaaataggagatacctgttacgcaggaagaggtgagggaaggggagagggagggcaggggtgcaactgaaaatcagacagccaagacctgaggaagacagggcgggagcccctggctctctgtggaagagatttttggggagtggaatgggcaggagcaggctcttgggtcaggctcatctggcacgttcaaggaaccacgagggggccagtgtggctggagcagagcaggagggggtggcagggaggggagggacatggaggtgtaggtgtaggggggtcctgcaggcctcctggaggccactctgatggcattggctgtcactctgcgatgggggtgtattggttcgttctcaaactgctataaagaaataactgagactggagaatttataaagaaaagaggtttcattggatcatggttctgcgggctgtacaggaagtatagcagcttctgtttgtgggaagacatcaggaaacttacaatcatggcaggaggtgaagggggagcaggcatcttacatggccagagcaggaggaagagagagagcagagaggtgctgcactctttttttttttttcttttggtgttttgcccaggctggagtgcaatggcacgatcttggctcactgcaacctccgcctcctgggttcaagcaattctcctgcctcagcctcccaagtagctgggattataggcatgcaccaccacgcccagttaatttttatatttttagtagagacagtgtttcaccctgttggccaggctggtctcgaactcctgacctcaagtaatcctcccgcctcggcctcccaaagtgctgggattataggcgggagccactgcacctggctacactcttttaaacaaccacatctcatgagaactctatcacaagaacagcaccaaacggatggtgctaaactattcatgagaagcccacccccatgatccagtcccctcccaccaggctcctcgtccaacactggggattacgtttcaacgtgagatttgggtgggacatggatccaaaccatatcaggggaccactggaaggttttcaccagagggaggactggtgtgatgtgacctgacttttgcaaaggactgctctggctcctatgttgattgcacacagaccacagcccatgagaggagaaggttgatgcttaggacacggcgggagccctggggcttggatcacaggggaaatgatggaggcaggaaagtgggcagattctggatctgttttcaagatggagccaacaggattgactgatggactaggtgtgatgcatgagagtgtgccaggaagatgcaggcaccgagatccaggtagagttgacgaacacctctctactgtcaatgtattgtttttacgggtaccttgtatttatatgaaaggatactggctttctagatacagtaatgatataaaagtttccacttaaattactgctgttaagggccgggtgcagtggctcacacctgtaatcccagcactctgggaggctgaggtgggtggatcacctgaggtcaagagttcaagaccagcctggagtttcggccgacatggcgaaaccccgtctctactaaaaatacaaaaaattagccgggcgtggtggtgtgcgcctgtagtcccagctactcgggaggctgaggcaggagaatagcttgaacccggaaggcggaggttgcagtgaaccaaaatcgtgccattgctctccagcctgggtgacagacagagtgagactctgtctcaaaaaaaaaaaccaaaaaattattgctgttaaaaagcaagataatttcaagcaaaagtcttacaaatgttggtaaataatagagcgtttaggtggatggcaaatggtgacttagggaaagcacacactttgtgtgttgctgacatgttagcagaaaaaggagacagtgtctgagggcaaaagtggccctcttgggtctgtgtccgttctctaaaaactgaactctgcttgaaattgagtgaaatggatcaccagtttgttattgggaagataggaaagacctatagtttgaaggcttggaatgcctacatgggggaccagcaaactgtttctgtaaagggccagacagtaagtatttttggcatgtgggccatgtggtttctcttgccactattcaaccctgccattgtagcgcaaagcagccatgaattaataggtgtagctgtgtttcaataaagctttatttaaaaaagcaggccagtggccatagttgtggatccttagcctacagtctgcatcccagagcacagagcctcaagagcatcctctttcctggccttccagaaatttgagacttcttaactccaagctttcctttcttccactatcttgggatgagtcgagaagtttccctttgtgtcaactgcaggtgcactaaactccctgaatgtgctgacctactttcaactttaagtatttccacctgggaactagaatcaaatttgactggttcaatgctagaaagctaatgtcctttttatagtctgtttggaagctcatctcctctttccacaccttcggaaaccaaacggaacacagatcaatttccaagtgcctctggggctctctgttaatgccacgtcaagttactcaatagttgttttcctataattaaatatctggacacattgggctgccatccactgaagttactctcatgccctggtgaagtatctctgtgcctattatttgagaatgctagagagacttcttttctccaaacatttgataaaattaataatacaggttattaatgaagaatcagaaactacaaaaaggtggcaacaaatagacggccatgccatggcctcatatccaaaatgcaacggtgctaaacagaaaacacatgtctttccagccttgctttattgtgtagcagtttatgattttgtttttttgtgcctgtaaaaaattgtagccagactgcatatacaattttacattctttttttctctcattacatggcttaaaaaatcacttccctgtctttttacacagttttcagttaatgtcatataatcaagctgttgtaccacaacttatttgagcaatcctctaccattggtcatttacattgttttcaactgagcacgcttcttttttaaaaaaaaatttttaaatttttgtacaaatggggggtctcactatgttgcccaggctggtctcgaactcctggcctcaagcaatcctcccacctcggcctcccaaaatgctgggattataggcatgagacactgtgcctgtggctttcactgctctgaacatctctgagcatagaactattccttcatgtagtattgcttgcattagctaaatttctagagttgggattttttttttgatggggtgctgtattagtccattttcacactactataaagatactacctgagactgggtaattcataaacaaaagaggcttaattgactcacagttccacatggctgggaggcctcaggaaatttacaatcatggcagaaagtgaaggggaagcaggcaccttcttcacaaggtggcaggagagagagagagagagcacacagggaaaactgccactttaaaaccgtcagatctcgtgagaactcactatcatgagaacagtatgggggaaactgcccccatgatccagtcacctcccaccagatccctcccttgacacatggggattacaattcaagatgaaatttgggtggggacacagagccaaaccatatcaggggctttccagtctttaccggaaagcctgctagacaaattttaaaagagctataacactgagttgggatttcttgaggtcaaaatatttaatatctctttatgttgttttccaaaaggtctggattcagatactctccagcagtgtctgttgggagagagagagccaggggtgatggtctggctttcagacctgagatcagacaggcagatagctgaactcccaggcagttcgttggttggtggttggttttttgctaggttttagttgtttttttgttctgaatctcatttcaaagagagcagattgactccacacctaatgcacatcctcagtttcacaaagcagctaagagcaagtcaggtttcatagtccaaatgatgctattgcttgagtgtaattgtgcaccagccattagcccacatttcttggtagagcctcggtgcccttggattatgaatttgcacacagtggaatcgcaacaatttgttttatagttctgtcctttgagggagtgacatttcttccaaggtctcagctcctttaatctataaaatgggaataataagaattcactggacaaatattcagtgtgcctgttgggagtgttgggcatgtgcagtccatctctggggctagcatggaaggcgtacattaaaaagatactcatgctggctgcagtggctcgtgcctgtaatcccaacaccctgagaggctgaggtaggtggatcacttgagaccagtctgggcaacatgatgaaactctgtctctataaaaaaaaatatatatatatatacaaaaaattagccaggcatggtggcacacaccagtagtcccagccgagaggctgaggtgggaggatcacctgagccctgaaggtaaggctgcaatgagctgtgattttaccactgcactccagcctgggcaacagagtgagaccctgtttcaaaaaaaaaaaaaaaaaaagaaaagaccaggcatgatggctcatcatgcctgtaatcccagcactttgggaggctgaggtgggtggatcacttgaggccatgagttcaaaaccagcctggccaacatggtgaaaccccatctctactaaaaatacaaaaattagccgggtgtggtggcacgctcctgtaatccagctactgaggaagctgaggcacgagaatcaattgaacctgggaggtggaggctgcagtgagccaagatcgtgccacggcacttcagcctgggagacagagcaagaccctgtctcaaaaaaaagatactcatgcaaataaatgtgtaagtactaactgtgatgagtggaaagaattacgcaagaagctataagaaattacagcaagacaattgtatatccacaagaaggtttataaatgcttctctgaagagataacatggagtgtttgcgacctgagtgattcctaggttttggctaaggaggaatgagggaagcagacggggctgcaagaatggcaggtgcaaaggccctgaggctacagagctctgtgccctcccggaatcagagggtggaatgggtggggtggcatgtcagtactcagaaaagagatgcaggcagaggtgggttaggcaaggtcccagatgcctcatgaaaggctgggagccaccactgagctaagaagtgacaggctaggggagtggaggctggaagatgactctctccctgtgctagtgagcaatgcccatggtggtctagcagaataatcactttttttgttgtttttttgagaccaggtctccctctgtcacccaggcttgagtacagtggtgcaatcatggctcactgcagcctcgacctcccagactcaagccatcctcccacctcagcctaccttgtagctgggactataggcacacactaccatgccagggtaatttttttttttttttttagcggagacagggtttcactatgttgcccaggtctccagctcctgggcccaggcaatcctcccatctcagcctcccaaagagctgggattacaggcatgagccaatgtgcccagcccagagttagagacattttagaggcaaatgagagtcccttttcttcctcctttccctaatttcaccctcaagctgatgaccatgtaattgtggttatgttcaagaagtgagagctaaaatgggatttacctttacgtcagtttgcaagaggcaagagagaagcttacatttctaaaacagcagccacaccgtggaacctaaaagctagctggacttaactccagtgcatcctagccaggaattagggaactttttttaaactttatttatttattttgtagagacagtttcccaggctggtcttgaactcctcagctcaagcaaacctccagccttggcctcccaaagtgctgagattacaggagtgagccactgcacccggccaggagttagggatattggcaaccccaggttatcatcccagaaccagtcatgaaactcatgaaatcatcaccaccatccccatctccaagagaatctctctagtacttgcatgtcatgattaaaatcagtggtcagtcttggcctgagtaggaggagaaagctggaaccagtggacttcctgatatgtgatcccatgaaagagtgaagtccgtcttgtgttcctatgggtagctgctctggagggtggaagcctgaacttgatcattccctctaattctcagcccatctagacaaaaggagtctgctgggagagagaatttgtttggtttattatcagttctgaaggtctcacgctggtaagaagttcagagttagttgcagactttttaactcaagagacaggatcttgctgtgttgcccaggctggagtgcagtggcatgatcgtagctcactgcagcctcaaactcccgggttcaaaggatctttctgcctcagcctcccatgtaactgggaccacaggtgcacaccaccacacctagctaatttttttattttctgtagagacagggatggcagtggtggggtggtggggggcgcaggtggctcgggggcagggttgtgtgtctcactttgttgcccaggctggtcttgaactcctgagctcaagcaatctccctgcctctgcctcccaaggtgctggaattacaagtgtgagccagcgcacctggccaatcaaattctttaaaattaagtgccacaagttaaattcttttcttagaggtttaaatgttacagacacatgactgacatgtaataaatattcagcattcattggcaagaacaggagaagccagatggctggataagctttgggctttggttcaaactgcagttccccagataaatagctccgggatcttgggcatgttctaaactacctgggctttattttttccctctgtagcttgtaagagcacctactccacagactcatgagaataaacagcaggtgctcaataaacggcggccagtattgttatttaaggtttacactcactttaggtgtatgtcagtcccacctgagctacatttgccaatgagtcacgcctggctaccaagtgcccgaaatggggctcatctgaatgggggtgtgccgtaagcataaaacacacatccgattttgaagacttgctatgccaaaaaggatagcaaaatattaacatttcgctaattagttttcatactaattagttttatgctaatttattacctgttgaaatgatgagattttgaggacacgtcaggttaaatagaattaacattaatttctttattttcagtgctttattttttaatgtattatttatcttttttcaacttttgcctttttccatgtgttccaaaagattaatttcatctgtttcttttcttttttgatgtgaccactagaaatttttaattggcacatgtgactcacatttttatttatttatttatttatttatttatttatttatttttgagatggagtctcactctgtcgcccaggctggactgcagtagcactatctcagctcactgcaacctccgcctcctgggttcaagcgattctcctgcttcaacctccagagtatcagggattacaggctcctgccaccatacccagctaatttttgtattttcagtagagacggggtttcaccatgttggccaagctggtctcgaacccctgacatcaaatgatccacccgccttggcttcccaaagtgctgggattacaggcgtgagccaccatgcccagcctatatttattttcaatagtacaggtctaaagacatgatatagaaagtaggaatggttaaggagtgagaaaagcgtggacttggcaatcagaaagatgtaggggcttatcagggtagcagtactccctgtatgctattagagcagtcagttaactttttttttttttgagacaggctctcactttgtcacccaggctggagtacagtggcacggtagcacaatctcggttctcaagccatcctccctccgccgcctgagtagctgggactacagacgtatgctgccactcatagctgatttttgtatgtttgtatttttttatacagacctgctttcactgtattgcccaggctggtcttgaattcctgagctcaaggaatccgcccactttggcctcccaaagtgctaggattacaggcatgaaccaccaagcccagccagttaacctttgtgtgcctccactaatatctgtgaaatggaagcaaaaatccccagcacaaaagcattgtttcaatcaatgagataatacatggaaagtacttagctcagtcctaggcacaaaataggtgctcaaacacaaataaaggttatagcttttgttacatgtattagggatgtttagtattcagaagggggctaggtaaaccctgaagacaaatgaataacagtaactctcattggtttagcaagatagacttttgcatgccatttctacctccatgttgacatttgaccttcagaatgaccttgggaggtatgatcaagcccttagagagatgagaggctgggcatagtggctcacacctttaatctcagcactttgggaggcgaggtgagaggattgcttgagcccaggagttcataaccaacctaggcaacacagcaagtccccgtctctacaaaaaaataaaaacattacccaggggtggtagtgcatgcctgtagtctcccaactactcaggaggctgaggtggaaagatcacttgagtccaggaggttaaggctgcactgagagagagacagagagagagagagagagagagagagagagagagaggaaataggctcaggagcaagcaccttcacatctgagcaggaactagaactaggccttcttgtaccaaccctctggattctctcaactttccaagcctccaaagtttgtttctgtgtttacttcactctctggttaggtggtttctacaggagtctttagaacaagagagaagaccgacatttattacaaccagcaaccaacattaatcactttcccatatcagtacataaagcgccatcgcattctttttgttgaatgcaggttattctgcatgatggatatacccaagtttattttaaccagttcccactcatggacaattaggttattttcaatttatatcaatgagacaaattccttcaagtagaattatgctagggatcaatggtttgcgcatttacaattttacagattttgacaaattgctctccaagccatttgtatgaatttcctctcctgccagcaatgaatgaagtgccagttcccctgcatcgtgaatatggccaaatatttcatgataaaaattcagtgtggagaaagcagaggaaaggtgagatagcagctgggaggccgtcaggaggtgggggcaactgtccaggtaggaaacgatgggtacctgaacaaggacaaagtaaggagggagagggtggagcccagagctaccgtggaagtcaaattccgtggcgtggtggtgaaggaagataacaggaaggaggaatcagatttcttgagtttctggcttgaacaaatgagtaggcagtgggtctgttaatggagatgctcaacataggaaaggagataggtgtagtgaagagaagatgatgactgtgagaacgtattgcacttgatatgcaggacaccctgctgaaccagggagaggatttggggatagtgaatcatttgtggaaaccgtgagtgtccatgagctctcccagagatgggtgggtggaaggatggatggatggatgattggatggatggatggatggatgggaagatggatgggtggatggatgggtggatggatgggaagatggatggatggatggatgggaagatggatggatggatggatggatggatggatggatggatggaaaaatggatgggaagatggatggagagatggagggagagaaggatagatggatgaatgaacagacagacaaaaaacagaaacctagactttattgtctttagattgaaccatatgaaattactatttttggccaggtgcggtggctcatgcctgtaatcctagcactttgggaggtcgggggggaggggcagatcacttgaggatcagcctggccaacatggtgaaacaccgtctctactaaaaatacaaaaattagctgggcgtggttgcttgtacctgtaatcccagctacttgggaggctgaggcaggagaatcacttgaacccgggaggctgaggttgcagtgagccacgatggtaccactgcactccagcctggatgacagagcaagactccatctcataaaaaaagaaaagaaagaaattactatttttgttttaaaaattaccaagtgcttacttttatgcaggttgaaatattttggggggaaggatactgatgtctacagttaactttgaaatgcatcaaaaacaggatgtgataaagcacatgtggtaatcatgttaatggtagaggctagtagtgggtatataggtatttaccgtaaaattctttcggctttgctgtgcattggaaagtttcataaaaaatcatgggaaatggtctaggcgccgtggctcactggtgaatattgtcaatttcatgtggttcccctcaatttatgttttatttggtcaaaaagatccttccaggttcccaatctgtagcatcaacagatctgctttgtggagtcccctttggcccttgttctgccccgatttgggggctgggggctgggggctgacgtttctccctctcaaagttcaggttgaattgccctaacgtgctgattactgcaccgaggatgccggtatctggcttgtaataattatagatttcctctgcgatttgatcccattggttgcctcggcaacggcgtaatagctcaaccgaagcgctgtcacggtgatttagaaccagtgtgtctctcctgcagcctccattctgggtgcctccacccccttgccgtcgtcatggtaactgatgagcagcatgtgaccgaaagctctctgcccccccaaccccataccccctccccatcttgtgatcaccctcattacctcttctgggccccctgtggacctgcgttgacccagcatgggctacaatgggggagttgggtaatcgctcccggtaggttcctccccaacccccgaggcggggtcaggtggagcgtgggcgccagagcagcccctctgccttgggtgtcttggagatgacttggcgccccccggagccccgtcatggctgtggctgcgtccacaacactgcatcagcagagtcctggggaagccatttaggaatctgaagcccgggatttctgctttgtcccttcaggggttcctgagcctgttaaaaaaaaaaaaaaatctaggaagaggccctggaaggaaaaaggggagggagatagcctattttacaaggtctgaaatgatgtgtcttatccttctggcttaaaccaagctgggcttaaaacatcttttaaaaaaaatctgtattctatttttttctctctgtttatcgctctccttctgcctctgttaatctttgtttctgtgtagttgcatcctgtttctgtctgaaaacccttgtctttctgaatccatctttcagtctctcacattctgtctttcccctcctccttcaccttccctccgtccctctcccttgcgcacttgccgggtaccagctgagtgcatccttttcccaaacctgctctgcttccaaggggcccttttctgtctcctccacctgtccccatgttttggggactgcctggaaatccgggacaccctcctgaggagggagctggtgcccaacggcacctcttaggatgaacccagccagctgcgttcctggcctctgcagaatggcatacagaaggcattttaagcaagcgagctgagctcgccgcaggactccgactaccaggcaccgtgagtgcaaatgtgtatgtgtgtctctgtgtgcatccttacatgtgtatgtatttgctgccatggggaggtggtgccagtgtctgtcagtgcctgttatctgtggtgttggggtgtgcaggtcgggggggcacacacccttgtgcatctgtgtacatgcgtgcacatgtgcctggctctctgtgtgtaggacacacaaatgtacttaacagatttttcaaggacactttgtgaacacagcaggaggagaccctttaaagtggggacaaaataatgaaagatggatatagaaatgatgagataaggaattgctcttatcaataggcttgcaacaccacagtccgcctgcatctggtcctaggaaatgaagtgagggtcaccttgaaaaggcatttttgttcaagccgctaaataaatcctttcccttcgttctaaggacaagaacagcacaaacacacacacccctttctctttgaaactcaggggaatggaaggctcagggggcgctgtcactgggcatttcagatagagtttgcagtgagaatctcagttgacagccagggcggctcacgccaagagtagatgtcaggaagctctggacagccgctctcttcacatcttgtggctgattagaagttcattttgaattttttcccagaagcagcctatgccccaagaggcaaccagaagaaagcaattttagaaaatgcaatttcatttgcagggcaagatgtgggaatcctgaaaggttggcgctgaagatcctgcagttggtgtgtgcaagctggcagccaggccgctgccggaggaagggggtcctctgtgctttgcatgtccctgggtatttgggaaacttggcagccggttgctctaagtgaaccctgactctggagtaggcactgggcaccctggcggagaggacagagccggagacaaggactggcctcagggagtttccagttcaaataggaacagacccgatcacacgcgatacgctcaccctcagacacattgctgctgcctgcatttcctccgggctgccatcccccttcccctaccctggcctctgtctgccacgactgcccttgtctacctgccaagctctaattatcgttaaacatcccgtcactgcttcccggaaatctttaacttccacccaagaacagctaacactatacgccctcctctacctgcagaaatcacttggaccctctgacatcacatgtccaaccgacctctttctccacatttgcccgtgagctgcacttcattttgcaaggacataaagaagactattcacgcaactacatgcaaaatgactggctgggattcctaaaacgccaatgtcttttaaaaggcaaaagggctgagaaatggttccaggttaaaagagattaaagagccatgagcccaaatgcaatgtttgatcctaggatgaagcctggatcaggggaacagaaaacacttgtgggctgggctcagtggctcatacctgtaatcccagtgctttgggagtccgagggaggaggatcacttgaagtcaagagttagagactagcctcaggaatatagggagaccccatctctacaaaaaataaatataaaaataaactaaccagacatagtggtgtgtgcctgtgatcccagctactcaggaggctgaggcaagaggatcacctgagcccaagagttcgaggctgcagtgagccatgagccatgatcatgccactgcactccagcctaggtgatagagcgagaccctgtctctaaaaaaaaaaaaaaaaaaaaaaacaattaaagaagttttagggataagtgggaatatctgaatatagattgtatgttagataatagtatttatagtatttttatgtcatgaatatgccaataataaataaattaaaaaaagataatagtattttattaatggtaccttcatgagagtgactttgtatctcagatcatttgtactgaggttatgtaagagaacattcttgttcttagaagatacaggctgaaggattcaaggatgaaatatcacaatgtccacaactaactcaaataattcagaagacagataatagagtgggcacgagtgtggcaaaatgttaacagtttcgaggattacaagcggctgtggaactatgttcataacttttatgtgggtctgaagattttccagtgcccaggctgggcactctgcttagctttgcgcgtggattatctcatttcatcctcagagcagcttggggatgggagagctctatcacacccattttccagtggagaaaacagaggcacagctagttgtaagcccaggccacattatgcccccaccccctgttttgtgaaatttagtactaaagatactacatggctgtgtgatgtcgggcaaatcacttaacctctctgtgatctgtttccttttttcttttttttgctacgagtggataattataatatcagaaggttgttctgatgggtattatgatatataaagaacttagaacagggtttggcctaaagtaagcgctgagcaagtgtctgctgttgctgctgctaattgtatttgttgctgcagtcgtgatcccagcaccctcaccttggccagtgatggggaaacctgaagggtgttttttcttctgtacccagggcgtgcttcatgggtttgtgatctatatggtcacacagggtcccgtgttcagaagatccccccatgtcactgacttgcaattcgtaaccattttctcacaaggggcctcgaatatttattttatgcactgggtcccacacatcatgtagccagccctgtctgctctccctttttattggatcccgttgagagcctctcctagactaaactacttgtgcctacgtcattgcagcagacaggcccaggcaggccgtggcatttcagcaggtcagattgtatgttcctgtgaccacactccaattctgatgcaatgcgtcagcccgcacaggccagtacagtagccgttcatcacatctggtcattgagcatctgagacgtggctattctaaactgtgatgtgctgtgagtgtgaaattcacaccagattttgaagacttagcacacatccgaaaaagaaatgcaaaatatcttattaataactatattgatggccgggcacggtagctcgcgtctgtaatcccagcactttgggaggccaaggcgggtggatcacttgaggtcaggagtttgagaccagcctgaccaacatggtgaaactttgtctctactaaaaatacaaaaattagccaggagtgatggcacacacctgtcatcccagctactcgggaggctgaggcaggagaatcgcttgaacctgggaggcgaaggttgcagtgagccgagattgtgccactgcacttcagcctgggcaacaagagcaaaactccatctcaaaagtaataataataactatattgattatgtatcaaaattattacattttagatacaatgggttaaataagatacatgaaaaaaattggtttcagctgtttttgcttttttcatatggctaccagaaaatgtaaaattacctatgtggtttgcattgaaagcttgtgttatatttcttttgggcagtactgtcttagagcatactacctgtgccttcattgtgactccaaaccaaaccagaccagcaggtgacagtgcagtgaattgatttctaagttacattaatacacactggccctggtgctgtagcttagaccagagtctcccaatcaatccatcaggcacctctttctgttccttcttttctgttcctttctctcttaagatagtccaagacactgatttttatacccagtgagtttgtcaagtagcctaaagatatttttgaggcaacgtattgggtaaaaagaaactgaagttggaatcagaaggactaatttaagaattaaattaaaatcccaaatcacctctttttttttttcttttagagatggggtctcgctctgtcacccaggctgatctcaatctcctgggctcaagcgatcctctcaccttggcctcccaacatgctgggattacacatcaggtcccaggtcacctcttctccatgaggtgagcttgggcatgttatttctctgtgcaaggaaacagaacagcactagctttaaagcctcacagacccgagtttgaagactggctctgccgttgacaagctgtgtgacacaggataagccacaaccctctctgaacctcagtctcatcctcagtctcatagcgctgatgatgcatactgtgtaatactgttgcaagaatggaataagatgaagcagaacaaatgtccaacccagcaactggcacatggcaggtgtgcgcttaatccctgcattcttagtgggatcagtattcccaagagagtgaacatttatgggaaagaaaagaaatcttactctttatgaataaagtacagatataaaatacaatacataagcagatgtacaatttatctgtggaattaaaatttcatggggtatgtagctaataaagaatctttaggggaatggcaatgaaaaaaagtttgagaaacattgcattaatctgacggatgggactcagaggttgcttttcagttcagttcctgtagttgtcagagtatagggctgaaactccatgattgaattcaacaagtgtttttgagcacctacaatagccagacaccgttctggaccctggaaatggagggcaccctccaggtacatgcttcccagagctggtctctgaggtcccctgagccagcccctgcctctgggaagatgacccctaaatggcagcctcagtcagggggcagggttttagagaacaacaggaatagaagtatttgcctcccaggagtagataagacggtgtatgtgaaaccttgacacgattggcattcattcgtaaaatcagagcagatacctgcacacacaggcataaatgaaagatactttgaattacagaaaagttaaggtctttgcaagtgcatgtaggaatgctgccaggcacacagcgtgactccagccaccaacaaagtgtttccaagtctggagctgtgtggtccttgaaggaaatataaatgtttcacttgttatacgctgtgatttttgcgtacttagcggtttctggagtccgtgaaagtggtttgttttctctgaacgggaagtgcgtttcctccaatcacaccgacctgatttgtttgttgcttgttgggcctccccacgggaacacgagatcccacagaacacagcaggacgtgtccttgtttactgaggaatctctggggctcggcacaggtgtgcagaaagcatttattgaactgaacaaacagattttacaagccggaccttctgtggcgttggcccgggtagctacttcagcatgggtccaagcatcctttctaagccaattccattctttcactcctcctcccttgtaggatcagaaatccaaagctagcttatccttttgcagatgtttctttccatattatttcctacctccagaacaaaggctatctgtgtctcacattcggaggcttggatgtgaagccctgtctgttcatttttctctccagttttttcacaggctgggtaactacctgcctgctagcaacgatgtgttcgttctccctggattcctgattgaggtgggcagagaggactctgagacaggagcatgaggatgaggcagatcagcttctttctcatgaaatctggatgttgaggctggtagcaggaccaccgcatgtgccaatagtctttagcagctcatcaggccatagaagaagtgcctttactaacttcaagtccagcctgggaaacgtagtgagaccttgtctctccctgtctaaaaaaagaagaagaaagaaggaggaggaggaggagaaggagaaggaaaaaaagaagttgttcacaatttttgtttactcgtttacttatttttgagatggagtttcactcttgtcgccaggttggagagcagtggcacgacctctactcactgcaacattcggttctcaggtttaagcaattctcctgcctcagcctcccaagtagctggaactacaggcacctgccaccacgcccagctgatttctgtatttttttgtagagttgggacttcaccattttagccaggctggtctcgaacttttgacctcaggtgatctgcctgcctcggcctcccaaagtgctaggattacaggcgtgagccatcgcgcccagccaaaatgcacaattttaaagagctctttggaaacagaaaatggcctgcaacaggcatctcttccacatcctatgtactttcttcaattgaccctaagccagttgagtgcctcctgaccccacaaatagatttcattcttcccattttacagatgcagaaactaaggcactgatgagttcagcaacttgcctaggtaatatatatggcccagccacactttagacccaatttctggctcttgttactttccccacatcattctcagtctttcttaggaatggacatttgcctgtttccaagaacagtatttctgtctccctatacaagtcactgataattttatgatgcccaagaggcaggtgataggaagtcatgcctgcagggagagagggctggggcccatgcggaggggaaagtcagaagaggctgttgcagctgaagtcggaggagaaaagtggatgtgagataaagcctctgtccctgtgccactgcccctgaatggggccctgttaaccccatctgcacaggcccacggctccggctttatgggttgctatggcaacccctggccttgacaactgaagtgcacttggctgagtgtgtctttgtgtccctttgagtctgcagagaagccagcagctggggctgcagacgggaaaggaatgtcctcagcgtctgccagcacttttgtcttggtcccaacggctgataggaaaatgagaggcagggtcttttctagagagatctggggggtccatttctagccgatgatgcatgcaaagagttcgtgttcacaggacctgggaagcagcggagtagaaaggtgagtcagacgccatcttcataggctgcttgttgagcatttactgtttattcaatgattgtttgcaggcaggcactgctctggggctggggaaacagtaaggacttctgccagcccacaaaatagttccaattgctattactcccattttacagatcaggaaactgaggcacagagacgttacttaatgtgcctgaggttatacggcgggtcagtgagaggccagggatgtctagtctgggggtaagatcattttgaaggatgcaagattggggagatgcagggaagaagcagtttcatatccagcacctcacactctgcctccacaggcttttttctccctgtatccatgggatgtttgacctccagttccagggatttgaggatcatgaagtcctgtggtcatatgcagggcccaccgtccactctttatggtaattaacagtagttctcagcctccgagcctccagagcttcccccggtgcccaggtcacacctgtgagactcagacctacttagtctgggtggggctttgacacaagtgtaagcttctggtgagcgagcgtcaggtgcagccaacgctagaaatttctggcttttgagctctaagaccttgaacaagccttttaggcttctgaaccggttttataacgccagccaatcctgcagattaccgaaaggatctatggaaggtctattgcatgtggtaggtgaacagtaagtaaataaatgggagctggtacttttactatgattattctttctccagagcaaattggaagagtttgtttccactttcacctgaattcctctcacttttactgatttaaacattgaactcggcctcttagctcatctcgcccctccccgcaatgcaccagacacacgaaggaagcagagagagctaatttgcattttaatcaaaagaaaaaggacgaggagaggtgggtgggactgaagagctcactatctggctagaccagggttttgacttgttttgactgagacacacagtaaggaatagaacttacttcaggcccactgcacagctgaaacaaaaattaccagcatttgctatgtaccctgacaattcctattctgtttgatttactgatggatttaaatttctctttcagttctgatcatgtcaaggaaaaggtccccatgtgatgccagcctgcctttaacacctgtctgctctctgccagtctctagggaaaggagggggccaggcctggggctatagccttgggcggtccactctgtccggcttttaattgaataacttgctttgattttattatgttcttttcctagttgccttcgtagcaaataaaacttgacgggggaagatagcaattaggtttttttatttgttatatttttctttgtagagacaggggtttcactatgttagccaggctagtctcaaacgcctggcctcagctgatccatctgcctcggcatcccaaaattctgggattacaggcatgagccaccacacctggccagaaggtagcaattggaaaggatcctaggaaaattacttttttaaattgaaaaagcaagttgatttcaagaaaaatgttaagtcaacacaagtcatatgagacataagagctcaaaggaagggtagtatgccaagaactgaggttcgggaaatgcatgggggagattgggggtctcagagaccaggagggccaacaaccagcctgctgtaacttcagattttcagatttctccaacctccttggtcacaatttcatggcgtgccagtgctctgaaagcacctcccttctaaccaggaatccttcacctgcttctttccccagatgcgcccatccagggtctagcggattgcaaagggcctggtagaatcaaagagggatatactaatgcaacttcgaggtaggagcaaggcttggggaaaatgctgtggcaaattctcagtaatatggaactcttagcacgcttgtcaggtgtttcttagagtccgaacgggccttagaaacaatgtgatccagccaggcaaggtggctcatgcctgtaattccagcactctgggaggccgagggatcacttgaggtcaggagttcaagaccagcctagccaacatggtgaaaccctgtctctacaaaacatacaaaaattagccaggtgtggtggcgtgcccctgtaatcccagctgctcaggaagctgaggcaggagaatcacttgaatccgggaggcagaggttacagtgagccaagatcacaccagtgcactccagcctgggtgacagagtaagatcgtgtctctcaaaaaaataaagagaggaagccgagaggctatttaggatatcattgccttcatccaggagaaggatgatggcaagttggaccagagcatgttggagacttgtgcaccagcagggatatactggaaccctgggcacccagctcccttctatcatcattggtgcttcaggcttctgtaccaagaaagagagccttcccttgtggcagcctgcatctggggtttccagtgcaagcctgcagggaaagtctgcctatctgtggggcctctttccttggcaactccagaaatctccagggatctcagaccatagggctctagaatcaatgactacatcttcagcagcaagtataagacaggagcaagtcagagacagagtaaatgcaaatgacttgtgtgcctatgattgtccaggatgtgttcatccattatccctaattcccagcgcaaccctgcagtgagagaggcatcactatctccaatctacaaatcaggaaactgaggctcagagcatttttgtaagtttcaccctgttgtacaagtacctaagatagggcagtggtttggatccaagctttttatatatatatatatatatttttttttttttttttttttttttttttttgagacggagtcttgctctgtcgcccaggctggagtgcagtggcatgatctaggctcactgcaacccccacctcccgggttcaagcaattatcctgtgtcagcctccccagtagctgggattacaggtgcacgccaccatgcatggctaatttttatatttttagtagagacaggatttcaccattttggccaggctggtcttgaactcctgacctcaggtgatccatccacctcagcctcccaaagtgctgggattccaagtgtgagccactgcgcccagccccaagctttatattctaaaacccaggctcaaataccacctccatgcacaacccacatatcttaattatctattatggtgcacataacagacatcactaatctatcacattttttcccctgaaaacctaaaagagtgcttcctgctaacaggtcaaaaaataatgaaaaataaaaaataagtaaagctaaaagaggccgtaaaatctttttgttcgctgctccaaataggcaatactcattggccagcactggcacgtgttgtaacatttatttgccatttcaatactgcacagaaaattagcttctctcagctaggcatggtggttcacacctgtaatcccagcactttgggaggccaaggtgggaggactgcttgagcccaggagttcaagatcagcctgggcaacatggtgaaaccccatctctccaaaaaagaaatacaaagattagccaggtgtggtggcatgtgcttatagtcccagctactcggtaggctgagatgggaggatcacttgagcctgggagccagaggttgctgagatggcaccactccactccagcttgggcaatagagccagaccttgtctcaggaaaaaaaaaaaaaacaaaaaaaaaaaaaaaaaaaaaaacaatggcaatcttggggtcacacagcctgtagcaggtggaaattgaagaataagtctgtgtgatcagagtgtgtcattactctacacacacttctttggtcctctcccttcccatctacaaaagacagccaactccaatatctcttttttcttttttttttttttgagatggagtctcactctgttgcccaggctggagtgcagtggcgccatctcggctcaccgcaacctccgcctcccgggtccaagcgattctcccgcctcagcctccaaagtagctgggattacaggcgcctgccaccacgcccggctaattttgtatttttagtaaagacggggtttctccatgttggtcgggctggtctcgaattcctgacctcaggtgatctacccgtctcggcctcccaaagtgctacgattataggcgtgagccagcgcgcctggctttttcatttttattaagataaacataacattaacctttttaagtgaaaactcagacccttttagaacatccacaatgctgtgcagccaccaccgctatctaattccagatttttttcatcaccccggagacccccgtacccattaagcagtcatctctcattcctcccaggcccctgccaacccctgatttattttctgtctttgtagattcacctactcttgaaggttcctataaatggattcgtagactatggggcattttacctctgcattcattcatatagcataaaaaatattttgagatttatccatgttgtagcatgtgtcagaacttcattcctttttatgactgaataatatttcgttgtaaggatagaccatgttttgtttattcattcatccactgatcgacatctgggctttttctacctttcggcgcttgtgaatagtgctgctatgtgtatttgtttgagtctctgttttcagttctttgggttgatgcaaaggtcatttccttttgcaccaacctagtacttaggggtggaattgctgggtcatgtagtagtaattctatgcttaactttttgaggaacttgtaattcttaaaaggccatgccaactctaggactgagggtttaagagctaatccctgccttcttactcctcatcaactcccaccccagtgggtgccctccaacacacctgcctcgagaaccccctccccagctcagtgaccccagcatctcattgacatgctgagtgcatgctccctgcccctccctgggagcctgcctaaacacagacccttctattctttctaattttttttgtacccattaactatccacctcccattcaacccgccactacccttcccagcctctggtaaccatccttctactctctatgcccgtgacttcaattgatttgatttttagatcccacaaataagtgagaacacatgccacttgtctttgtgtgcctggcttatttcacttaacatgatgatctccagttccatccacgttgttgcaaatgactagatcttttttttttttttttgagatggagtctcgatctgttgcccaggctggagtgcagtggcgccatctcggctcactgcaacctctgcctcccgggttcaagcgattctcctgcctcagcctccctagtaactgggactacaggcatgggtcaccacacccagatgatttttgttttttgtagagatggggtttagccatgttcgccaggctggcctcatgggatccacctgcctcagcctcccaaagtgctgggattacaggtgtgagccactgcgctgaatagtactccattgcgtgtatgaaccacattttctttatccattcatctgttattggacactcaggttgcttccaaatcttagctattgtaagcaatgctgcaacaaacataggagtgcagatatctcttcgatatactgagttccttccttttgtgtatttacccagcagtgggattcctggatcatatggtagctcaatttttagttttttgaggaacctccaactgttctccatagtggttgtactagtttacattcccactaacaatgtacaagggttccctttgctccacatcctctccagcatttgttattgcctgtcttttggatataagccatgttaactggggtgagatgacagctctttgtagttttgatttgccttctctgatgatcagtgatgtcaagcaccttttcatgtgcttgcttgccatttgtatgtcttcttttgagaaatatctattcaaatcttttgtccattttttgatcgaattatgagatttttttctatagagttgtttgacctcctttttatattctggttattaatcccttgtgagaggagtagtttgtaaatattttctcttgttctgtgggttgcctcttcgctttgttggttgtatcctttgctggaggacagacccttctggatgcaactagagcagctgggctccctcctccctttgagagggtctccagagggccctatcaatcaagatcagcctagaaattgttgctcgagttggctccagatgaccgcaccttcaccttccctccaagtgctctatgatttcttaccacacccactctcactgtgcaccaggatccttagctactccgtgtcatcatacacctccgagcacttgccttatccctgctttcttcattgccttctgaaatcgcctaacttttgaagatgcagctcaggcaacacctccctgacattgtcaccccagccagaaagaatctccccgtattcccttagcacttcactcacaccagcaaaatagttgtgattctgttctatcttatgcagaatttgttgttgacagtgaactggaaaatttttatgtacatatcatgctgagttattttaagaaagtattcacatgatgggtaaagcagcctagtacattaaattcttccattttctttccgctcatagttctctgccactaaattatgagcttcagaaagaaagcaatttatccatcttggtttctcctaagagaagtgatgacttggccaggagcggtggctcatgcctgtaatcccaaccgtttgggagtccaagatggtaggatcacttgagctcaagagtttgagaccagcctgggcaaaatagcaagacctcatctctactaaaaatttaaaaaaattagccaggcatgatggcacatgcctgtagtcccagctacttggacggctgagatgggaagattgctagagcccgggcgatagaggctgcagtgagccctgatcgccccactgcactccagcctgggcgacagagtgagaccctgtcagagagagagagagagagagattgattatatctaaacgatgcagtgccttgctgataacaggtgcctaattaacttgtgttgattgaattagtggatgagagggagtgaatgaatgacgttaactcttccaattgtttgaaatatattgtgctaagaattaatgtctaacagagatcagattttgttataaggtcaattttcaactgcaggccaccaaaatgtcaccacggtatattttccaatgtgacattttgtaattgaaaacgtgtgggattggctctcacttttgcagaatattcaaatgttgagttctctgagacattcggagtttcaaaaacgtgtttaatggaaattgaattgtgtgacgcctcagtgctccctgtttcagacaagtggttttaagggaaagacatgaactgcactttctacacagttactctgttgctaaattaataggcttgcattgagtcggatatcctggaatagaaaaaaaaaatccattgagttattaagaaaagagtttgggccatgcacagtggctcacacctgtaattccagcactttgggaggcagaggcgggtggatcacaaggtcaggagattgagaaccttctggccaacatggtaaaacctcatttctactaaaaatacacaaattagccaggtgtggtggcacatgcctataatcccagctactcgggaggctgaggcaggagaatcgcttgaaccagggagtcagaggttgcagtgagccgagatcacgccactgtactccagcctggcaacagaacaagactccatctcaaaaacaaagagtttggtttctcagttaattcatggccacactttccaagcccacactttctcagaaagtttcctctggtgaaaagcaataaaatttattctgtgaactacgtcatttttattcatgaagcctcatatcaacaatagctaggggccgggcacggtggctcacgcctgtaatctcagcacgttgggaggccaaggcaggcagattacttgagctcaggagttcaagaccatccttcacaacgtgagaaaaacctggctctactgaaaaaaaaaaaaattagctgggcgtggcggcgttcgcctgtagttccaggtacttgggaggtggcaggatggcctgaccctgggggaggcagaggttgcagtaagctaagattacaccactgctctccagcctgagtgacagagccagaccctgtctcaacaaaaacaaaaacagctaggagttttgttattagctggattaactgatgttacaatgcatagaggcaggggctttggggtcagacagtctcaggtaagcctatgactgaggccgaatgtcataacctctctgagcctcccttttatcatctctgaacagggagattaccctactcctatagatgtttgagcaaagagaagggagtaatgtacccttcagaatgtctcacaaagaccaggcaccatgcctcatgcctataatcccagcacttcaggagccaagatgggaggatcatttgagcacaggagtttgagaccagcctgggcaacacagcgagacccctgtctctaaaaaatatatatatttaaaaattagctgggtatggtggtgcatgcctgtagtcccagctacttggcagggctaaggtgggaggatctcttgagcccaggagttcaaggctgcagtgagcaatgatcacgccactgctctctagtctttcttttgtctagcccttttttgtcttaaaaaaaaaaaaaaaaaagaccctgtttgaatgctggatcatctcagtgggtagagagtgtcaggactctggcccagccctgtctagtcaaccatggccagtagggccaggtctatgcccccgcagaggaatggggaagtatctgagaagggggaggaaggaagtgcagagcagacaccccagaagatacttcctgcaccaaccccaccccacccgtgatagtacctcagttgcctgaagacaggataatgacctgtctctgtcttctaggagctgcctcctagggctctggggatgaaacgagatggttctacagcaccagctgagagcctgcacatagcaagtgcccagtacttgatgatgcttagagggtaaggacggcctctaattgatctttatgtgccctagtgcccagtgaagggtctggcacacggtaggtgtaccatgaatgttcgtagcacaaatgcatcaatggcaaccgcctccctccttcattcactctttccttctaataatacagccaacattctattagctctgtgggcagccacagcgtgctggaactcgccatcctgggctcggtgcctgattctccacactattcctgccctgtgctgctgagcccacgtgtttcccagcacctgaacctgtactctgaacccgcctgtcattcctccttgccctgttctctctccttggatacaggcctcccctccagctgtgggatctctctaggtctgtatttatcacctctggttggcacttcctatatgctgtcatcacagaagcagggggtgggagaagcctcttggtcttcatccaggtctaggatggaatttctgtccactgtggggctgggtagagttaggcagcccaagccagggctgcatgaggaaagggctgcgtccccagggtctgtcacagagtaagtttcaggtgttgcaactcgcaataaatccatgcattaggcacaagccaggactcctgagccagatatctctcaaccccaacgctggctccaccagcaacttgctgtgtcctgggtaaaccacatggcttcttttaaaaaaaatagttttactttgtttactgtccaaagtactcattaattgtttatttatcaagagaaactatttctaattttttgtgtgtgagacggtgtctcactctatcacccagactggagtgcggtggtgtgatcttggctcactgccatctccgcctcccaggttcaagcgattcttgtgcctcagactcctgagtagctgggattacaggcgtgcaccaccacacccagctaatttttgtatttttagtagagacagggttttactgtgttggccatgctgatctcgaactcctgacctcaagtgatccacctgccttggcctcccaaaattccgggattacaggagtgagccaccctgccagcccaaagagaaactatttcttagcccccatattcatgtttcatagttcaggaacacaggtcagtgataaacttctaggtaactcaacccaaagaaattctttatattccaaaatcactttgcactctgaacaataacagccatcctcatcgcttctacatatgccttgtttcttggttcagccacagcaaacttatagagagctgcaactctcagggatacaatgactgctccaacaatgtgaaatggcagactctggaccagaaggccacacacctgagttttgtcaaagcactggaagccgtggtagttgtctagttgtccttgataggtatgtcaacctcaacaccaatgtctttcctggatcacttttctttttttttttttaattgttattttaaaaatcacacagataacataaaatttaccatcttcaccattttcaagtatacagtacggtattataagcacttttgttgtatagtgaagctccagaactacttcatcctgcaaactgaaactccaaacacactaaacaatgtccttttttcccttcccccagccctcggcaacctctttttcctctttttctgtttctctttttttcctccttgaaacagagtctcgccctgtcgcccaggctggagtgcagtggtgcgatctcagctcactgtaacctctgcctcccgagttgaagtgattctcctgcctcagcctcccaagtagctgggattacaggagctcacaaccacgcccgggtaattttttatgtttggtagagacggggtttcactatgttggccaggctggtcttgaacacctgacctcaagtgatccacccatctcggcctcccaaagtgctgggattagaggcatgagtcaccatgcccagaccctctatctgtttctaggaggttgactactttaggttttttttgttttttttttttgtttgtttgtttttttaatttatttattttttattgataattcttgggtgtttctcacagagggggatttggcagggtcataggacaatagtggagggaaggtcggcagataaacaagtgaacaaaggtctctggttttcctaggcagaggaccctgcggccttccgcagtgtttgtgtccctgggtacttgagattagggagtggtgatgactcttaacgagcctgctgccttcaagcatctgtttaacaaagcacatcttgcaccgcccttaatccatttaaccctgagtggacacagcacatgtttcagagagcacggggttgggggtaaggtcacagatcaacaggatcccaaggcagaagaagttttcttagcacagaacaaaatgaaaagtctcccatgtctacttctttctacacagacacggcaaccatccgatttctcaatcttttccccacctttcccgcctttctattccacaaaaccgccattgtcatcctggcccgttctcaatgagctgtcgggcacacctcccagacggggtggtggccgggcagaggggctcctcacttcccagtaggggcggccgggcagaggcgcccctcacctcccggacggggcggctggccgggcagaggggctcctcacttcccagtaggggaggccgggcagaggcgcccctcacctccggacggggcggctggccgggcggggggctgacccccctacctccctcccggacggggcggctggccgggcggggggctgatgcccccacctccctcccggacggggcggctggcctggcagggggctgatccccccacctccctcccggatggggcggctggccgggcggggggctgacccccccacctccctcccggatggggcggctggccgggcggggggctgacccccccccacctccctcccggacggggtggctgccaggcggagacgctcctcacttcccagacggggcggctgccgggtggaggggctcctcacttctcagacggggcggccgggcagagacgctcctcacttcctagatgtgatggcggccgggaagaggtggtcctcacttcctaggtgggatggcggccgggcggagacgctcctcactttccagactgggcagccaggccgaggggctcctcacatcccagacgatgggcggccaggcagagacgctcctcacttcccagacggggtggcggccgggcagaggctgcaatctcggcactttgggaggccaaggcaggcggctgggaggtggaggttgtagcaagccgagatcacgccgctgcactccagcctgggcaccattgagcactgagtgaacgagactccgtctgtaatcccggcacctcgggaggccgaggctggcggatcacttgcggttaggggctggagaccggcctggccaacacagcgaaaccccgtctccaccaaaaccagtcaggcgtggcggcgtgaggctgcaatcgcaggcactcggcaggctgaggcaggagaatcaggcagggaggttgcagtgagccgagatggcagcagtacagtccagcttcggctcagcatgagagggagaccgtggaaagagagggagagggagagggagagggaactgaatcttaatctactttaggtttcatatgacaggaatcatgcagtatctgacctttggtgactggcttatttcacttagcataatgtcttccagtctcatccatgttgcagcatataacaggatttcctccttttttaaggctgcataatattccactctgtggatacagcatattttttcccattcatctgtcaatggacgtctaggttgcttccacctcttggctattgtgaataatgctacagtgaacatgggttaaaatacctcacttctggagcctcagtttcctcatctgtaaaatggggataatcacgcctgccccattgttgctggcacgtgaaagaagcctgataaatcatgctcctagcacctttcacttttccttcaaggcacttctccccattataatgatgcccttgtttatgttatgattcatttcattctctttgttcctcatgaagatgtaagctccaggcctgcctcattcatccctgtatgtccagtctgagaaacagtacttggtacaaagtcagcactcaatggagtacttgttgcaaaataaatagagggattttgttggagtgtttgggctaagtgttgcgtgactgtgaggtttgctgactctggggtcacacacatgtgagttcggctttcagatccaccacttaacctctctgtgcctcaatttcctcctctgtaaaaagaccatggagcatggttgtacatgttaataatagtaataaatattaatcatactgtatgtaaagcgttttgtgcagcatgcgtcacacagaaaggactcgggaaacagggtccatgaagaggaatgactcatgaatggtgctgtcgctgttctgagatacaaattttgttctgagatacaataccatttatgtaaaaaatacacataccaattaacaaaacaggtttttagcagaaagatgtacagacagaaggaggcacacaaaacacatttaaatggtgttctggggagagggaacagggagcaaggagagatgataaaaggaaacaaactgggggataggggctgctccaggctcccaataagaatggcaatcagggctggacacagtggttcatacctgtaatcccagcactttgggaggccaaggcaggcagattacttgaggtcagaagttcaagaccaaactagccaacatagtgaaaccccatctctacttaaaaaaaaaaatcactgggcatggtagcacatgcctgtagtcccagctactcaggaggctgaggttgcagtgaaccgagatcgagccactgcactccagcctgagcgatagaatgagactccatctcaaaaaaaaaaaaaaaaaaatgtgaattgaagtatatattcagtataatatagttttgggttggttttttttgttttgttttggtttggttttttttgagacagggtatcactttgtcacccaggctggagagcagtggcgcgattatggctcactgcagcctcaaattcctgggctcaagcgatcctaccacatcagcctcctgagtagctgggactataggcaggcaccaccacacccagctaatttttaaagtctttgtgaagatgggatcttgctatgctgcccagactagtctggaactcctggcctcaagaagtcctcggtctcccagtgtggctgagatgacaggtgtgagccaccttgcctggcctaatatataaagtccatgttcagtataaaacccaagcatttgacaatgtcagaagaactttctctattaggtgggaagtggtggggatgggatctttggctgagaggggagtggtcttcatgggcctaagtctgcatttctggtttctttcagggtggcagcacgcaaagggtgtccctgtccctcaaggggtcatggcctccatgttgctcgcccagcgcctggcctgcagcttccagcacagctaccgcctgctggtgcctggtaagccccgggggtcttgataagaactggtactaatggaagataccatccagactagggattcctgggctggaagagcccttggggataaagggaccagccagtgagtgtttctgggactgtcccactgtattagtctgttctcatgctgctaataaaggtacacctgagactgggtattttatgaagaaaaagaggtttaatggtctcacagtttcatatggctggggaggcctcacaatcatggcggaaggtgaaggaggaacaaaggcacgtcttacatggctacaggcaagagagcatgtgcaggggaactcccgtttgtaaaaacatcagatcgtgtgagacttactcaattgactatcatgagaacagcatgggaaagacccacccccatgattcaattacctcccactgggtccctcccatgacgtgggaattatgggagctatgatttaagatgagatttgaatgaggacacagccaaaccacatcacccactatccataaaactgtcaccatcgccacctcctttctctctcccatctctgtcatatgatcctgtcccaagtgcctcggtctgatgggattggatccaccctggagccactctgcctgcaggtaggcggtggcctccacagccagatggccccaggccatctctgcagggaccgctggggaaaacacacatctgggatcgctgctaaggaacaaagaaagccataagcgactctgaaattgacctagagcccagctgtgcttcagggtcactggatcactggatgggaggcaccatcttaggaatgtctcacccccactctgccccacacccatggccacttgcactggctccttcttccttctgtttgacgtctttgagacctccctcccaatagtcccatgagggagggaggctcaagtgaatcctattttacaggtgagagaactcaggcttagagaagcaaagccatttgcccaaggtcacacagccacttgcaagcaactctgtccggctccaatgctaactactcctccgtgtgcctccatgtggctctggagacagagccgccagcaggagcctcccttcacatgccccgagagtggcctcctgcagagatataaagtgcctggctcggggctggccatgaaataggttcagaaagaccagtgagcctccagcctgtccccagctctctcacagcccctgtgcttgtcatcatggtgtcccttgttggcaggccttactgccttctgaagacaaactgctagccgtgtccttggtctgcatgttgaatgctggtgtgtatgtcctgggtggcataaacagtaggagcgttcgcccctccccaaggagtatgagtaggctttattttaaaataaacatcttggccgggcgcagtggctcacaactgtaatcccagcactttgggaggcgaggtgggcagatcacctgaggtcaggggtcgagaccagcctggccaacatggtgaaaccccgtctctaccaaaaatacaaaaattagccaggtatggtggtggatgcctgtaatcccaactactcagcaggctgaggcaggagaatcgcttgaatccaggaggtagaggtggcagtgagctggatcgtgccactgtactccagcctgggcaacatcgaggctctgtctcaaaaaaataaaaaataaataaataaacatcttattttttaaaaattttagatttacagagaagttacaaagatattacagggagaacccatatggccctcaccagtttcctcccttgttaacatcttacatcaccaagatgcagttgtcaacactaagaaactagctggccaggcgcggtggctcacgcctataatgccagcactttgggaggccgaggcaggaggatcatctgaggtcagaagttcgagaccagcctgggcaacatggtgaaacctcatctctactaaaaatacaaaaaaaaaattagccgggtgtggtggcaggcacctgtaatcccagctacttgggaggctgaggcagaagaagcacttgaacccagaaggcggaggttgcagtaagctgagattgagccactgtacttcagcctgggcaacagactgagattaaaaaaaaaaaaaagaaaggaaaggaagaaaggaaggaaggaaggaaggaaggaaggaaggaaggaaggaggaaagaaagaaagaaagaaagaaaggaaagaaagaaagaaggacagacagacaagacagtggctcacagctgtaaccccagcaatttgggaggctgaggcaggaggatcgcttgagcccaggggtttgagaccagcctgggcaacatagggagaccctgtctctgtgaaaaatacaaaacttagctgggcatggtgacatgtgcttgtagtctcagctactggggaggctgaagcgggaggattgcttgagcctgggagatcgaggctgcagtgagccatgatcatgccacagcactccagcctgggtggccttgtcttaaaataataataatagataaataagtttttaaagacactaagaaactgaccttggtatgttaccattaaccaaactccagacttttatttggctttcactcatttttcctttaatgtctttttctgctccaggatccaatccaggtacacacattgcattgatttgtctcatcttccatggcctcctctggtctgtgacagtttctcagtcttttccttattcttctcgacctgggtggttttaagaagttatcaatggcttttgaggttttgcttttccttttttcttttttgtttttgtttttgtttttgtttttgttttttttttggtgtgtgtgtatgtgtgtctgagatggagtctcactctgttggccaggctggagtggtgccgtggtgcaatctcgactcactgcaacctccacctcccggattcaagtgatcctcctgcctcagcctcccaagtagctgggattacaggcacctgccaccatgcccggctaatttttatattttttgtagagacagggttttaccatgttggccaggctagtctccaactcctgacctcaagtgatccacccatcttggcctcccaaagtgttaggattactggcatgagccactgcacctggccaaggttttgctttatttatttatttataagagaagcatattaatgtttacccataattatgctaaactaaatcagaaagatgtaggtatggagggttccaagtcagaaagagagtctggcacagatgatccattcattccataactaaggctgttgggcacctactgcatgccaagtgctgtgctgggtattaaggatgtggcagtgaagaaagacatgtggctcttgtggagctctagcctggtggcgcatgtggcaccatctttaaaggtcattctccaggacatctgagctttcctaaggagacaccatgggaagagcactaggtcaagattcatgtgattggattgctaccttcaccacacattaaccaagtgagcctaaccgatataccttatccaagcctcggttttctcatcaggaaaacgggtctaataatcatatccttcctatttcacaaatttcttgcattagaagaaatggttcatatgggccaggcacagtggcccacacctgtaataccaacactttgggaggctgaggcgggtggatcacctgaggtcaggagttcaggaccagcctggccaacatgatgaaaccccgtctctactaaaaatacaaaaattagctgcgcatggtggtgtgcacctgtaatcccagctacttgggaggctgaggcaggagaatgggttagaacccaggaggcggaggttatggttcatgtgaaagcactttatttgtatttacagtaaggtgggaagtgtcctaactcccattttacaagcatggaaatacaggcacaatgcaaaaaacaaaaaaacagaaaaaatagaaatggctaaatcacagagtttcttacctttacctcttctgcattttcttggctggagctgaatcttttttggcacatttatgatttagaaaaccatatggtgagattttgtcttctcttttgacttattgatttgggatatctagtaagccagaatatggttttttaagaatactaaaacacagtgttggcaaagatacaggaatacgtgtactctcgtacactgctattaggcaagtagcaaccaggggaaggattaaaaaatgataggaattacagcttacttttaacccatttagccctcacctccactccttaaggtaaaggaaacttcaagtcagggaaattaagttgccagagccacagagctgatgagcggctgagccaggcttttgagctaagcccagttggctccaggacccgagccactgtattgattatctgccgccacgtaacacatacctccagatttagcagattgggatcctatgtttattatctcacagtttctgcgggttgggactccaggggtgacttagccagatcctctggctcaaggtctgtcatgagggtgtaatggagctgtcagctggggctgtggtctcatatgatggctcaacttggcggttggacgatctactggcagtcccacttacggggttgtggctggattcagttccttggatgctgtcagccagaagccactctcagttccttgatacgtggacctcttcacagagccgcttacaatgtggcaactgctccctcaaagcaagagagggtgccaaaaatggaagcctcagcctgcagccatacccacagcattttcctgcttctccatggtgtctccaccaggtccctgtgaggccattaaagtgacgatagttaacgatctgacatggtgttcccaatggcatcattttatgcctccccaaaattaataatcttatgttggtaaatagaatacagagagtgggagaccacatcaaaattgttattgctgggtagaaaattaaatgtgttttcttttttccatgttgcttattggtatcttcctcaataaacattttatcacaaaataagtggggtggacagttgcaggagcagataaaaaaaattttttaacagaaaagcagagcaaacaactccagttggacttgaccttcgttctggccaggctcatgtacagagctttggctgtttgggaacacgacattcgtttatcactctcggtctaaagatcaagagaacattaacaatgtttgctagctactgtgtagtttggagctaaaaatagactctggcttggcatggccattgagggctgtgagccccagagggccaggctggatggaccattcacatattgtgtctggtcttgtgtgtcaataacatactcttgccttctggatgtgttattttattcaagaatgaaaatgcttgatcattcagtattaattcaaaccggttttttgcatctttgtgatcatgatcaaaatttgcctttaggagaagtgtgttgttttgctgcaaatgtttcattcaaaggctagcactcgatgaaatcaaagatagcctcagttccattcatagcttctaggaaacaggtcagatgggcaaatttcctgctaaccacttgctagctgtgtgatcttgggcaaattaattaacctctctgagcctcagcgtcttcttctgtaatgtaagaataataacatttacctcataggagtttgtgagaattaaatgagataagccatgtaaattgctccagatgattcctggttgttaccctaagtgctcagtacacacttgaatctgcttctgtgtcttcatagatgagatccaagagaaggtttacttgtcccttcaatttttgttctgttctcttgtggtgtattgttatatgtcatcattaagagaatattcattgtaatagtatttggttattttccttttttaaaaatgccaacattgagatatagaaggaaaagcagaagtattgggattgcaagaacctgggttccaatgctgactcttcaactcactagctgtgtgacatcgggaaagtcacttaacatctctgatcctcaactgtaaactgtgaacaacaatactatctatatggttgtatttaattgtggattacttaaaatagatggaagtttgcctaaatagggccagcctagcattttagtaaagactgaatatgtgttaatttccccattccccccctttctgatagcgcagttgcaaacaaacttatggaaaacatgataggagctgatacagttctcggaacagacccatctgccttggacctgtcctcagcattcctggcttgtgccccatagcgcccagttagccagttctcaccctttcttcaccacctctcccagctcctgtttccccatggccttgacatgctcattatcgcagttccacttgatcccacgctctccagtcatttctctctggatccattcagccgcagctccccctgtgtactgctcccattcccagtatttccacactccggttcccaagaaatctgattgctacaatgcaatgtcaagacactttctggagaaaagaaaggaggacgcgtgtgtcctcatttaagaacagcttgctaatttctgatttttcattttccccctttgctggaaacaaagcaagatctgcactggtgaagagctatttttatcaaaatatgcgtccctgaagatctagttggaatcaatgctgtccagttatcctgagttctggcaaaggaaaagataaatagtttagtgtaaaaaactagggccgggtacggtggcttatgcctgtaatcccagcactttggggggccaaggcgggtggattgcctgagctcaggagttccagaccatcctgggaaacatggcaaaaccccttctctgccaaaaatgcaaaaaattagccgggcatggtgacgcatgcctgtgatcccagctactcagggggctaaggtgagaggattgcttgaaaccgggatgcagaggttgcaatgagctgagatcgcaccactgcattccggcttgggcgacagagtgagaccctgtctcaaaaaaaaaaaaaaaaaaaaagtagccgggcgcagtgttgtgtgcctgtagtcctagctacgtgggaggctgaggcaggaggatcacttgagcccaggagttcaacgccaggctgggcaacatagcgagacctcatttctttaaaaaaaaaaaaaaaaaaaagtcatcgatatgttctaggacctttagctctcttctaatggaatacttttaggaattccctttttcagatcaaagagaagaaaataaaagctgtttttcttcatccttatataagtatagtgctgtattttaacggtactttatgttcaaaagacagcatgatgttacataattaattcagaaaccttctttgataaccaaagcaattatggaaaattaagagtgattttaaatatgtttcaaaatctcatagctttgtatagttcgacaagctatctgcatgtgtgtctctgtgtgtgtgtgtgtgtgtgtgtgtgtgtgtgtgtcacgggagatcttggcacatttcttaacttctctgagctttagagtcccctcttgtgtaatggaaacagttatatatatatatatatatatacacacattttataatatattatataatatatattttagttataatgtattatataatatatattttagttatagtatataatatgtattttagttataatatattatgtaatatatactttagttttaatatataatatattttagttgtaatatataatatatattttagttatatgatatatattttagttataatatataatatatattttagttataatatgttatatattttagttataatatatattttagttatatatgtagttatataatatatatttttgtttattatatatatgaagatgaaattagattatttatgtaatttatataaagtgtccactgattccctagtttggtacaattatggcaaccccagtaagaggaactaacatttcccaaccaccaaatagtaccaggaaggtgaaagatcaagagtaacactgaagggatttctaggggttcctgacagtaaaccctcacacacttgtcttggatacaccgcacctgtctttcactcagggatcagcaaggcttgggcttgagctaccctttgtgtttcagcaacatgtggagctaaaaagattgtgggattcacccgggaaatcaaacaccctctgtaaactcattacacattatgtggaaaatgtgaaatgcattcaaacaaatgatgggtgaccatgtattagtctgttcccgcaatgctacaaaaaaaaatacctgggattgggtaatttttaaagaaaagaggtttaattggctcatggttctgcaggctttacaggaagcatgatgctggcatgtgctcagcttctggggaggcctcaggaaacttccaatcatggtggaaggcaaagggcaagcgaggtgcctcacatggtaggaataggagcaagagagcaagcagggaggagccacacatttttttttcttttgagatggagtctcgctttgttacccagtctgaagtgcagtggcacaatcttggctcactgcagcctctgcctcctgggttcaagcgattctcatgcctcagcctccctagtagctgggattacaggtgcctgccaccacacccggctagtttttatatttttgatagagacgggatttcgccatgttggccaggctggtcttgaactcctgacctcaggtgatccacctgcctgaacctcccaaagtgctgggattataggtatgagccacggtgcccagccagccacacacttttaaacaaccagacctcagccaggctaaaaatactaaaattagccgggtgtagtggtaggcacctgtaatcccagctacttgggaggccgaggcaggagaatcacttgaacctgggaagcagatgttgcagtgagcccagatcgtgtctctgcatgctaataccatgggcatctttccatatccacaaatatttaagatgtcaacctcaaaacaattaatgggtgcataatattccatgaaatggttgactatgccacattctgcttagctgacctccggtgctggacatgtaggttgttttccctttgttttttgtttgtttgttgagacagcgtctcactctgttgcccaggctgaagtgctgtaatcatggctcactgcagcctcaacctctcaggctgaagcaatcctcccacctcagcctcccaagtagctggaactaaaggcatgtaccaccacgcccagctaatttttgttttgtggtagagatggggtttcaccacgttgcccaagctggtcgtgaacttctgagctcaagggatccacccaccttcgactcccagagtgctgggattaccggaatgagcgaccccatctggccctctttgctgttaaatagacaatatatgatgaatattgtctacctccatctttgtgtactggtcccattattttcttaggatgaatcataaaaacgagattactcagttgaaagcaatagaaagctggcatcagatcaggcatggtggctcacacctgtaatcccagcactttgggaggtcaaggcaggtggattgcttgagcccaggagtttgaggccagcctgggcaacatggcgaaaccccgtctctactaaaaataccaaaattagccaggcatggtggtgcgtgcctgtaatcccaggtactcaggaggctgaggcagaaggatcaactgagcctttggaggtcaggggtgcagtgagccttgttggggccaatgcactccagcctgggcaatagagcaagactctgtctcaaaaaaaaatgaataaataaatacaaagaaagctggcatcagcttgtactcatgccagtaaaacaggagcatgcctatttgcctacaactttgctgacactgggttttcccttttttaaaatctacagtgtccttgtggtggcccagttggtctgtccagacacagtgttctggggtggtctggctgggatgaggctaaggtcctggcactacctctgttagggacattgggcatctgtcagggcagaatcctcatgatctctgctgtcaccagggatttctcattgtctttgtttactgcaggatccagacacattagtcaagctgcagccaaagtcgacgttgaatttgattatgatgggcctctgatgaagacggaagtcccagggcctagatctcaggtgagttgagcacacctgagtggggtattttggaaaagggaaaaaggcgcctaagaagcaaaagcacagccaagcttagggacctgtattgattgtcagctgctttcagagagttcaccaccagagatctgagatactcaatgaggccattttgccatacaaagccaaagaagggctgggcgcggtggctgacgctgtaatcccaacactttgagaggttgaggcgggcggatcacttgaggtcaggagttcaagaccagcctggccaacatactgaaaccctgtctgtactcaaaatacaaaaattagccaggagtgatggcggttgcctgtagtcccagctactcgggaggctgaggcaagggaatcacttgaatctgggaggcagaggttgcagtgagcctcctgagtagctgggattttaggcacgcaccaccacgcctggctaattttggtattttgagtagagacagggtttcactatgttggccaggctggtcttgaagtcctgacctcaagtgatccacccgcgtcaacctctcaaagtgttgggattacaggcgagatggtgcctctgcactccaacctgggcagcagagcaagactctgtctcaaaaaaaaaaaagaaaaagaagccaacgagggcatcacagaggagatgtatcagttttctcctaccacagtaatgcttcataacaaacagccacaaaaatcccactagcatagagcaagccaattgctcgtgcatttaaggttcattgggagttgggtagacagctctgttgagcagacagctctgttgggctcacctccatgcctgggggacagctggctgttggttgatctaggttaggcgtggcttgaatcactgcagtgatttggttctgctccatgtgtctgccatgctccagaaggctagatggggcttgtcctcatggcaatggcaaaggtgtacaaaagcaagaggagaacatggtatagttctgctgaggcctgggttccgcatgggtccgccatcactgctgcctccttctgctggccaaagccagtcatagcttgccttaagtccagagtcaagggctggggtacaacatccaaacaacagtgaaagaacatggcaatgttacatggcacagggctcagagatcaaatgcccacctttctaatgcaaatttattttttctttgcacattttgcatattttgtccataatgtcttttttttactgtcaaaacatacttcttttgtcattgcaactattttataaatccagaaatctttgtactaatataagtgattgtagttattttggatagtgttttgctaacaaaacgggagacattttaaatgcatgtttctattggggagatagattttaatctagtagtagtaaaattcttggaatactttttcatattcttgtcatgaatattatcctgtatttttattggaaatatataattttatgacactaactgctaacatctattttatattgaattacttttggaattgaaatctttgtaatatcaaagcggctagtttctaattccctgtttctgtataggataaagtacaagtggtttatggagtgtttggattataattataaatggttctttgatatgcaagttaatattttcagttatttatattcttaatgaagtgttaacaccttttttcccctaaataacagagaatctgtttttatggacactagataaacaccttcagcttaagattttcttgctaaatattttagtttattttatctttcaggtggctgaatttccagcctgtctatcgtactagtaatttaagcgtgtaatggaatagtttcctgccaactatttatatcaagtaattttaaagtaatatggttgactaataaaatatttagttattggcaaaagaaaaaaatgccaagacttgggaaaacatgaaagattttaagctattttggcaagagtgtggacttgctataatgcttttgttgttcttgcctgcaggagttaatgaaacagctgaatataattcaggtaagtgaggaggaggtaactttccttctgttgcttctttatcacaattgagctaaaagacagatgcttaatctgttctggctcttttttaaaaaaaatgtagttgacttttgttctaaacattttttctcatttcctttgtgatttcttctttgacccattagttacttacatgatgtttaatttctacgctttggtaaatttcccaaatttctttctgttattgatttctagtttcattccattatggttggaaacatatttttgtgatttcaatcctgttaaatttattgagcctttttttatggcctagcgtatggtctagcctggagaatattccatatgtacttgagaagaatctatattctgctgttgttgggcagagtgttctatagatgtttcttaggtctggttgcttttagaatattgttcaagtcttctatttccttgctaatcttctccctagttgtcctatccattatggagtgccagatgttgacatctccaactattattataaaattgtttttccctttgattctgtttttgtctgtgtattcagggctctgtttttgggtgcaaatatgtttataattgtcatatcttcttagtggattgaccctttataatattctctctttctctctagtaatatttttatagtctattttttctgatatgagtacaaccccttctagctttcttatggttgctgtgtgcatcagattcctttctccatctttttactttcaaactatttgtgttcttgaatctaaagtgtctcctgtaaacagcatcgagttggttctttttatccagtctgacaatctctgccttttgattggattgtttcatccattcacagttaatgttattattcatatggttgtgtttacagctgccatttattgttgttctctatatgtcttctgtcttttgttcttttgttcctctttttttttttttttagacggagttttgctcttattgcccaggctagagtgcagtggcgcaatctcggctcacagcaacctctgccttccggtttcaaacaattctcctgcctcagcctctcaagtcactgagattacaggcacccgcctccacacccagctaatttttttgtatttttagtagagatggggtttcaccacgttggtcaggctggtctcgaactgctgacctcgtgatccacctgcctcggcctcccaaagtgctggattacaggcgtgagccaccgcacccggccttttttttttttttttttttttttttttttgagatgaagtctcactctgtctcccaggctggtgtgcagtggcacaatctcggctcactgcaacatccgcctcctgggttcaagtgattctcctgcctcagcgtcccaagtagctgggattacaggtgcccgccactatgcccggctaatttttgtatttttagtagagacaagatttcaccatgttgaggctggtttcgaactcctcacctcaggtaatccacctgcctcagcttcccaaagtgctgggattacaggcgtgagccactgcacccagcccttttgttcctcttttaatgtttttgttttttatttgagatggagtctcactctgtcgccccaggttggagtgtagtggcacaatctaagttcactgcaacctccgcctcccgggtgcagtgattctcctgcctcagtcttctgagtagctgggatcacaggcgtgcaccaccacgcctggctaatttttgtattttttagtagatacagggtttcaccatgttgcccacgctggtcttgatctcctgacttcaaatgatccacctgcctcggcttcccaaagtactgggattacaggcatgaggcactgcactcagccctcttgtgatgttactcattttgcattaagtgagtactttgcagtgtaacatttttatttctttaatgattactacatattttagttttctttgagtttgctctaaggtttaccatacatatcttaacagaatcgacttcagatttgtatctctttttttgttctgatgtataaaacacatacagaaaaattcataaaaaataaaatcacagcttactgaactattataaagcaaaccacccatgcacttagccaaaacaagaaatacattgctggcacccacagatgcctctgtgtgtccacagatagtcacgatatggtgtacttcactgattcaagcttaatcctaaaagcccaagaatctagggagtggcagtgagcctgagttggtcttttctttctccaagaatgcagaggctgtgcattttttctgcaattacgaagagagccgaggcaattacctggttgatgtggacggcaaccgaatgctggatctttattcccagatctcctctgtccccataggtaagagctgggaaatcattccttggatataacctctgtttctgtctctcctagtcgtggctatccaggtattaggatgtggcttccagcaggcacatcccagagtgttgcctgacacttcacccaagggtaggaaaaaaataaataatgtgtaaagggtatattattagacatattatatgtcctctctcatctactccttccccaaattccacagggtaagtatgtattaatatccccattttgcagataggtaaacaaagcatagaaaggtttggtaccttgcgtaggaatcatagctagaatgcaaacccatctgtgtgaccacagtggcacccaggtaggtgtcttaggttgagtttcctcgaagaagagcctgaggtggggatttcctttttccctgcttttttttttttttttttttttccagacgaagtcttgttctgtcgaccaggcgggagtgaagtggcgtgatcttggctcactgcaacctctgcctcccgggttcaagtgattctcatgcctcagcctcccaagtagctgggattacaggcacacgccaccatgcctatctaatttttgcatttttagtagagacggggttttaccatgttggccagggtagtctagaactcctgaccgcaagtgatctgcctgcctcagcctcccacagtgctgggattacaggtgtgagccactatacccagcctaatttttttattttttgtagagatggtggtctcactatgcgctgcccaggctggtctcgaactcctggactcaagtgatcctcccaccttggcctcccaaagtgctaggatttcaggtgtgagccactgaacccagccagaggtagggattcttgggcaggttattgattgagggagagctctcaggagaaaggggaggaaaggaaacagcctggggcagggggaataagctaagaaggatgaggtcttagctagaactatccacagcctgaccccacttcgggctctggtgcatacaccacaccccagagttggtctcagactgaagcaaagggcctggctttttatgacccttcaccagccagtcatcgcccatcagctgcgagaggggagaactcgtataatctcctcggaaaagtggcttccatttgccaagggcgattttccaggcaaggaggcagctggagttattatcaatcaacacacacagcagctggaaaacggtgacctgcccagtaaaagtgacctcggtgggatgcccacagcgtctgcctccccagcctcgcctcccagccatatagagtgttcactcgctgtataaaagggcacacagacaggatggacagggctaaattggaaatgcaggtagctgctatttgcagcttggatggttaatgtttctttggctgatggattcctggctacattgagtagtccataggctgtgtctgatgaagcctgtcccttcacaggtaatgctggttcttctgctgcagaagagcccggggcatcctccgctccccatcagcacctccctttggaccctgctcagaagcctggagcctttccctgagacccagccttggctgtcccccctcctcttcttcccctgctcatttcctcacacctatttatttgccactaacatgagattagacagtaagcggatgactcattctttgggggaagtccatcattcaggaatgcctcagctatggaaggcattttggagacaagaatttaaaaaccccatctcccctttgtgtgggagtggaagggatgggctcttgagttgtcctgggttcaaatcctggctctactatatattagctgtgggactgtgacccacccccgaggactccctcagtctgaatgcccagctagccactgtgtgcatgaaggtcagggaatcagattagcagcatttgtttaaaaaactagaagtttggtcgggcacggtggagcacgctgataatcccagcactttgggaggccaagggaagaggattgtttgaggccaggagtttaagaccaatctgggcattatagtgagaaccaaccccaatctctacaaaagagttttaaaaattagctagtcatgctggtgcatgcctgtagtcccagctactctggaggctcagtcaggaggatctctggagcccaggagtttgaggctgcagtgggctatgatcactccactgcactccagcctgaggcaacagtgcaagaccctgtctcagtaaaaaacaaaaacagaaaaattctagaagttctaaaagttctctctctggccacctgtcctcccgtatctgtagtctttgaaaagatttttttaagttaatacttatagagaatttactatgcacttggcatattgccaagtgccttatacattatctcattaaatggctacagccaccttggagtagggtcttctaacatcacctccagttgactgatgggcccgagtctcaagagcttgcaggattttcctggcatacacagggagtccaaggctaagccaggctgtgcacaaacaactctctgcctcccaagcttattcttttttttttttttttttttagacggagtcttgctctgtcgcccaggctggagtgtagtggcatgatctcggctcactgcaagctctgcctcctgggttcaagcgattctcctgcctcagcttcccaagtagctgggactacaggtgcccaccatcatgcctggctacttttttttgtatttttagtagagacggggtttcaccgtgttagccaggatggtctcgatcttctgacctcgtgatccacccaccttggcctcccaaagtgctaggaatacaggcgtgagccaccgcgcctggccctcccaagcttatttctatggtagctgccttgcagacgcctgcccctgccctgccctgaaatgtgggggtcccacagcatagaaagcccaaggcaggatttccctgatcagagggaccagctccgctttcatctcttcttcagaagccagtaaggcacgccacatctgaggcttaatgaggtctacctggaacaggcttagctctccaaaggcagaaaagtcatgaacacacaggcagtggtgataaggaaccaggacttaaagacctttggccccgaaacagttggagaaacccagagtgttcctttcttgagtaaggtgtacttttcagtcttggggccagcgtgtgttggagtaggatgggggagtgccagggatgaatgttaaccaccttggtccccctccaaggctgtctcatccgtcttctcgaccagacagagtggaaccccaaggcatttcaaatcactttcacttttctattctattagcagaaagtctcccctgggtgatgccaggtctttaatacctgtctccactggctgatctcttactgtggaggagtgcgcggcccaggctcagaggcttgggcaggcaacagaaagattgttcctactgcattcaacctctggccacattgacataaagtctcctttcaaagcaaatgtatttggatggacacagtggctcacgcctgtaatcccacactttgggaagccaagacaggaaaatagcttgagctcaggagtttgagaccagcctagccaacatgttgaaaccctgtctataaaaaaaaaaaaaaaaaaaaaaaaaattagccgggcatggtggtgcatacctgtaatcccagctattcgggaggctgaagtgggaggattgcttaagctagggaggttgaggctgcagtgagccatgattacaccactgcactccagcctgggcaacagagtgagaccatgtctcaaacaaagaaaacaacaaaaagaaaaggttcaaggggtggattctgagattagccggtgactggtagaaggaagagggggtggtctggaaagtcctcaggcatggacagttatatccatgctactgcagcgattgcatgttcaaattcagcaggagttagtgtgaaccttgtggtggaaattcaggccatgatatcagcaagctcgttttgcacaaactccatttgaccatcttggtcccaacagatttcagctcgtttctccttgatctcataagcagagagagtttcagcattttcagcaagttgatttatttatttctttctttctttctttctttctttctttctttctttctttctttctttcttttttttttcttgaaaacggagtcccattctgttgcccaggctggagtgcagtggcacaatctcagctcactacaacctctgcccccctggttcaagcgattctcctgcctcagcctcccaagtagctgggattacaggcacctgccaccacgctgggctaatttttgtatttttagtagagatggggtttcaccatgttggccaagctggtatcaaactcctgagctgaagtgacccacctgcctcggcctcccaagtgagattcctttcttatctgctattcttcaaactcgagaatttctgttagttactggcttcttactctttggggcacagtttcagcttttcagcacgttctttctttcttttctctgctttcctgtaagcccaagaatatagtcgttgattcgtttttgtttttttttaactctctgaggcatggtgtcaagtcctggttggccccactggctgccatgggtgtactaaccctgaggtgggtctcctacgcctccctccctctggtcttctcgacagggaggtccaggtgcaaccacaaagtgtcccgggcctgtggagtggcatcaccatggacaggggactctgtgtaggaggcagaggtgggaatgagcattgtccaccatcactggccacagaggtgatgtggccacttcccagggcttcaagacacatgaaagtgaggatgcattcatcagggtgagagctgtgatttttagaaactcaagtcaaacaaatgaggtcggctgctgagttcttttctcagagagagaccctgctgccctgttgtgctccaaccttatgtgtaattatctcccagtactgactgggagatgacctgcagggcaggtgcattaataaccaggagatagacaatggcttgacttcaggccgggttcggtggctcacacctgtaatcctagcactttggaaggccgaggtgggtggatcacttgagggcaggagttcaagacgagcctcgccaacatggcaaaacctcatatctactaaaaatacaaaaaaattgtggctgggtacggtgactaccgcctgtaatcccagcactttgggaggccgaggtgggtggatcacgaggtcagcagattgagaccatcctgggtaacacgatgaaaccccgtctctactaaaaatacaaaaaattagccaggcgtggtgatgggcgcctgtaggcccagctactcgggaggctgaggcaggagaatggcgtgaacccaggaggcggagcttgcagtgagccgagattgctccacttcactccagcctgggcaacagagcgagactctctctcaaaaaaaaaacaaaattagccaggcatggtggcacacacctataaacccagctactccggaggctgaggcacgagacacgagaatcgcttgaacctgggaggcagaggtcacaacgagccacgattgtgccactgcactccagcctgggcaacaaggcaagactctgctgaaaagaagaggggaggggaaggaatgggagcttgacttgttaggggaggccaacatgcgatagaatggttaagaatgtctttcaaaaagccctagaagattacaacaatcttgcttgagtttaacataactacagagtaattcttattaattaacgtcaaacatttttattttaatttttttctttttttatttcttctttttaaaaaaaagggatacatgtgtagaacctgccggtttgttacataggtaaacgtgtgccatggtggtttactgcacctattgtctcgttattttaattttaatagagtggggaccagtgcctttcctaagcctaatccccatctcaattcctctctcagaagcaacctgcttcttctagagagatactcagtgcgtgcgtaagcatacacatatcctgtgtctctccttcttcacttagcagatctcagagattattctaactcagcacaaataaatctctctcacccttttctacagctgattcgttacattagaaggcttatttccctgacccactactgatggatgttaggttgctttcaagtcttgagatatgagagtgtcacaattaagatccatgctcatagatctttatacacactggtaggataaattcatagaagagcaattgctgaatccgagtgtgctaagccttgttgtgcaatgtcaggcccagtctggatggtaaatgctgtaggactctgggaataagcagatgtgtgaaggcaggatgaggcatgcgggtcacagattgcaggtggcatcactactcgctcagtctctgagcaaacatttgtcgagatttgactcagcccatgggcgctgggaaggaaggtgaggatcctatctgcaatccagcactagggcctgttgaaccacactccccagccagccccaggcttgaaattttcttgcatttatctccctttttatttatttatttatttaaatagagtctcactgtcacccaggctggagtgcagtggcgtgatctcaactcaatgcaacctccgcctcttgtgttcaagagattcttctgcctcagccccccgagtacctgggattacaggcacgtgctacctcgcccggctaatttttgtatttttagtagagacggggattcaccatgttggccaggctggtctggaactcctgacctcaagtgatccacccgccttggcctcccgaagtgctgggattacaggtgtgagccaccacacgtggcgcatttatctcaccttatgtttatgtagtccagtaggtctcaaatctgaacaagcatcagaatctcctagagaatttgttggatttctaggctgccccttgagagattctgagtcagggatgttaggtggggccccaggaatctctttttgtcaacaaaggataaaagaccctttggtttttaaagagagttggggggttggaaaggaagggagagggaaggagaggtgggaggggcatggggaacccttggatgcaatgaggtctctaacaatactctcctgccctcaggttacagccaccccgccctgctgaaactcatccaacagcctcaaaatgcggtaggtcttggggttacacagaagaaagacaaaatatgttcatggccattcacagaatcactgggcagactttggcaatagtcctttcattcattcattcattccataaatatgtattgagcccatactatgtgccaggtatgtggcatgccttgatgaatgaaaacgcagtgccgacattcccacggaggcagtcaattaaccacacacatgaatagagaattgcaacaatattaagtgctacagagtaaggtaggcagcgctttgtgggcataaaagaatgatgctaatagttaatgtttatggagagcataatttgtaccaaacactgtgttcagcactttatagcgacaatattgacaagtctgtgaagcaggtacttttgttatccccatttttcagatgcagaaactgaggcacagagtggttaagtatttgcccgaggtcacacagctagtggaggcgctgagaataaacccacaggagctgagctatttggggatggagagggtgggtgtcagggaggcttcccagggaaatgacttttcagctgagatctgaaggagaggaaggtctggcaggccacgagtcgggaggaatggtctcagcagagagaagagggcagcggcaagggcagcagtgtggctggagcagagagagtggggagggacccaaggaggactggagtagcagcagggcacagggttttcagacgccacctaggccaggggttcagaactctcacactgttgacatccgtagccagataattctgtgtggtggggggctgtcctgtgcattgagacattgagcagcatcccaggactctacccactaaatgccagtagcaactctctcctgaggttgtgataaccaaaaatgtctgcagacatggccagatgtcccctggtggatacggtaaccccacgtgagaacccctgcaatacatgacacctgtctctatccgaagagagatagagagccattgcacatttatactaaagaatatggccaggcacggtggctcacgcctgtaatcccagcactttgggaggctgaggcaggcagagcacttgagggaggtcaggagttcaagaccagcctggccagcatggtgaaaccccgtctctactaaaaatacaacagttagccaggtgtggtggtgtgagcctgtaatctcagctacttgggaggctgaggcaggagaattgcttgaacccaggaggtggaggttgcagtgagctgagatggtgccactgcactccagcttgggtgacagagggagactttatcccaaaaaataataataataataataataaataaaaagtacaacacccatgcaggcatgcatacagcctaaatgcaccactcaatgaatttcccatgtaaccaaagtttcacaactctttttgttattggaacatcccttaaggagcatttttagacattattttcctagttgttccctatcatgaaattgaaatagaaaaatacagtacatatggagtgtatctgtgtgttgtatttatgtccgtgctttacatggaacagagtaaaaaattttttttttttactcccactgagaatgcatgagttgtaatgaggaatcagaacatgcccccacccagttattattccttccaaccaaattaagtagacccctccccttacttttaacagattgctgtatttctccagttttgtttgcttgtttttttcttgagacagagtcttgctctgctgcccaggctagagtgcaggggtgcaatcatggctcactgcagcctcgacctcccaggctcaagtgatcctcccacctcagcctcctgagtagcagggactacaggtgcccaccaccatgcccagctcatttttggttttttgttggtttgtttgttgttttcttttgtttttggtagagatggggtttcaccatgttgcccaggctggtctcgaactcctgggctcaagtaatcctcctgcctcggtctcccaaagtcctgggattacaggcgtgagccaccacacccagttgtatttctccagttctttattgccatgtaaatggagttttgcagtgtgtatctttacctcgtctggcttatttcattcaaaattacgtctgggtgattcctcctggtgtgtgtaatcgcagactgtgtatcctcatggctttagagcgttcccctctgcggatatcctgcaatcctactgtccgtgggtatttgcatagctccagttcagggctcttatgaagaccactgctgtggacgttcacgtgtgtgtgttttgctgtacccatttatgtgtttctgttagatacgaagcttggagtagaactgctggccatgtacagctcctgcagatcctgccagacagttctccaaatcgatcgcaccaactccactcccacagccgggggagggttccagtcttgccacatcctcgccaacacggggtatcactggaagatttttctttgactcagagagtaacatacttatccacacatgacaaggaacttgatcccagaaagaaatctaagaaaggcagaaggaacaaagacccaatcctggtcagaaaaggggtccctagccctaaaacgtacttcactttaaataaacagagttggagctaataggaaagaaccacattttcttctgtctgaatgggtgtgccccgcctgggaggggccaggggacactcttgcctccgattagttgagaggtttaggagctgctgtatagggaactggtgtcctcctgaaggtgtctgatgaggcccactgaggccggaggctcccgaatgtgtttacatctaaagcctggctttgttttgaaatgttgtgcgaatcccagatgccttggcagttggtgctgaaaaaaaatgtgtcaacaaacacatcagacacatttgcagtgtcaaccgcctccagaggcagaagcgtcctcaacaacacacgacgtcaaggcccagagattccggctgcatgtggtggctcacgcctgtaatctcagcactctgggaggctgaggcagaaggatccctgaggccaagagttggagaccagcctgggcaacatatcgagaccctgtctctacgataactgtttttaaaaaattagccaggtgtggtggtgcatacctgtagtcccagctactcaggaggctgaggtgggaggatcgcttgagcccaggaagtcattgcagtgagccgtgatctcgccactgcactccagcctgggtgacagagcgagaccttgcctctgaaacaaaacaaaacaaaacaaaaacatatcccagaaaacaaaggcccagggattctgatttcagggacagtactaccctgtccctgccaggagcttcccccaccttccctatccccccatcacctttcacctctctctgccctctcacctcgtcagggactggtcctaaccctcacatctcccacttggctttctgccagcaacctctccccatcgatccctcccacctcccttctcaccccctccaaaccgtccaccaaactgtgccgcgtgtggaacccttccctggtacttactgccttccggctgtgtcccagtctcctccacctcaaatgctaagcccttggagggctgcctcccactttcttctttagccttattacttgacatttgctcattcattggttattgactgaatgcttccaatgtgccaagcactctttttggtgctgggatttgatggtgaatccacgttctccgtcccagtctgggttgggttgttctgcagaggaactgggtttgaggcctgatgaaaagagcaccctgacgcagtcttagagaggtggcagctgacctccacgggctaaaaggtttccagcaggacatgcccagggcagtaggccggggcaccactggctgacatcttgggtcttccgcatttttggctggagatgcactcaggtggtggcaatggtattctgcttgtacagggcaggttcctgccaggtcaccaaagtcccaagaaggggtttatcaacctttttgcacccaaaccaaaccaccctgaaactccaccataattacttcatgtgacttcctaaaaatgaaaccatgtcccttagatctaatatctggattccaattatgatttcttttttcttcttctttcttccttcttcttccttctccttctccttctccttcttctccttcttcttctttcttctttctctctctgtcacccaggctagagtggagtggctggatcatagttcattgcagcctcgaactcctggactcaaaagatcctcccacctcagcctcctaagtgactgggattataggcgtgagccactgtgcccgacctccagttactatttcttatgtcaccaggcccatctcattacattgccaacaagttatacaataatcatggacattgcatgtgcacagtcacattgcaatgaatgcacatagcacagcaggcctgaccaagtaagacacctgccatcctatgacctctgggtctttccctctgcataactcttcctttgagactgaactcctgcatcctctgtatgccatatcatctcactggcttcttacaagcacctagtgaagagtctccagtttggcagatgagaaacccaaagctcagagaggttaagtgagttgcccaaggttgcacagccacttaagccaaagccaattatcttcatgctgtaccctaagcctgttgagctgactgcaagggtttagaaagctatcctcatttgatcctgatacccaatgtcccagatatcttctgttcttaatgtcacgctttctcgagcaagaacatcacccccacgtcgttcctagacccagacggctgtcaagctgccagccagccctacccttctgggagccatttccctgctgctagtgagggccagcttgcttccaccctattctcatgatgtgatttcttaggagccccactaacaggtcagagccagaaggaaatgttccttaaagtcccctccaaggttgggcacagtggctcacacttgtaatcccagcactttgggaggctgaggcaggcagatcacttgagtccaagagttcaagaccagcctgggcaacatggcgaaaccctgtctctataaaaaaatacaaaaaattagctgggtgcggtggcatgtgcctgtagtcccagctacttggaaggctgaggtgggaggatcacttgagtctcggaggttgaggctgcagtaagctgatatcacgctactgcactccaacctgagagagcaagaccctgtaacaaaaaaaaaaaaaaaaaagcccttccaggcaagccaaggtctctgggttgtgccaagcatgagcattttcgggcagaggctacctggagtatctgacagagagtggcatctaaagtcagtaaacctagatccgagttgtggttctgccccttcttggctgtgtgacttggggcaagttgcttgacctctctggtcctcagttcccccaactctacaatgaggacaattaacttccctcactacttatcctagacccaactgagtgatcgtgaagcagaaaaagcaagaggtaggaatctgccagtttctagcagcacaagtcaagtcctaaagctactgggagaatcatctctgggaacccctctgcccttagggtgtcctatacagtgatgctggtttttggatttgcactgagtgcattacactgattttgcccaagacactctttctctactccaaaagtccctttttgtatttttagcagagaaaaggtttcaccatgttggccaggctggtctcgaactcctggcctcaagcaatccatccgcctcggcctcccaaaatgcagggattacaggcgtgaggcactgcactctgcctgttttttagccattctgatggttaaatatataaagaaagagactcacgggaagttgcaaaaaccagtacaaagagccccatgtacgcttcgctcagttttccccagcggcagtagcatcctatataacgccaatgcaatatggcaaccaggacactgacccttttttaaaacatccacagcaatcctagtggatttctctaaaggtttaaggaaaccggccatgccccacgctgacagaacgtcatcatcctgcaaccccatttggaggctatttgaacacaggggctatgaaaagcaccatttgtgggcagggagctgggtcaggcccccagaagtcaccatttgtctcttgcccttttgcagagcatgtttgtcaacagacccgccctcggaatcctgcctccggagaactttgtggagaagctccggcagtccttgctctcggtgagttctggagaagcaatcccattgtcttcagacgtggtactggcaggggaagggaaaagtggagacgccaacaatgaagaataaggtgttgctacagaaatctttctctctgagcttattcttccatgcagagtattttaaatttttcttttaaaggacagaagggattctttgtgtgcaggacaaaaggagctggggaaatgaatatgtgtcgcatgataggagccttgcatatgtcattcaatcctgcccccacttctcggttttagttactacaaacgattaaagccattgggagcctcaacgtcccgcctggaacgtgtaggtgtcttagacagtggcaggtgcatcaggagtgggcttttgccccccttctttcctctctgccagcctcagggcctccctgggcttctccgccacccctggaaaagcctgagcccaccctcccagtccgacaccttccaggacagccctggttctgtctgtccccggtacggcccctgcgaagattcagctccagccaggggaagcgggaggacaggagtcatgatgagcctgggctcacggctatttccctccccacaggtggctcccaaagggatgtcccagctcatcaccatggcctgcggctcctgctccaatgaaaacgccttaaagaccatcttcatgtggtaccgggtgaggtttggggcacacacacacacacacacacaggctccccagcacccagccacacgctcaccccttgtctgactgttcattccaatgggctggagtattagacatcagtaccagggttaaaatacagggagggccactgctggatggtactttgagacggcacagtggggtatggtgcagagggctgaggctttggcatcaaaactatgcaatgggggctgggcgcagtcgttcacacctgtaatcccaacactctgagaggcaaaggcgggcagatcacttgagcccaggagctcgagaccagcctgggcaacatgacgaaaccccatctctactaaaaaaaaattcaaaaattggccaggcatggtgacgcatgcctgtagtcccaactattctggaggctgaggtggaaggattgcttgagcctgggaggtcaaggctgcagtgagccatggttgtgccactgcatttcagcctgggtgacagagtaagaccctgtctcaaaaaaaaaaaaagaagaagaaaatgctccttaaattcccctccaaggttgggcacagtggctcacacttgtaatcccagcacttcgggaggctgaggcaggcagatcacttgagtccaagagttcaagaccagcctgggcaacatggtgaaaccccgtctctataaaatatacaaaaaattagctgggtgcggtggtgcctgcctgttgtcccagctacttggaaggctgaggtgggaggatcacttgagcctgggaggtcgaggctgcagttagctgatatcatgctactgcactccaacctgagagacacagcaagagcaaggagcaagaccctgtaaaaaaacaaaaacagaaacgaaaacaaaaacaaaaaaaacccttccaggcaagccaaggtctctgggttgtgcctctaggttattttatttaaatatttaaatttaaatttatttaaatattctaaattgcagagacagagtcccactttgttgcccagcatggtctcaaactcttggcctcaagcaatcctcctgtcttagccacccaaagtactaggattacagatttgagcccgcacatctggcctccattcttcctggcaaaacatgcaacgctctcagcagatcttaatccaacagatcttaatcgttgctgatggtgcttaatgcattatgtgtgttagtttcttttgttgcgagcacagttggtagcctcacgtttcagtacagacctgcaacaattaatacatgagatccactcctgagaaagcactttctacttgtctggactgaatatcggtttggttggaaagatgaagccccgactaccccagagcatctctgagattttgttctgttctattgtttcagagcaaggaaagagggcagaggggcttctcccaggaggagctggagacgtgcatgattaaccaggtgagtgcagctgggcttgcaccacgtacatctggggaagctgcacagcctctcccgggctgttgctggctggctggcactgtcctcaattaggaagggccaggccaggcgcggtggctcatgcctgtaatcccagcactttgggaggccaaggcaggcggatcacccaaggtcaggagttcaagaccagcctggctaatatggtgaaaccccatctctactaaaaagacaaaaattacccgggcatagtggcacatgcatgtaatcccagctacttgggaggctgaggcaggagaatcatttgaacccaggaggtggaggttgcagtgagccgagatcacaccactacactccagcctgggtgacagagtgagactcctctcaaaacaaacaaaaaaacaaaaacaaaaacaaaaggccggctgctgtggttcacgcctgtaatcccagcactttgggaggccgaggcgggtggatctcccgaggtcaggagttccagaccagcctggccaatatggcgaaaccctgtctctactaaaaatacaaaaattagccagatgtggtggcgggtacctgtaattccagctactcgggaggctgaggcaggagaatcgcttgaacccgacgggcgcggaggttgcagtaggccgagatctcaccactgcactccagcctggcgacagagcaagactccatctcaaaaacaaaacaaaacaaaaaaagtacaagagggtttctggaatctgtgggaggagttcttagggtttttcccagaggtctcagggaattggtgctcaaccagcctgagacaatgccaacctccttgagacttgggggcccccacagttccctctgaggcacctccagcagttctgcctgaatcagctggaaacatgtttggattcccttgctgggtgaagagtcagaaaacaatgcaaggagttgcagctgtgccatttgcttggggctggaaagggacagggcgtccatgcacccctcctgaacccaaggcgcagctgccatgggagagtgcccggagaggggctcccctcacccgctttctagcaccacagaccccttccaaaggcctgggggttttcctgcaaggtgcccagctcggccccttgccttggtcaccctgggatgcaggcgtgcacccatcagcacctgacccgcctgacacctgaggaggcctgagtagtagggagccaggggatggggaggaagttgaagagcctgtagaaaaggggctgaaaacccaggagtccccagcagctggaggtaggcgggcagtgggtactgcttggccacttacagctgccacaggaggaaaatgggtccaaacagtgcagcactggtgagaagccagaagttcaggtctctatgtgaaatttcttagttttaaattttgcaacttgttttgagacagagtctcgctcttgttgaccaggctggggtgcagtggcgcgaactcggctcactgcaacctctgtctcccgggttcaagcgattctcctgtctcagcctcccaagtagctaggattacaggcccccaccaccatgcctgtctaatttttgtatttttagtagagacggggtttcaccatgttggccaggctgatcccaaactcctgacctccgatgatccgcctgcctcagccttccaaagtgctgggattacaggtgtgagccaccacacccagcctaaaatttgtgacttaaaaaaaaaaaaatgtaagtatgtatgcaaataaaacgtgtgtcttggatatagaccccattggtcccatgggtaacttttgcctgagaaggattcctggttcttctgatagatttctgtgtccctctggacttgcaggggcaacaatacagttcccccatccttacaactatgactaatgactgatatttcttggttttaggcccctggctgccccgactacagcatcctctccttcatgggcgcgttccatgggaggaccatgggtaaggagggaccattgcgctcccaaggtggcgtttagaatagtaataataacggcaacaatagcggcggctgacattagcagtttacacatattgtcccactgattgcacacaatcccactgcagagtggggattattattcctgctttgcagatgggggaatcagtgttcaggaagaggaagaatttccaaggctattcagtgacagagccgggactggaactcttgactctgtcttcaaagcctgcgctgcatctgtgattaatcgcaatgcaaacacatacccacgcacgcatgccaattaagggttcgagagtcccccttcagcttccggatgagaactggggttcagtatcaaaacatctcatgtactccccaagtatatacacctcctatgcacccagaaaaattaaaaattaaacgataaaaagaactggggtttcacaggcaacaggcctccctgcccactgacagccttgcgctgaaatgtctatcatctcctttacaaagacggtactgcctgcttccccaagccaagcgtctgcttttctgttttgctgaactcaggttgcttagcgaccacgcactctaaagccattcacaagatcgacatcccttcctttgactggcccatcgcaccgttcccacggctgaaataccctctggaagagtttgtgaaagagaaccaacaggaggaggcccgctgtctggaagaggtaatgctcataccctgcggatcctccccaaccaccagtcctgttgctcttgccgccccaagacttggggagaagagaaacagatgaagggtttatctggggatctgtgcagtgctcccccagagggaagcagggacacagaggccttgcgtcccaaatgttctatgttgggagagttcgtgagacacactgtttctgtcacagcatccatcacccaactctgataccaatttctgtatcacttaagtttcttggaagacaagagtcaatgactctaaaataagagaaaacagatcagttgaaagaatatggggctgggcacggtggctccgcctgtaatcccagcactttgggaggctgagacgggaggatcacctgaggccaggagttcgagaccagcctggccaacatggtgaaaccccatctctactaaaaattagctgggtgtggtggcacatgcctgtaatcccagctactagggaggctgaggcacaagaatcccttggacccgggaggcagaggttgcaatgagccaagattgcaccactgcactccagcctgggtaacggagtgagactctgtccaaaaaaaaaaaaaaaaaaaaaagagagagagagaaagaaagaatatgggatatcccacaggaaaaaatggttccacaagatcctctaaaccactggttttgtcttctcctgagtcttggggctttgagttgctgtgggtcgggggatgctatgggagaggctgaggacaggcagcacccccctaccccccgtttccacgtcatctaacacagccctctttagatccactcagtatatgggggttccagggaagacattggaagtaatctgcagctggaaaaaaatatcactgtttgggtatagatttgaactcaaataaggctgctggtttttttcttaggcacatcatcattttcaatcagttcatatttattgagcacctactagatgtcaagcaaggtgctaggtgctgggtattcagtggtaaatagaaaagacaagataatggcatcaagtacagcactgtccaatagaaatataatgcaagccacatatgtaattatagcttttccagtagtcaccttttctttcatttttacaccctgcctggaaactgccaaggagtcacatttgctttgttttgttttgctttgtttttgagatggagtctagctctgttgcccaggctggagtgcagtggcgcgatctcagctcactgcaagctccgcctcctgggttcatgccattttcctgcctcagcttcctgagtagctgggactacaggcgcttgacaccacacccggctaattttttgtatttttaatagagacagggtttcaccgtgttagccaggatggtctcgatctcctgaccttgtgatccgcccgcctcggcctcccaaagtgctgggattacaggtgtgagccaccgcgccggccttcttttcttttgttttgtttgagacagggtctcactctgtcacccaggctggagtgcagtggtgcaatcacagctcactgcagtctcgacctctctgggctcaggtgatcctcccacctcagcttcttgagtagttggaactaaggcacatgacaccaccacacctggctaatttttgtattttttgcagaaacaggttttgccgtgttgcccaggttggtctcaaactcctgggcccaagtggtctgcccacttcggcttcccaaattgctgggattacaggtgtgagccaccgtgcgtggccaggagtcacgttttttaaaattacaaagaaataggtgaaattcattttcagagcattttattgaaccgaatatattcaaaatattatcacgtaaatgtgtaattagtatttttaaacaatgtgatttttatattcctttttaaaaattcctttattttaaaaattcatttatttaggtctaaacaaactaagatagtccttttcttcgtattcagtttttgaaacactgtgtgtattttacacttacagcacaatgctctaaaaacaaagaaaaaccgggcgcggtggctcatgcctgtaactgcgacactttgggaggttgaggcgggcagatcacctgaggtcaggagttcaagagcagcctgactaacatggagaaaccccatctctactaaaaatacaaaattagccgggcatggtggtgcatgcctgtaatcccagctactccagaggccgaagcaggagaatcacttgaacccgggaggtggtggttgcggtgagctgagattgcgctattgcactccagcctgggcaacaagagtaaaactccatctcaaaaaaaaaaaaaagaaaaccaagaaaagtatctcagagcttccttggggtgactggtggagaccaaggtcaaaatcatatcacccaaacagaggctttttcttaattgtacataataaagaaagctttcacttgttagtctatctaggtgtacggtttagggtttttctttcttttttttttttttttgagacagagtttcactctcttgcccaggctggggtgcagtggcacgatatctcggctcattgcaacttctacctcctgggttcaagcgattctcgtgcctcagccactggagtagctgggagtacaggcgtgagccaccatgcccaactaatttttgtatttttagtagagatggggtttcaccatggtagccaggctggtctggaactcctgacctcaggtgatctgctcgccttagcctcccaaagtgctaggattacaggtgtgagccaccatgcccagcctctttctttttaacaaagacaggatcttgctgtgttgcacaggctggagtgcagtggtgtggtcatagctcactgcgatctcacagtcctggttcaaggggtcctcccacctcagcctctcaagtagctgagactacaggcacgcagccaccatgcccagctaatttctaaatgttttgcagacatgaaccgcgctatgttgcacaggctggtctcaaactcctggcctcaaggtatcctcctgcctcagccacccaaagtgctgggattgcaggtgtgagccaccacacctggcccttagaacagttttttaaccgaggatatatctccgattctgccccaaaaggattctcacaccaatcatagcaataatactgtaagaataggaacaataataatcaataataatatagtcgtgctaatcgtaatagtagcagccaccactttatgtgtgccagactctgctgtattttctctctgtctctgtgtgtgtgtgtgtgtgtgtgtgtgtgtgtgtgtgtgtgtgtgtgtgtgtgaatgctctcacctttatttctctcaatatacccgtgatgtagctatttcccacataacaaggttaagtgacaggtgcatgttccatgtaaaacagaggcagaaccacagctaaaacatctggcccagcaatcaactcatagtgctatattttctcattcagtcctctccacgaccctggaaggtggattctgtcagtgtgcccatacaacacatcaggaaagtgaggcttctgaagctaaattacttgccccaatttattagtttgtatccacccaggtgctagcaccgatttcaagtaggatacattcccatccacacacatagcttctaacagaggcttcactggtcttaggaaatgcacacaaacacatttccaataaaattgcatggggctcatcgaaccccagattcccacccacggatactggtcacaagcctctgccatcggtggtcactttcccctttgggatccaggtggaggatctgattgtgaaatatcggaaaaagaagaagacggtggccgggatcatcgtggagcccatccagtccgagggtggagacaaccacgcatccgatgacttctttcggaagctgagagacatcgccaggaaggtcagtggacagggccgaggttggatggagccattgggttttctgggttgagttccccgagtaacgggccagcagcacctctgccttggagcttctgtcaatctccagacttgcagaggctgtctgtcagcatcaggggtggagaagttggggttggtgaaagaatggggattcttccctaaaactatacacacacacacacacacacacacacacacacacacacacacatatatatatatttttttttttgagacagagtctcactctgttacccaggctggagtgcagtggtgcaatctcagctcactgcaacccctacctcccaggttcaagtgattctcctacctcagcctcccgagtagctgggactacaggcacacgtcaccatacccaactaatttttgtatttctaacagagacgagatttcgccatgttggccaggctggtcttgaactcctgacctcaggtgatctgcacacctcagcctcccaaagtgctgggattacaggcctgagccaccacacttggccttaaaatctttttaaaaaacctttttggatacataatagttgcagtgcgtaatgatcaaatctgggtaattggatatccatcacctaaaatatttatcatctctttgtattgggaatattccaaatccactcctattttgaactatgcaataaattattaactaaaatcaccctattgtgctactggacactagatcttattcttctatctaactgtacttttgtatccattaaccaacccctatttatctccacctccccattagccttgccagcctctgataggcgtcattcgactctatttcttcataagggaagtgtttttagttcccacctgagtgagaacatgcaatatttgtgtatgtgtggcttatgtcacttaacataatgtcctgtagttccatccacgtcattgctaatgacataatttcattctttttatggctgaatagtatttctttgtgtatatgtaccatattttctttttctttttttttgagacagtctcactctgttgcccaggctggagtgcagtggcacgatcttggctcactgtaacctctgcctcctgggtccaagtgattctcctgcctcagtctcccaagtagctgagattacaggtgcacgacaccatgcccagctaatttttgtattttcagtagagacggggtttcgccatgttggccaggctgattggctcagactcctggccttgggtgatttgcccgcctcagcctcccaaagtgctggaattacaggtgagagccaccgcgccttgccgagtgtgtatatgtaccatatttactttatccattcatccatcgatggacagattgattctgtatctcggctattgtgaacagtgctgcaataaacatgggagtgcaggtatctctttgacacactgatttgctttctttatattgtgtgtttgttttaatgtcttgtgcatatataactggcaatcaaaccgataagttcacagataaaagttataagacgtgagttgacttaacacagatgctgagttagaaatagccttggtgacaagcagaacatggcagctgaagtttgagaagcacattcgaggcctcactgttggacacagctccctctgacgaggtcgagacccgagactgaagccagatgacataccgctctgtgttggtgcagggagtatttaatgttctgggtttttttggtccagcttagcagttttaggaaacactcagattcagctctggttggaactgctcagcttaagtgttttgattagttttttttgtgcacagctcaagaacatggggctggtttgctcttcagaaaacaagcacgatgtgtgtggacccagggtttggcagttagctggctatggagggcatgaatttctggcctcccacgggtgtttatttctccctcctctctcttctccggccagcatggctgcgccttcttggtggacgaggtccagaccggaggaggctgcacgggcaagttctgggcccatgagcactggggcctggatgacccagcagacgtgatgaccttcagcaagaagatgatgactgggggcttcttccacaaggaggagttcaggcctaatgctgtgagttggagccaaccttctctctacatccagggcagagaagggagcatcctcttctcctaactgttcctttctcaccatcgaggagctgggtgggcacttactgggtcgcaggttttctaagtcccagttcttatcaatgcaattagcagtggtgtgccctcccagctctctctgtaaggccaactctggaacagtccaccatcagccttttcctgttttctctctgtgtgcacacacaataatatcatcgacagctgccgcagcagactgagcatttgctatgtgcctagttctaagtatttctcatatacttttaatcctgagaacaatctaaccaagtagctgttatttttatcctcatttgactaatgaggaatcaggcacagagaggttaagtaatttgtcaaaggtcacacagcctgttaagtgacaaagccaggattccaacccagagcccatactcttacccactacactgtgtactgccatgtgtgcatacagatttacacacacacacacacacagccatcaggggccaacgtcctttcaccattcctacatgtagtttctaccctcaaggttgcctcatggtccaaaatggcttctgatgctccagccatcacatctcaattctaggcagtaggaaagaaaaagaagggaaggacaaagtggcccccttcttgtctttagcagcctttctagaaatctcacataatatgtctatttccaatacttgactaagacccagtcacatggccacttctagccataagggaggctgggaagggtgtttcagttagccgcatggccaccctaaatcattcatggaggggtaaagtggatgatctttgagggtcactgccagcaatccagtcccaactccatctgtaagtcacgtttgccttagacaaatcacttagcctcccagaacctcagcttcctcctgtataaaatgagggttataggagttaaggaactgactgtcttggtttcctgggactgagggatttcccagtgcatgggacgatttggtcctccccatagcagttcctacatgcagggctgctgttggaagaattcagcaagattgggtgtgttctcctgctagcctctggtagagaagaattcagcgagattgggtgtgttcccctgccagcctctggtagatgcccactagattagtttctctcctcttcaagagaggaggcggggcgcctggggtaagtgactcctgcagggtgtgcatgtgtgtgaagccttccaacacccgttcctcattccagccctaccggatcttcaacacctggctgggggacccgtccaagaacctgttgctggctgaggtcatcaacatcatcaagcgggaggacctgctaaataatgcagcccatgccgggaaggccctgctcacaggactgctggacctccaggtaacaccccctcccctgccccgcccccaccacccatggctccccgcagcagcctccggggcaacactggagctcttcggcatggtgttgtgcctgctgttccagcagttcgtaacgggctgtgctgctcctagccttgggggctttgcacatgctgtgtcctctgcaggggatgcctccctatccctccatcccattccaacccctattcctgaactcctggttttctttgttgttgttttttttaatttattttttatttttttaatattgagacatggtcaagctctgttagccagtccggccttgaactcctggcctcaaacgatccttccacctcagcctcccaaagtgctgggcagcgcctgccggcactggttatctttcttatttattttattttattttatttgtctatttattttttgagaccaagtcttgctttgtacccaggctggagtgcagtggcgcaatctcagctcaccgcaaccgctgcctcctgggttcaggagattctccggcctcagcctcccaagtagctgggattacgggcatgtgccgttatgccctactaatttttttgtattttgaatagagacagggtttcaccatgttggccaggctggtctcgaacccccgacctcaggtgatccgcttgcctcagcctcccaaagtgctgggatttcacgagcatgggccaccgtgcccggccctggttatcttttgacaccaatttcagacatcccccctttgagagtcccccaagcactccctctctcaccccctctagtgtgttcattattcccgcctttgtgcaacctgttgcatacttaccactcggcagcactgccctcccctgctggagctggattactctctaccctcaaggtttcgtcatgggccaaaatggctcctggagctccagccatcgcatctcaattccaggcaataggaaggaaaaagaagggaaggacagagtggcccccttcttgtctttagcagccttcccagaaatctcacataatacttctaacacttgattaagagctggtcacgtggtcactcctaaccgtaaggacgtgtggggatgtgtgtgtgtgagtgtggcaggcaggcctaaaggggtgtctaaatggaagagactttaatctaaaccatcccagggccacactctgtgggagagggaggggtgtgttcaaactgccagctccccagcaattgacaagtgcaaggaacatgctagagtaagtgctggaaggacttctgagcctcagtttccttatctgtgtagaccaaagtgagcccttcttcactggcaggggattcaagaatgtgcccactgccaggcacaggggctcatgcctgtaaccccagtacttagggaggcagaagcaggaggattgccttcagctcaactgagtttgagaccagcccgggcaacatggtgagaacccatactccacaaaaagaaacaaattgtgcacataagtgtctaacacggtgcccggctctgtcacccccagaataggaccatgtctccagtttctaccaatgagctgccgtgaaataagacttgctcccccaactcagcccccagtaccctgaaattatttggggttttccaagcccttgtttgctgtccttcatatggacagcagagagtaaggtgaaatcaaggtcctccagactaggcacctgcatttgtttccttgtctgctgtaaaaaatcaccacaaactgtgtgggttaaaacaagaatttattctctcacagtttggaggccagggtctgaaatcaaggtttcagcagagttggctccttctcgaggctctgggggagaatctgttccatgcccctctccaccttctcgtggctgccgggaatccttcatgttccttgacgtgtggaggcttcactctgcttctggcgtcacttggtgttctccccactgtgcctgtgtctgtctccagattgtcttcttcttataaagataccagtcattgagccgggcgctgtggctcacacctgtaatcccagcactttgggaggccaaggcaggtggatcacttgaggtcaggagttcgaaaccagcctggcctacattgtgaaaccagtttctactaaaactacaaaaaaaagttagccaggtgtgatggcaggtgcctgtaatcccaggtatttaggaggctgaagcacaagaatctttgaacctgggaggcagaggatgcagtgagccgagatagtgccactgcactccagccagggcaacagagtgagactccatctcaaaaaaaaaaaacaaaaaacaaaaaacagtcattgcattaggggccattctaatgcaggaagacttcattttaacctaactaattatttctgcgaagaccttatttccaaattaggtcctagtcataggttccaggtaaacatgaatttagggggcagtgggaggaaactattcaatccagtacagctcccagtctcaaagccctgagggaggacaggcatttcttcttccagaagaaccacctttctagaagagctgacgatggagatggctaacatctgtggagcatccaccaagtgcccagccccaggcttaggacttaacatgtgaaccttatcgtgctaaagtctcaccacggccccagtggggtcaacagcatttaaatccttcagtttatagcagggtaaacagaggcacttgagtggcccaaggttatacagtgagagggacagagctgggcttggttgttgttgctggtggtggtggtggtggtttttttcctccacacaacacacatgtgcacagctgggctttgaacccaggcctgaatgtccccagagctcttaaccccctggaggtcctgccagtccatgcagaggccgaggctggaccatgggaggcctttgacgaagcacagccattaagcccagctggtacacaggtgatgggctttgacgccagccttgtctcctcccactacaggcccggtacccccagttcatcagcagggtgagaggacgaggcaccttttgctccttcgatactcccgatgattccatacggaataagctcattttaattgccagaaacaaaggtaaggggtcaggagtggctgctgagtttcatgagcatccagtatctcctgctgtagctgccacatgttgctaggtactcagcaatattttgtgtggggggcaggtggtacacaggtctgaaaagagcctgaatgctctttctccaaagaagagaacattacaaatgggatttctttatccatttatttactcaacaagcgttcgctgaggaggtgagttgtaagtggacactggagacagttacagtgatgatgaagaccatcagagccccttccttcaggaagcatgcagtgtagcaggaaggcatggctttacacatggcatttcacaaccaatccattgcaattttaagtcctgggaaggagaaaacgcagctaagagagcagatagctgcagcagttggtgagggtaggaaatcagggcaggctcccttgaggaagtagcattttaccctaagtcttgacaaacagggattggctgggtgaagaaggtaaggaagagcattctgggcggagggaagggtgcatgcgatggcctgaggtgggatggagcttacagaggtggtaaaagggaaagaagggggcgtgaaggcgaacggttgggaggggatgaagctgggggaggagaggccaggcccgggtcgcatgggcctgcagatcaggcttagcactccagacttcatcctaggagctgtgggaagccactgaggacatgtgtggcaggggtaagggcagacgctgtggtgagatcagagcacgtactctatgtcaggcacattgtcagttcttcttgtgccatcttacagaatccttgcagcagcctcagaagggcagggataatcaacctccattttaaaaatgagaaaacgtggtctcaaaggcataaacaggccgggtgcagtagctcacgcctgtaatcccagcactttgggaggccgacgtgggcagatcagctgaagtcaggagttcgagaccagcctggccaacggggcaaaacctcatctctactgaaaatacaaaaattagctggccgtggtggcggcacctgtgatcccagctacttgggagactgaggcaggagaatggcttgaacctgggaggtggaggttgcagtgagtgagactgggttgccactgcaccccagcctgggtgacagcgcgagactccatctctaaaaaaaaaaaaaaaaaaggcataaacaacctcgacaaggaaaggacaccagctgtaactgtgaagtcaccctttaaaataagcagagcctgtccctcctccgtaatagctcagcacctcacacatgcttccgactcagcctgtgcttttgcaacttatttgcttacctattttcttttcccactcctccatgactttgtggaaggcaaggactttatctcaggatttctctatcaccagacctagcttggggcagcaaagcaggcactcaaaggagagagggagggaggaagggaaaaaggaagtgtggagggaaggaaaggaagaagagaatgatggaggagatgaatgaggggagagagaaaggaaatgaagactggatgggtgggtggtaggaaggaagcccgggcttccatgatggaggatgatggatggatggatggatggatggatgagcgttgccaacaggcatcactttccccccagctctcccagcatgtgactttgagaaaccacgctcctcacctacctcctgcctctttcaggtgtggtgttgggtggctgtggtgacaaatccattcgtttccgtcccacgctggtcttcagggatcaccacgctcacctgttcctcaatattttcagtgacatcttagcagacttcaagtaaagaagccatttccactacagtgagaaagcccggatcccaacagttgtcaaattgattagtttgcctaattcatgttttcacttaaaagtatcagaggtgaatgcacagtgaagggtgatttgtggggagggagcatttttggtggtcttgggggaggggaggggagggaagggctggtgttgattttcctccctgcagagccaatggtgcacattggtttaagcccagagatcctgcttgagccctggactcatcttgggaagggccatgggaggtcctggctagagttctgcccaaccttgaccaaccccagcaatttttccaaaagccagtcaagggcattacatttgttcctgggactggcagctgggcctcctgggtgccagtccatctcaagtgccatattctgtgatcacggatgttggctccccctcgccctatgcaagcaaacacactctcacctcctctcccagcctcccggagctctgagcacgccccacgcatggtgcaggagggactggacagatctgaggaaggccgtaaaatggggacaggaggattcagctcaggagtaagggaagaggtcctctggccccctgaagatgagaatcacccctctcagtgcacctggggatccccctaaactgtgaattctgccctggacagggctttgcccttggaggatccccaggtggccttacccgtgattcttactcggcatcctccattccccaaactccctcctccctgttaaatgtcaacctagacctggacctgggtgggaggaaactgtagcctgagtgtccacagggacacacgtgagccacagggctagaagcacaggcccgtcaccccaggaggaaaagcccagggtctggggcagcagagccatcgcatcatgtttcccagggcaacttgaggtctgacttttggctccctcgccctaagaggctcttcctctcttttgctcatccaccttcacaccacttgtgagctgacccccaggaacagcttggctgttccaccagagcagagggaatcattgctggactggatttcttctggagggaagcaccatgaattaaaggtgccagagctccatgcatggaaaagtggcctgttggttcaacgtggtttccttgtacttgatcctcctgaaatgagagattttcctgagatgactgagtatggagattaccaggcagatgataccgaaatgcttaaaggggctgtggctgaggctgtagcatctctgctggaggtgagacactctgggaactgatttgacctcgaatgctcctaaaagagaacttgatagcctgacagcagagaagtattatttggtggggagtctgagaaagcctggcttgtattatctgtccaaaaggaagcctcttcatctcccggtgccttggttgactattttggaaataggcatatcaaggttcctgattcagcactttgctcttttaataacaaatcgtccaaagatctcaaagtaagggtttttttttttagcttccactcttccgcagacttggtcatcgacctatttttgttgaagaatgaaaggcaatgacaagtttaacatatacaaattcgtgaattcttgttcattttgcattcctgcagtcagtgctaatccgtcgttcttaatcaggagttctgccaggtttaaggtcacctgcactcccagccaagtggtgatgtatgcctcccactctctgcaaggttttcctcatttttatattcatttattcatcattcattcattcacctaactttcattaaatagctgcaccatcccaggccctgtgcggagcatcgggaatacaaagatgagataaaacattgtccctgcccccgggggctcacatgccactggaaacaacagactcttaaactaacaattcaagcaggcgccaagtgctatgacagaggtgtgaataaaagcatcaggaaatcggatggagaaccaccattcacccaagggtcagaggaggtttcaaagaaaaggtgtcattggagcagtgttttgcagaatgagccagagttcaccaagcaggcaaggcaaggaagggtgttgcagagagggaacagcatatgcaaaggcgtatcagttcatggcatcacatctttcactggggaagccagtttccacaggcagcatcccaaggttcaataaggccttatttaacaagcaagcaaaatgcaaaccaaaccattattcatttattggcttaagtatgctttctcctgaaaactttagcattgggtgcaaatattcagtatggttctcggagtccaaagggttttaagccagggcacaaccagaaaagtggctctctttggtagggagaggggctccaatatttcgttctctccccatggggcactgacagagaaatgaaatagttttatctggaaaattccagagctattatttactccttaccaagggaagttacttcttgtaaaaacttttaagccatttatcaacaagttcttgttgactcagggcataatgagttcctgagacatgctcttttgggggctggggctttagctagaagaatttcaaggaaaagaattctcagcagagctcaagattgtagaaactcagcagaagctggtaaaaacatggggagcccggaggacaggctgctgtccagggcagaggccatgaagaagtgcttccgtggccgacagtctggaaatgaatccatcatacattagtgccatagagtttagtaaccgtccagcaagtgtcatcacttttacagaaaacaaggtccagtaatagcaagtcttagtacatcctcacttttattataaatgggtgttttttcataatttttactgacgctcagtaaccatgcaaaattgtgtatagcattaatgtatctacatacctacacctatctatatataagctcatggtagaaaaccatagctaagtagcatcgcagacttaagcgtacaaagtgatcttgttcacaagtaatctgttgacagtgccaataaatgataaaaaaaaaattaacatgtcacaatgtaacggatgaccatatgcacaattccatgaattaaatctgtttcctgtgttagtcagtattcttaaataaaatttataattgaaacatgagtgaatgtggacttttttggtggaaatggtcttgttaaataattaggtgacaagtacttattaaatgcctgttatatacctcttagggatgtcttggggaacactctacatgcataactctgccttgggatcaggaagcactgtaaggccatgcatttcattaagtaaatcgaggacatgctatgtgacagggacacaaggatggacaacatgtggtccgtactcgcagctcacattctttttttttttttttttgagacaagagtctagttctttcacccaggctggagtgcagtgacatgatctcggctcactgtgacctctgcctcccaggttcaagctgcctcagcctcccgagtagctgggattacaggcgctcgccaccgcgcccagctaatttttgtatttttagtagagacgaggtttcactgtcttggccaggctggtctcgaactcctgaccctgtgatccgcccacctcagcctcccaaagtgctgggattacaggcgtgagccaccacgcccggccccccttttttttttttttggatggagttttgctcgttgcccaggctggagtgaaatggcacgatctcggctcactgcaacctccgcctcccaggttcaagcaattctcttgcctcagcctcccaagtagctgggattacaggcacctgccaccaggcccagctaattttttgtatttttagtaaatacaggtttcaccatgctggtcaggctggtctcgaactcctgacctcaggtgatccgcccacctcaacctcccaaagtgctgggattacagacgtgagccactgcgcctggcctcgcagctcacattctagcaaggtaaagaaaaataaaaaataaaaataaaaaaataaccaaaaaaaaaaaaaacagtgtaaggagcaggacgtgggaaaacactggatgcagcagaggcacaaaggctgggcccctcacatcagtcagggtggcagttaagcccctgagtttcatcttcaaggctgagcaaaagctgctccagagtgatggaaggcattccacaagagaagaggtccacgaaggcacagagacagggcgacagcaggcgtctatgaaaagttcagtatcactagatcacaaagagtaggagactagaagagcccagaaaacaggcaggagctgggcccctcgagagccttctgtgccacatgaggggcgtgggctttccatgctggtgatggagccgccagaggcttgatgcaagggagcaaaccgaggggtgttttagaaagattgtcctggctggacgtggtggctcacacctataatcctagcactttaggaggctgagccaggagaatcacttgaagctgggaggcggaggttaagatgagccaagatcacgccactgtactccagcctgggcgacagagtgagaccccgtttcaaaaaatatatatagaaaggttgtcctgagtgttcacggtgaagaacagggaggcagggaggccag

SEQ ID NO: 2 - DNA, 196522 bp, Homo sapiens
  source 1..196522: mol_type = genomic DNA
ttagggcagcagcggtttctaatcctcagggtgctgcactgtctagtatgcagccagtagccacacgtggctccttaactctaaatgagttacattgaaatctccgttccactcgcattggctgcatttcaagcgctggtggctgccgtgttggacagtgtggatgtagaatgtcctcgtcatcacaggcagtgcgataggacggtgccatgctagaagcacgaacgccataagactctttggggaaagcacagaaaccagatggactccagccttgctacgaaatactccaaagatattcccagttcatagagcgtggttacaaaatcgtcagtcctctcgggcttagggtttgatggagggaaacggtcaataaagtgagaaagaataaactgtgggccgggcgcggtggctcacatctgtaatcccagcactttgggaggctgaggaaggaggatcacctgaggtcaggagttccagaccattcctggccaacatggtgaaacccatctctccgaaaatacaaaaaattagccaggtgtggtggtgcacgcctgtaatcccagctactcgggaggctgaggcaggagaattgtttgaacctgggaggtggaggttgcagtgagcggagatcgtgtcattgcactcaaggctgggtgacagagcgagactctctcaaataaatacataaataaaataaaatagaagaaactgctgatacacagagggcatgaggaggtactgtgaggagggtggggatgggtggcaatttggaaagtcagcagagggccctgtatgacaggggagtttctgagtcgaactgagaaggaagggaggggccctgtgttgagaagaagcagagctcccccaggagggagatcatgggtgaaagccggaaggcttggtgtctgcagaactcagagagagccacagtttggggctgtgaccatggggactttccttccactcttttccttggccctgtgctcagccataaccagccaccgaattttccagaacctgggaggctgtttccagcctcagcgcctccgctactgctgttccagctgcccgggatgcccttcccttactggggaggtatttattcccttacctcccatttatcaagacttagtttgggcagcatcttgcccagaaagcctcccctgacctaggggtgtatttggggccagctccacagagcagcgatcagcctggctgcccttgtctccccagcctccggggcaggtgcgtatcaggtttccctcatcactgccatcagcagagggcctggccctggtgagggcccaggaatgtgtcagtgcaagctgcctctggggaatgtcctacagggccctaatgcagacacttggcccctccccaaggcctcacctgccccatgcgcacacccagcattgagcctggagcgggtgccctccgcaagcactgcttgcagaaggggccttgcctttaaaatcacacaagttcataacaagtgatcttgtacttccgcaagttataatgcatcgtcttttattttccaggcttcctgggatcagatatgacattgcactaatgagaaatgggggtttccagttgctcaggctcagattgcgcaatggcaggaagcatattaggtgctaaaaactccccctccctagccgagctgggcgggtgagaagccgagtgcgaaacgggacttggcgtgtcatgggcgctaaggaaacggagtaaggccgactcacaggcaggaacatcgggacacacacaaagaggcaacacccactgcggacggggaaacagactttggtgtttcatccacctctcagcgcgcttatcagcatcctgtgacggccggtgctgcaccctaacacacacctaatgacagacaccaacgccttcgcttggggagcccggccagcctcctgctccgggatgccctgctggcttcaaagatgagaagagccacatctccatcctatctccatcctatctccatccttctctccccaacagcgtgtggttgtctgtttcagggagcacatcgctcctggggcatgtggggtttatgtttcaggctgagacaccgccagccacagcacaaggacggtgcatcaagagctacgtcgggtattaggcagggtacgtggaaacccttgattccagggctttggccatcagaggaggatgttttctccccaagacttggaaaaataacagcaaggaaaacagtggtggctatacctcacatgtatttacaaagcgttctttagaggggtctgtctttaaggttacctgtgtgacgagaaaaagaaaaaagaaaaagaaaagaaactagacagggagctctgtgtatgaggaccacaccaagaacagactgaaaccacacagatccgagcggtggagaataaggctggaggccgctcccctgcggagggaccgtaaaattaaactctatatatgtcatctcgcgtttaagtaggctatactttttaataaaataaaaacttctgtgttactttaaagatattgtgtaggcatctaggggtcgatctggaggaggaacgcagcgcatggaggggcgctggcggaaggtgccctgtcttgtcccttgttgacatttgtccctaaagagacccatcacagacgcctgcaaaaatcacacaccccactcttggcactgtcccagacgctcactgccccgtctgcgagtctgcctgtgaggccaggctgcccaggctccgaagggccgtgtgcccacccccgatgatggtgtcagcaaccatcatcaacaagcctcacagctcacgtcccggccacctctgtcccccacgtgcccagcaccggggccagggcacctcgagaacgctgggaaggtgggctgggctgcagccacctgtgtgctccatctgatgcccgacacagccactctacagcctctccctgacaccaagccacagcggggaagggtggcgtgaagctagccgtctcggccctaaactaccggcaggagtgtcgccggcaggtgcaggggccgcacctgctgggggaccccctcccgcccaccccatggacacagagaagccagagcaaggtgtgtgggaggggtgtgtgcggttctcgccaggggcccctggcctcggcgcccggcacacaccagtggggcaggctggcagccgtcagaacaaaagggctttcttcttaaggtcattcctcttccagagggccaggcggtcaaactcctcgatgctcatcccaaacacttcctggaactcctcgggcgacaagtgtctcttcaaacaaaaaggcaaaacagaagggaccagttagccacgcagcaagggacaccattgggcagtttgctgccgccaagcaatccaggggcaggattgcattgaggatggggtggccctcagcgtgctcggcctcctggcggttcctgacaccctctctgcagtgaaagaactgagctcagaggacagcgaccctgccagggacacacagcacccagtggtggagctggagccagaatcttctgctcttgactcctacaaaggtatctgctgctgtggaccaagttcattaacatgtcccagagcaggacccccacctgcgtgcaaatgtctgagcttttatagatttccttcagtggtcatatttgttacttcagtgagtggtcacagctgccatccgagagcaggaggtggaaggtttacccccgggacttcgtagcccaggagggtggggcgcggacagtgagcaagaatgccaggcacggcccaggcccaggcgcaaatcctccctccaccggaagcccctggtgtgtaagcgtgagagagctgttgtgcctctctgagctcagcttcttgtctgtggtcaccgtggaaaggcacacagcttggtggtcagggcgtggataccagtgcttctgggatgccataggagtgagttagaccctggagcctcagtctgctcatctgtgtaatggggtcccctagagcccacaccctggagctgtggggaggaaggcgtggacataggtcagcactggctgtggactgtacccgtgggtgctggctgcatgtgttagtatgacctcagccaccgcaagctctgtggagctccttgccaagcagccacctgccttctagctctgccttgcagggcctgcaacccctactctcctgcctgtcttcctcagcaggctctgagaaaccccgcatccctcagagctggctcaggcgtcccctcccctaaggagcttttctagggagcctgggactttccatccacggggatgcttccctttgctcccctcgcctcgcctgggcggggctgagaggaggaactggaaagaggctggagaaggccagtgacaggaagaggccaggctctgccctgaatcaccatctgctgccttctgaaaagcgtggcttcagtgcagctctgtggggagttttctgtagttctgcgacacactccacacagttatcatatgccccagccatccactcttggacagacacccggaggaatggaaaacagggactcagagagatgatggtcgcccatgttcctagcagcattactctaaatcactgcaatgtggaaacaaaccaggtgtccatcaatggacgaatagatacacagaatgtgacatgtccatgtgacggaatagccttcagccttaaaaggtcgtgaagttccgacacatgccacagcatggatgagccccaaacacactggctccatgaaggaagccagacaccaaagaccacatagtatatgattccacttctctgaagtgtccggaacaggcaagtccatagagacagagcatggattcgtggtcgccagggactgggggagagaggaatggggagggactgtttaacggatatggggtttcctcttgtggtgaagaaaatgttccggagctggaatgttccggagttggaatgttccggagctggagagtggggttggtggcacaatgttgtgaatacactgaactgtactgaatggtacactttaaaatggttaaaatgggccgggggtggcagctcacgcctgtaatcccagcactttgggaggttgaggcgtgtggatcaccttaggtcaggagttcaagaccagccatggcaaaccccatctctactaaaaatacaaaaattagccaggcatggtggcacatgcctgtaatcccagctactcgagaggctgaggcaggagaatcgcttgaacccaggaggtggaggttgcagtgagctgagatcacaccattgcattccagcctgggtgacagagtaagactccatctcaaaaaaataaataaaataaaatagttaaaatggtcaatttggatgggtgtggtggctcacacctgtaatcccagcactttgggaggccaaggcgggcagatcacttgagctcaggagtttgagatcaacctgggcaacatggtgagactccatctctacaaaaattacaaaaattagctgggtgcgctggcgtgtacctgtagtcccagttactgaggaggctgaggtgggaggatctcttgaagccagggggttgaagctgcagtgagctgtgatcacaccactgcacttcaaacctgggtgacacagtgagaccctgtctcaaacaaacaaacaaacaaaaaactcaagtgctatattagaatcactgtgattagcaaaagagaaaatggaagtggagacatctggtcaactatgaaaagtgtaaaccattgccactcacgcatttcacaagaatcaccaaatctgtgtggtatgccctggattttgcagccccagtagttggggtgatctggaggagggactcaggaaatcccccagaatgccatgttttagttgaatctgggctcagagtcagtctctctttctctctctctctgacacacacacacacacacacacacacacacacacacacagcctatccagcaagtctgccaggaagaggccctcagccgcctgctgctatctcgagtttgcaaagaggaaaagaatcctggtgcttgccagaaatgaaccacttgcgtggtgctgagatcagggtttcttggtgctgagaaatccatcagccagtccacagaaacttagaattgtcatttcagaccgcgtctcttaagacatttgacactcaatgtgtcatttaagatagcagccctgcacttacaggtacaaaatcaccatcttctgaattatggtggaacaatcaagacggatgagatcaaaggaaagaaaaaggaaaatcatttctagctttatccaagacctggtgataccagaccttgttccagacatggaaagtcagagacacaaggcccctggcaggggtaggctggggtggtgaactgacacgtaagtaaatatgtaaaggaggggaggctgacaccggaagggcgaggagagttcagtgctggtgcctggggcaggcctccctgtggccacattcctgcttcctgctgggggaggctaagggaggggcgcaaaggtgctggtgggcagagggaaggtgtcaagggggtggtgtgccccctgccatctgcaatcgtgtacttaaagggaggaggactggtgagtgagtggtctcttgggtttagctggcatcaggtctttgctggaggagggaggagtggagagggagcggatggtgggcaggcgtgccccgcatgctggggaaggagagaagggcaggcttgaggatgacaccatgtgctccaggctgtgggagcctctggggagggcgattcgaggaagacttggagctggcgggcaagcaggaaggctggcagggtgttgggaggtgggtgtgggaagcagaggtgcccttggggatgactgtgggggggcggtggagggagcatctgggtggcttctgaagttgctgggaatggttaccttctctgggagtgtggcactgggactgggacgctccatcaccagaggccctggggagcagcctggttgggcagaccacagcaacagggaggggccgggggtgtcccgagcatgtgggctgggccaggccactcgtatgtggcctacagggcccaggacttggggccaggggtctagggggctgacagggaccacctccccgcaggctccagtcctgttttctgtctgcagcgtgagagaacttggttgcctgggtatccggaaggctgggtgagggtcacatgaggggctctccgcagcagggggtctgttcataactctgggctccagctgtggaattctgagtgtcacacctcacctggctgagtctccactgcctcctaggtgagaggggctcaaaggtccttactctgtggccagctgcaaaactggcattcaatctcactcagggccagaggcaggcaggctttctccatgggtctgccagggcaggcagggtgggtgaggcccagctgaccccagagactgggccagctttctggcctcaagccagctcctctgaccccaggttcctgaaggccctgcaggagtgcacctcacccccagggcccgcgcaggacaagcacagctggaaggaaggaagcctggggtgggggtctttgcagagggtggggcagcctcactgctgaggtgcactggtttccccagggaacatcctgcagggaggcatttttgcagcatggcagggggactgcctcaggaggctcaggctcagagaggttgtgtgacttgcccaaggtcacatagccaggaagtggcagagccagacctgggagccaggttaggtggcttgacctttcctccacccttacttcctgcctcccacctggacctccagggccatctcaggtttgcggtgaagcctcagggacctatgccacctccactccatcagggacaggttgccctggcctacccccctaccaacctccagccctaagtcccctcagggtactcccagcttccctgaccccaccaagctcagaggtacccctgggagggactctgacacctccttcctccacacagcccaccagtcacagccacccctctgtaccagcacagggctggctgaccgggtgggcctcaggtcctagccctgctcagcctgggcccccagggccagcaaggggccacttttctcccaaggcctgggctccgtggtgcattccaccggctcacactgccttggcctgcacaaggaggccctgcatacaggggtgagtcttgcttaagccgggcccaggcccggaagctccagccctcccagcaggaggtccctgcaggacctacagtgacatcactgtcataatgacggtggccattgcccctccaggagagccttccctccataccccgggacctcttccacagcctatggggcacagaggggacagcggcttagcggggcaatgacgtggctgtcaggtggccccagggccctgcccctccacagccttgcacgcctcttctccactcctctgctgcgtggtgtactgtgaaagcccaggggaagcaccatgcagtgctccctctcccattcaccagcagctcttcgtcatcctactggtcctgactcaagtgtcccctcctcctggaggccctcctagattgcgctcaccaagcaggccctggggctatgctgtgtccctcaaggctgagtcagtgctgaccttctctggctctcagcaccatgagggtgggcacaggcctgtctgctcacagcactgtcccatcctcactgagggacaagatgtctggtctgcattgtgaatctgaatctgggctgtcccctctgcagtgctgcctcccaacacctccagcttccactgcctgtcctgctctctgctgtggcgccacgggggctcccccgccactgtcctggcctacgaggcccctgcatttggcctctgcctgccactctcctgactcccgacgctttctcccagccacacagttctgcttgtgtttctcttccttgtcttggccagggaggctgggattctggtgcaaacccatctctcagacacacccatgtggctccaaacctcctattgtcaccctcagtctaccaggacacaccctctcatcagaccagttggatgagtttaaacaaaggagatattctttcactgtggggcccttatttttcaggcgcattccaacaatttgggctctcactgcttgagcaaaccctggtgtgcatttggcctcagggcctggaagacgacagttcaagaaaccacaggactccagcaatgagctgctccccttgctgtgtgtgtgtgtgtgtgtgtgtgtgtgtgtgtgtgtagggtgagggatggcaagtaggaaaggaattccaggaagaataaagtgcatgtgcaaaggccctggggcaggaggagccttggctgctggaggaagcataagaaagctgaggtgtcggctgggcacagtggctcatgcctgtaatcccagcagtttggggggctgagacgggtagatcaggagttcgtgaccagcctggccaacatggcaaaaccccgtctctactaaaaatacaaaaattaaccaggcgtggtggtacatgcctgtagtcccagctacccgggaggctgaggcaggagaatcacttaaatccaggaggtggaggttgcagtaagctgagattgtgccactgcactccagtctgggtgacagagtgagactacgtcttgaaaaaaaaaaaagagagaaaaaaaagaaagctgaggtgtctggacctgagccgggaaaggtgaggacaggataggccctgcagggccctggaccgtgttaagcagtttggtttttagcctaagagcaatggcatttatgactaagtgtgcaatttacaaaaactcctgtggctacggggttgttttcctgctaagccctgccctgccaagcaagcagaaaggtctcagagtgtgaatccacgagccatggaccgggagggcctcaggccagacaacaagtccctttccacccatccaccttgcgttctgagatggctgagctgtatgtgtcgccgtggctgggctgtggggcccagttgtttggtcatgcattagtctagatgctgctgtgaaagtgtgctgcagatgcggctcacactgacagtcagctgactgcaagagaaggagatcgccctcaataatgcaggagcctcatgaagtctgttggcagcctgaagagtaaatactgaggtttcccagagaagaaacccagcctggaatatcaactcctgcctgagtccccggcttgctggcttgcccttcacattgcagaattgccagcctgcacaattgtgtgggccaagttcttaaaataaatttcttagtatatggctgtggctatctgtctgtctgtctatctatctatctatccatccatccatccacccacctacctacccatccatccactcatccatctatccatccattcacctatccacccatgcattcatccacccacctgcccacctacccatccacccatccaccaatccatccacccaccaatccatccacccatccaccaatccatccactcctccattcatccatccatccacccatccacccatccatccacccatccatccaccaatccatccacccacccttccacccacccacccactcatccatccacccacacacccatccatccactcatgtatctatccacccattaatccattcatctgtccacccatgcattaatccacccatcaatccacctaaccgcctacccatccacccatccaccaatccatccatccaatcctaccatccaatccatccatccatccatccacccatccatgcatccatccacccacctacccacctatccatccacccatccatccaccaacccatccatccacccacccatgcatctatccacccatccatccacccacccatgcatccactcatccatctatccatccatctatctatccatccatgcatccctccattcatccaccaccatccatccacctaatggttctgtttctctggaaaaccctggttgatagactttcctatctaaggagcaatatgcctgtctgtactgggaagttggggacacctaagacaggttagaaattcattttcaggctggacgcagtggctcatgactgaaatcccagcactttgggaggctgaggtgggaggatcacttgagcccaggaatttgagaccagccagggcaacatagtaagaccctgtctctacaaaaagtaaaaaattagctgggcgtggtggcacatgcctgtagtcccagctactcaggaggctgaggtgagaggatcacttaagctcaggaggttgaggctgtggtgagttgtgactgtgccactgcactccaccctaggtgacagagtgagaccctgtctcaaaaaaaaattcattttccacactgcaattaactcagaagacagcatattgcagtggctctcagcaacaccttagtttgaacctcagctctgcctcttatgagctctgtgtgctgaaccccgctctgcatgttggcaccacctgattcatctgaccctcttccatgggacagccctcccagagtggaagaggatgatcacagcttctccacactcctgcgtacttatccactctaactgaacacctactatgtgccgcgtggcacctttcactgctgcgtggctggacatcctgcatccccttggccatgccccatcagtgagtgttaatcacatctgcccacatgctgctccactaaatgatgtccgctccatcccccttgaaaccaagggactcatctgattgggcctccaaacttaatctgcctgcttgcttctagtcacttgctccttaattttttaacatatatagctaaaagtcacgtggccaaacaatatctaactaaattcccactagctcccttacggataacatctctgatgtgtgcgtcgctatagtaacggttgcttaaagttgtgttttgggaacttagagttagctcttgtccattttaagccagtagagaccatgagcccttcaagtaggcctgagcgaatgcccgacttcagagggccaaaaacacctttctcggatcacgctaacaatgtctttttcttaaacatatgtcccacgaagaaccatgtagctcaatcgtgttcaggcaaagtccccatgccctcacctttcccaccagcagtcatctttcccacgccttagaccacccacttcttattcctccctaggccctactcttctgggaggcaagtttgagatttgttctgcagtctccttgctcagcagtcttgtgaataaatttttcctcttttgtgaaatccactgtcacagtgactggctgctgctcatgggcacagagcatctggctgggtgtcaccatcgcacccgcacagcctgcagcgacacctggggtacttttccatcaccaagttccgccccttcgacttcccacagatcatctgcatccatccacttctcacactcaccagtccacaaacagtgtccaagatgccatcatgctttgccccagacccaaatggccctgaaacagtctccctgcctctacgcagccaatctgggcttcaccatgtagccacaggggttgttttcaattgcacacctggtcataaatgccattgctcttaggctaaaaaccaaactgcttaacacaatccagggccctgcagggcctatccgggctcaggtccagacacctcagctttcgtatacttcctccagcagctaaggctccctcctgtcccaggtcctttgcacgggtactttgttgttcctggaattcatttcctacctgccatccctcatcttacacaacacatgcacacacacacatgtgcatgcacacacatgcacacacacgtatatccatatgcatacacacacatacacatatgcaaatatgcacacacatatacagacacatatacacatacacacaagtatacacacatacacatgtatacacacatagacgcacatacacacatgcacacacatatacacacatacacgtatacatacataaacatacacacacgcatatacacacatacatgtacacacacacatacacacatacacacatatccacatacatacatacacacagtcacgtgtatacacacacacacactgatatggtttggctgtgtcctcactcaaatctcatctcaaattgtaatccccataatccccacatgtggagggagggacctggtgggaggtgattgggtcctgggggtggtttcccccatgctgttctcgtgatagagagtgagttctcacgagatctgatggtattttaagtgtttgacaggtcctccttcacactctctttctctcctgccaccatgtaagatgtgccttgcttcccctttgccttccaccatgattgtaagtttccagaggcctccctagtcatgcagaactgtgagcaaattaaacctcttccttttataaaatacccagtctcgggtatttctttatagcagtgtaaaaatggatgaatacacacacatacccacatgtatatgcacatatcacacatgcacacaggtatacacacatacacacacatgcatgcacacaggcacacaaacgtcccctgtgggaaccacattcccagtgggccaccatattgccatttaaaaggtagggtaggccggtgtggtggctcatgcctgtaatcctagcactttgggaggctgaagtggggggatcaccagaggtcgggagtttgagaccagcctggccaccatggtgaaaccccatctctattaaaaacacaaaaaattagccgggtgtggtggtgggtgcctgtagtcccagctactcaggaggctggggcaggagaatcgcttgaacccaggaggtggaggctgcagtgagctgagattgcgccactgccctccagcctgggagactgagggagactctgtctcaataaataaataaataaataaataaataaataaataaaaggtggggcagatcagcattgactggcctagaaatatccgtgtcaaatttgaaagcaaaaagcaggatgtcaaacctggatatacagtatgagccctcttgatccaaaataggattcagttagctctgagatgatgtgcaagagatttccagaagcatatctcccactgagttatcagctgtgactgggtgggggaattccttaagaggtttatgtccttctttgtatttttctggacttttatgacagttaagattttttaaatatatattaaaaataaagctctttcctctgaaagaaaaacaccaggggtccctttctctcctgctgggaggtggccgctcctgcaccccctctggctcacgtcccactctcagcccgaggcagacaggcagccgctgctgagaaaagaggggcattccccatatgtagtaacatttccagttgcctcctggcttggctgagcctgaggaggaaggaggactagggtcgcacccttgggtgtgttcttggaaatctgagtgattaaaaccattacccagctgtcagagggtgttttaaaaggatacatttacaaatgttaaccacttgtattttacaattttcatgttgtattattgccaaaaaaaagtgaaatagaagtcctgtcaagcatactacagttccaagagggttgctgtgagtcccaacaggcccctggacgctgctgctgggccaggagctgccagacctgctggctgagctcaccttttgtggtgagagcaattaactccagcaccattagacagcccagaggggacacgccctttgaggaacaaagaaacacagccagcaggaaccctcccagcagttcctgactgggtgagccacccaccccaccagtgataaccattttacaaaggtcagtagtattcgtgcttgggatgggacctgaccacagaactcaaggaaacaacttcaacaggagctgaagaatgcgtccccgcaggctgctagcagtgttggagttccttttggggtgccttctctggccactgggggatggtcccatgtgatggtaggcagaggctacccaagagaggtcttgaggatgagacggcaggggcgcctcctgagtgtgaggcgggccgtactggatttgcagcctcatctgcgcactcactggattcacagcctcacctgcacactcactctgcgcagatgctgggcttctccacccacctggtgctgtctggacccacatgccagcttcctagccagttcctgctgcctggcgtcctcctactgatgacccatgcacatcctaacacatcagaaccttttggtggcctttcctcttctgtggggttaagtccaaatgtcccacaagctgccagctccccccggcaaaggcccttgtgctatctggctctgcggttcctttgctagcacgatccccacacatctgggtgctcggcacaccctggaggactgaccgcactgactggccacggcagtcaagggcttgccatgtggcttctccctcctgctcagccccatctcccaccctcccgcaggcaaacactcgctgcctgtggcccggcattctcttccccatctttaggaatgtgaaaacaagttgctgttcaaaatctaagctgttggaaatttaacatattttgagccttaagagaatatgattataggacctgagtcatgtgacaggcagctgtaacctaagcagctgtcacctttgtttctctgattacagattagtctttttccttacctacattgttttgtaaaacgttgtaaatgaccaaagggcaccagagaagacccctttcctcataaccattcaccttcattgtagattcacttccttctttcctctctcccggttatctaagatggagtgttaaatacgccacccagctcaggtgatgtcagcagccctgttagcccaggcacgggcctatggctgagcctggccaattagggcattgcattccttgggtcaaactagctgattaaagggtggtcatattacctactcaagggcagagatggggctttttctgggactgctgagagagagaaagatgtgggtctcttccccgcagatttagagcctgagagaggtgaggtaaaagtctatcaatggagccagcacagaaaaagcacagtcaaaagatagaaggaaggaaactgggtgctggagacataatttagcccttgattaagccacacctgaaggagacattcagtcatgagagccagctgtaagccaaaaattaattctaagccctgcaatggctgattgaggaggaatgaaccccccctctctgccaaggggatttcaaagaaacctacaaacctagttcaggccatgaagggaagagggggcgagtcagacatgtctcattctaccctcctcccttcggaattcaggcacaactgataacattaacattaaaacagagatcttaaaactgtagccataagataccaaattcctgtatgactctagtatagcatcacatgacagagagcaggccctgaaagaaatacaaatattgtacccctaaatatatattttttggcatattttaaaatggctctgcaggccaggcatagtggctcacacctgtaatcccagcactttgggaggcagaggtgggcagattacctgaggttgggagtttgagaacagcctggccaacgtggtgaaaccccatctctactaaaaataaaaaaattagccaggcgtggtggtgggtgcctgtagtcccagctactcaggaggctgaggcagaagaatcacttgagtctgggaagtgggggttgcagtgagccaagattgtgccactgcactccaacctgagtgacagagtgagactctgtctcaaagaaaaaaaaaaaaagactctgcagagctgtctcttgtgggggaaatttacattccagaatccctttccctttctagctctttttctgatcctgaagagattagctgagagtctagcaccttttaaaagtccgaataggaaacatttgccatctattgcctctaaggaaggccacctatgagacttcatctacgtaataagaaccatggtctccacaaccccttattttttttttttttttttttgagatggagtcttgctctgtcgcccaggccggagtgctgtggcacgatctcggctcactgcaagctccacctcccaggttcacgccattctcctgccttagcctcccaagtagctgggactataggtgcccaccacaatgcctggctaattttttgtatttttagtagagatggggtttcaccatgttagccaggatggtctcggtctcctgacctcatgatctgcccacctcagcctcccaaagtgctgggattacaggcatgagccaccacgcccagtgcaaacaaccccttgtcttaacccagatgctcctttctattgattacaggtcttaataacttaactctttcaaccaagtgccaatcagaaaatctttgaatccacctatgacctgtaagcccccacctcgagttgtcccacctttccagaccgaaccaatgtgtaccttacatgtattgattgatgtcttctatcttccggaaacatataaaccaagctgtaacccaaccaccgtgggcccgtgttctcaggagctctttagactgcacctcttgggtggtcactcacatttggctcagatgaaacctcttgatgtattttacagtttgacacttttcatggacacagtaaattccttctctgcttaagtcactttaggtcaagttcctaccatttgcaacaaacaggtcaaaatggatgcatcccatccccagtgctacagtcacaccagtgtcctggtcccctccctgtaccgagggagtgctattttccaggccctgggcaaagggctttatgcagcctctcgtctgcagagcagcttggtcaaatggaatcaatatcctcatcttagaggtgcagaaaccacagctcaagagcacccagccagctagtgcagggcagtgggtgcgtgctcagtgttcctggtaaggacgtacttcctatctggggacacagcctgtagcacctgctccctgccagcctttgctcaggggcttccccgggcctggaatgcctttccagacttccccttctgaggagcagcctggtgccttctcccctctctggccccagcactagggtactgctgagtgcccctcagctgcacccatgcccctccaactccctccccagcaggagactgagccactgcccctcagctgcatccacgcccctccaactccctccccagcagcagactgagccaccgcccctcagcggcatccacgcccctccaactccttccccagctgcagagggagccactgcctggtgggcagtttgggcatagcctggcagctggccctgtgcacatggggtcatacacactctccagccttggggctcagatggtgctgggtgtcccctttccttcaggagcctcaagacccttcactctagcaagagagtctactgaaaggcagcagcacattcatgacagggctcaggagatgaaacccccgggctggatgctgggacaccgtagggcggttgtgaggagtaacagaggattgcacgtgccactttggcacgtagtagttactcaactaagtcagttctctcagtcaacagatcgtattcaaacacctattccttgctgacaccttgccggtgcttagaaacacatacttgctttctgcatttgtccggttattttagatgggtgtaagtgtggtcgggtgggaagctggggcagtttactcaacctcagtaggagagaacaggcacctcctgcagagctcattattattattattattatttgagatggagtctctctgtcacccaggctggagtgcagtggcgccatctcggctcactgcaacctctgcctcccgggttcaagtgattctctcaccttagcatcctgagtagctgggattacaggcacctgccaccacgcccacctaagttttgtatttttagtagagaggggtttcaccatgttggccaggctggtctcgaactcctgatctctggtgaactgcctgcttcagcctcccaaagtgctgggattacaggcgtgagccactgtgcccagcccagagctcattattcttacaaagccttccctgcctcatccacaaaccagggtggtcttctttgcaaagccatcaaggctggggaacatcaccacatcgtttggcctttgaggcaatgtgggcctgactctgcatcacggcaaggctctgcactgtcccccacggtggccccttgggcaacgaccttgacaccacggaggaggcatctgcggggactctcgcatgggaaatgagtcccctgccccggcagtcccccgcttacctccagtctcgtccggtccacgtctttgggcagtttcacgcgaattcggtttgtgacgatgagggagtcatacggatagatctgttgggggaggaaaccacagggtcacctcacgaagcaagtgtatgctggcaccaaagaactgagcagaaggtcaccgagaatacatacttgcgtctgcacctgacacacacatttcataggtaaagcacaacagaaaggacttttaacctgggcaggtgtggcgcggcacggaggtcagtgtgggagcggccccgcttaccttgtattctgtaagagagagagagcggagaccacgaaatggtttagaaagtgcaagatgtcgtccaaggtgagtgcaatccctgccctggggtacccctgtctcccccctgcagtcacctgggccatgcatggtccccgagcagcctgcactgaggccctaatctcagagctgcaggcagaggggccctgagggcctcccccgggaaaccagagcaggaggcatggtcaggctgcaggccaggctggaagccggagggcggcactgtgcttttcagctgtgatgctgtctctctggtggtctgggccaccctgagaaagatgccagcctcagtttacctgcctgtacagcgggcatttcaggggaaacttttagagggtgttgtggagactgacatcttgctatgttctgagcctctcccatctctcaccgtcttaccttattaactctacattttctctttttcaaactactgagctctgccccctaatgtcttacttccagactgaaagcgtcttatcacgaaaatgaaatagtgtggatcgtagggcctccacgcacacagaacccacagaaagcagtatctacagaacctggtcctcaagccagtctcggaagggagaccccgtgtcgggagccggtccctgagtttcaccacttgccccgtgtggttctggacctgctggctctgaggcccggggactgaaggccacttagagggagcaggctgtggtgcactgatgctctccgtccccatgcaacccagtccagcagagcaaggctcccccgccactcgcgggcacagaggctgacaggaggtgagcctgtgggaggtgtcaggcacctgccacacgaccaggtggccgctctggtaacacaaacctcctagtagccctgctgaacccggagagttcacgcggcgtgccggcagccacacggggagcaaggcgcaggcagggtttggcccagcgccgtcccgctcagaccctggaagccttgtgcctgtgactctgctttcccaagtgacacagagtgccatacaatgcaggacagggccgccgtggccatggatgggacagagggagcatcgcgggtaaagctagcttggagtggaactgacttttggccaggagaggcagggaaaccagcacgccctcccccgaggtgtccccgcccggcactcccggagccttctgcaggctgcggatggggtggtttcagaacaagtcttgtggaatgtgttagcgacccctgccccagccagagacccacagggtccccgctctgtgtacctcgcatgccccagctggcatccgggtctgctccacagggggccagattggcattctggaagagaaagagaggttgggcggcaagagacaggcggcacgagggtgtgtggatgggcagggaccaggagatgtggccccttggaggccgaggtcctcgtgctgcctggggagtagggtgtccttagcacagcagtggggcgtgacagaaggacagcaacagtggcttgggaaggggagagtccaggatgctgtgcccgtgggactggccagctttcttgctcataggatgcccactgcctgggcggtctccacagacccttcctgtgtggacagctccaaccccatttgaaagctgctcccaggtgcctgagttccccactctgcagctggcacagacgaccactgggggctcagcaccatttctttgcgcacgctgcgctaggcacagcgctctgcggttccccgttggtgatctgtcccctccacatggtgggttcctgagcacagcgcctagaacctgctgtcccaggtgctcagggagccccagggtccaccctgggccctctgttccctgcaagatggccaagggggaagactggctgccgtcttctggcactgtgcacggttgtggaactcctagggtattctcagagctacgcggacgcacgtggctgtgcgtgcgagtcaaagtccatccaccccaaatgctccaaaatgagggggctcctacctccctggaaaccgtggtactcacggcagctctgcgtgtgactgtttcaaaggttaaaggagccccgtgtctgtaaggcccctggcatgtcacctggcatgttgtaagtacccatacagggtggctgtgtctctgacaatgactaagggtgacactctgagggggatgggcccgagagctcctgcacctgtctcaggtgcccgtggcattcatcagcaaactctgccattttagcgcattgagaccattagtgtctggaacgctttcccttctgtccacctggaagcatcatcgacacgtcctgcaaacctctatggagggttccccaacctgtaaagcatgcattgaacccccacaggggtcgggcagtcctgcccctgcccacttcctgccccttgctggggcccggggttcgcactatgagccctgagccatgctctgttgcggttgtgccttggctgcccgcggtggacggagcctgttgaagaaaatgtcttattcacgcttcgttccccagcacctggaacggggtctcaaacggggtcagggctctcggccagtgctgctgaaactgggtacagggatcacatttcagcagggagagttctgcagccaaaggagagacggtatgctcagcccagcgggtctgtcacagggcaaagtgttttcaacgcgagctttgcagtaggaaatcagtgaggagctggttacagcctagagagcacgagagcaggaagacctcagagggcaccgagtccaaagccctttatctgaaacaggaaaaccgaggccccgagggaagctggaccttcttcctgatgcagagctggagtcagagggctagagtcaggctcacgagtggggtaagcacccaggcagaggactggaactggtctctatttacatttttgctattttgtttatcgtgaaattttttacattaatttggatttctaaaactattgcattaaacttatcctgactgcattttcttctttagtgccttgctccctcactctagttctgggcctggaccctgagccagggtcctcttgcctccaccacttcacaaaataattcttgccttcaggggtattcacaaagaatttcttttttttctttgagacagagtcttgctctgtcagccaagctggagtgcaatggcgtgatctcggctcaatgcaaactccacctcccgggttcaagtgattctcctgcctcagcctcctgagcagctgggattacaggcgcctaccaccacggcgagataatttttgtatttttagtagagatgggtttcacatgttggctaagctggtctcgaactcctgacctcaggtgatccacccgcgttggcctcccaaagtgctgggattataggcataagccactgcgcccggtcatgcaaataatttttaattttttattttaagagacagagtctggctctgtcacccagactggagtgcagtggcacgatctcagctcattgcaacctctgcttcctgggcaatcctcccacctcagccttctgggtaggtgggactacaggcgcatgccatcacacttggctaatttttgtattttttggtagagatggagtctcccttggttgccctggctggtcttaaactcctggtttcaagctatctgcccacctcagcctcccaaagcactgggattacaggtatgagccactgcgcctggccatgcctggctaattaaaaaaaaaaaagtagatatggggtcttgctgtgttgcccaggctggtctcaaactcttggcttcaagcaatcctctcacctcagcctcccaaagcactgggattacaggtgtgagccaccatgtccactcaagaacaatgttttgatacattttcttagtctcagactaccatcccaggtgcacctgttctggtcagggaacccccagtataaagcaaggcaaccagccatggccttgtctttgccacctggcatgtctgatgtgaaagagaaatgctgccccctagtgcccatcgctctgcataacgggcttccaaaactcgcagggcaccaccttcaccttggacggttggaaactcactctccagcagcaaaaccagcttcctttggtattccaggatctgagataaggtggagactctaggacggagatgaggcatctaccaggtggagaagggggaatactttttaggtctagagcagggaaagtggggtctacttccggtcttgtaagtgcgaagtggggatggggtgtgcaaggcctctaaggtgcaaggggtcttcagttactgcctttatgtgtggaccagcaggagagctaagtggccagagggcaccacaaagacagcactgcctggcatattcctggctgactcccctacgccgctcagtgcaggcaccagggattttaaaagcaacaaatgatttagctgtcccatttgtttactacctatttttattttatttttgagccagagtctcgctctgtcacccaggctggagtgcagtggtgtgatctcggctcactgcaacctccgtccctgggttcaagcaattctcctgcctcagcctcctgagtagctgggattacaggcatgcgtcaccatgcctggctaatttttgtaattttagtagagacagggtttcaccacgttggccaggctggtctcgaactcctgacctcaagtgatctgcccgccttggcctcccaaagtgctgggattacaggcgtgaaccaccacgcccggcctgtttagcacttcttacgtgcctgtggctctataggtacattctctaacctttgctgcaactccaggaggtgggcatgattatcactttacagatgagccttagagagattaaataacttgcctgagatcatatgacaaatacatgggactgtaaatatttgagcccatgtgttttattttccaaaaactgtactgaaattgctaataggaattgagattatggccatttgccactggtcacccttctttccttgctaaagctcacattggaatgtgttactttactcagcagctagcgacatggaagcaagatagagcaggaattgctttttaaataattactcatgtgggaaccatgctatggagcttataaaagatttcacaactctaatgttatttgtcctcaaaaagacctcaagaggtaaggataattttttaaagactagaaaagagagactcagaaaatttaagtaacttgcccaaaaacagagctgggatttgaactcaggactgtctgatgctaacacatgtgttcttttcagcattacagtttggaaataccaaacttttaaaatttgttaatgcttgtcttgtagtcacatgcataaacattttaataaatattttccaaacatgtgaaaatctcattcaagagatatatttttcatatacctatttgattgtttgctatttgtactatttaatttttctgtgtacatttaattttttgttcactagacacattagtctttttttttttttttttttttttgagacagagttttgctctgttgccccaggctggagtgcagtggaacaacttcagcagctcactgcaacctctgcctcccaggttcaagcattctttattcttgtgctcaagtagctgggatattaggcatgtgctaccatgactggctaatttttctatttttagtagagatggggtttcaccatgttggccaggatggtctcaaactcctggcctcaagtgatccacccacctcggcctcgcagagtgctgggattataggcctgaaccactttgcctggccccatttgttttatttcaaaagagtcatattcaaatcacccaccatacttgtatttaatcaaggtgtctggcattgccatgttgcttggtgcatttaagttgatgaatgctataactgctttattccattatgcctccataatgaattagtgttctccttttatactattaattttattaattccttttaatcttaactttcaccctatttgatattactattgtcactcttgcttgccttttgtgattttagtatctttcttatccttttgcttatcctttaaaagtagtttttaagtgtgcatcttatgataacacatctgattttaaaaatctaatctgacagtctctgtcttttaataggacagctcagtctcttcacatttggcatcatgctttttcagaatgggacttcttccagggagctaccacaaggacctgctgccaccagtcgtcactctctgaataacagacacatggtatgcatcagagtcattactgccttacccacagggagagaagcagcaggcctctgttgctccattcacttcaagggtaggttatgagcatctaccatgcatcaggcactgtggcaggcttggctattaggacgttttaatgacctttaggacatattgtgctttaggtcactgggcccttgtaacaaatccttctggaagaacacccaggaaagcctttgcctcccatgatgaactaatttcccctcttccatcagacagtgaggcctacatcactgacatgattgcctctatgccttggccaccaggaagctcagagataagctttgacagcttttcttatgtaatatatatattttttgagatgaagtctcgctctgtcacccaggctggagtgcagcggcataatagctcactgcaacctctgcctccgaggttcaagcaattctcctgcctcagcctcccgagtggctgggactataggatgcccgccaccataccttgctaatttttgtatttttagtagagacagggaggcaggctggtcttgaactcctgacctcaagtgatctgcctgcctcggcctcccaaagtgctgagattacaggtatgagcaaccacgccccacctctcatgtaatatttgtttgtttgtttgtttgttttgatgtaattttctccatagtttcctcctctcctcctttgtgatttggtgttcatgggattttggtctcactgcacctatgcttgaggccacccagaaccctttctggaagtaaaggcaaatcaagaaacggcctaggaaatgacttaggagcactgtaggccatcagcaacagggcaggggcacgcactcccagggcatctccaggggaaggtcatgagtccaggtgctgagcagggccgccctgaaaaaggctggtcatgtgaaagatcaagtatctggccttctcactgagaaaaaggcataacagtacataaaagtcgtagaaagagtgaaacaataggaaagaacattagcagggaaaagagaatcccaaagcaaagtcattaataatattcaccaatctcccccagaagcaatgtgaaaagctaagaatctccacgtgatgatgagttctgcgcatatcagctctccaagcacatgcagagagcacgccagctaacgctctccttcccaccccttagtctgcaggagaaacatattcacagaaagtttagttcttaattctgtaaagtttgaggttctgctctcaatagttctaggagagggagtgaggaccatccctgccagaaagtctgaataggctgttctcaaaagagtgtggcttctggagaccatgaccttctctgcagatgctgagaggcatcaatttgcatcattttagcatgtgagcctagagaagaaccttcccagaggatgcacagcccaggcgtcagtgacgcaagactacaaatgcagagtgtgctgctctctcgctttccttctatatattgaggaaagtctccaggacctcactcggatggtggaacaccttggcttggtcggactgtgaacactgtgctcaccagccccagggctgtcagagaacagctgttccaggtgagaagggaacattctagacagttttcccactgtccccaggacccctaacattgagctcagggatttgcacgtcttttggtgtcgtaggagtcctgtggacattggtccagctctcttatctcccctgctttccatgtggaagatgaaaaatggagaattcccttggagaaaattcaaagaagcgtgccacatgcatggtccccagttaggcccattccagaatgggaagagcagttcgtggggtgaggggtgtggtttgctagattcaaaccatgcagaggtgcctgggccctgggggagatccggggaggctgggccttggacaaaaacacagcagcaggtctgacagagcctgaaggagacggagagaacaaatgccagcccaagaggacacccacggcttctggagatggtgtcctgtggccttgcccctggggagagtacctgcttagggatgccatcccagggttacacacagccacggctgctccagcgcaacaaagagggggccagttttttagtggcctcggttgagaggtgaattgcctctatttatgaacaaatttccagactgggacgaggctgccttgcgcaatggggagacccctgggctgtgtgtgtgtgtctgtgtgttggggggtctgggaccagcaagcctgccccaccctaaggatcctcactggggacccctgtgacgctgtgggcagaggaacaaacataagccgctcttcctaaggcgttcactgtcctggggcacagggcctggcccctctgcaaggcaatcagcccccagattgtctgggctcatattcagatgtcccaagcatcagaaaactcagggtaggaggtggcaccagtcttcagctaggggcagccaaagagcctgacttcaagttaatccaatctccgtgcagcctcaagtaacagccttggacgctaaggattatttggtgtcatcacggtaacagtaatagcagggaaggccagggcatccccgagaaggaggtgggcacttggctcacactggctcaccaaatgcaacagcccttggttatcaggctctgtgccataggaggacgaagacggttaggaggggcatcttggagctgcgcctgatcactctgggtggcccttgtctcccctgctcccacacactgagctctccctggggtcgggggcagggaggcagagtggggagggtgttgcccaggtctggttcggtcctgctagggaaaaagcagtggtggcagtggcagcccctgggaagggcatcaggcagaggcaggtgggccgcggggtccccggggcctctcctcctgctgtgtggtcaagaagctgtgggaaacgtgctcagcctcacagcaatcgttagtaccctgtggccagggaggggtcagtacctacccgctggtccaagccattctttccatgtcctgggagagggtcagatttggaataggggaatcctgaaacagacacagcacagctttgtcacgcgcgcagactcggtgcagcaatgggggtgcagccctgggggggcttcccaccggggtgggcaaggctgggcaagcaacacaggggaggccccctgaggaccatgacctgcctcagtggtgaccttctgttcccagggcgctgaccgaggaggaagccacagaggggtaatgtcctgagcctgcccgtgacaccggaaatgccacagaacctcagcccagctggcccctgtgttcagggacaggctcgggcctgggcaccacctggcacctgggccaagcccctcactttacagacaggggagctgagcagagtcaggaaggggcgcagtctctggaaccctggaggaacagcagagctgtgccatcctgtgccagaggtggcaaatggaggcccaccaccaagcacatggggcctggaggcaatcttattttaataaacttcttggctgggcatgttggctcatgcctgtaatcttagagctttgggaggccaaggtgggaaaatcacttgaggccaggagttcaagaccatcctgggcaacatagcaagaccacccctacaaaaagcaattagccagctgtggtggtgcacgcctgtggtcccagctatttgggaggctgaggtgggaggatcccttgagcccaggagttcgaggctgcagtgagctatgctcacaccactgcactgcagcctgggagacagagtgagatcctgtctctaaaaaaataaataaaaaaaatcctgagttgcttgcaattggggggcttcatattaaaatccaaatttctagcttctcgtgaaataatagagggctggtctgagacaatgaactctggattccctgtggggcaaggctcgctggggctgtcaggagggggcagcctttcccagcccccaccgagctccctccatcactcatgtccctggctggccctgggtgggcctgggagcttgctgggagtttgagacctccgaagtaacctcttcaataccacgtgatgggagagcagggaggaagtgaacgcctgcctggctcagaggtggtgtggttgcattctggaaaggaaggggcagagcctggaccctggaggggcaggaccctccacacccagggaagcattcttttttttttttttttttttttttttttttattatactctaagttttagggtacatgtgcacattgtgcaggttagttacatatgtatacatgtgccatgctggtgcgctgcacccactaatgtgtcatctagcattaggtatatctcccaatgctatccctcccccctcccccgaccccaccacagtccccagagtgtgatattccccttcctgtgtccatgtgatctcattgttcaattcccacctatgagtgagaatatgcggtgtttggttttttgttcttgcgatagtttactgagaatgatggtttccaatttcatccatgtccctacaaaggatatgaactcatcattttttatggctgcatagtattccatggtgtatatgtgccacattttcttaatccagtctatcattgttggacatttgggttggttccaagtctttgctattgtgaatagtgccgcaataaacatacgtgtgcatgtgtctttatagcagcatgatttatactcatttgggtatatacccagtaatgggatggctgggtcaaatggtatttctagttctagatccctgaggaatcgccacactgacttccacaatggttgaactagtttacagtcccaccaacagtgtaaaagtgttcctatttctccgcatcctctccagcacctgttgtttcctgacttcatgtccaaaacaccaaaagcaatggcaacaaaagacaaaattgacaaatgggatctaattaaactaaagagcttctgcacagcaaaagaaactaccatcagagtgaacaggcaacctacaacatgggagaaaatttttgcaacctactcatctgacaaagggctaatatccagaatctacaatgaactcaaacaaatttacaagaaaaaaacaaacaaccccatcaaaaagtgggcgaaggacatgaacagacacttctcaaaagaagacatttatgcagccaaaaaacacatgaagaaatgctcatcatcactggccatcagagaaatgcaaatcaaaaccactatgagatatcatctcacaccagttagaatggcaatcattaaaaagtcagggaagcattcttaaaagacctgtcctgggtccctaaactgtctgtctttccactagcctatggggccttaaagagcatggctcacacctgcctcatctgggggtgtcaccccagtactgggccctggtggcggagatcggccaggtacagggccagatgcccacattcactcatgggagcttccaagctgcccacgaggcctccgaggggaaggtggctcacaaggccacatgtctgtagcaaggaccatgcctccaggggcaaggcaggttctgtgcacagaactgcccacccgctctctccggggacctcacttctgagcaaaagatgcttctccgggggcctttcatttgggggttcctcatggactcaatgaggacagagaagaaattccatgaaggtcacatggggacacagagaagcctgtgggaggagcctcagctggggacttgtttgcaacacggtagccagtggaaaggttccacatgggggtcaggaaggtgttttaaacatcaagatcaaggtcctcaaacttctcctagcggaggaactccctcgacgcatgagcttttatgtgaaccccgatatgcaaaacaggcaaacgaggagctgggaagacagacatgtgagaggggcgggggtcgggggccagaccttcgggctattcctccccctcccagcccctcctcggcacccccaagtaaatggcctagccagctcttctcatgtcacagaaggagagtcaaggccccgagacgtgcaggaacctgcctgaggtcacccagccaggtagcggcagccccaggatgccagacaaggcctcctgccttgcagtcctggggtcctccaggagacaccttcctcctccttcatgcccagagccaggcatgctctgggagcccgagggcccctccagctgcagcgggagctccttatcagcaaaggtgctagaggggtggttctcaaactggcatccccagctagcagccccaaccttgccagggaactcgtcagaaatgcaaattagtgggccctaccctagacctcctgtgtcagaattctggggctggggtccagggatctgtgtttttacaaggcttctggaccattccgatgcacactggcctactgcctcgagaacagagaacacccttggtggtgtcctgcacccctcttaagcccgaaggcctctacctgcctgcccctggagtcacctggacagcgtgccaggttcccagtgcccaggctgccgccgaccggtctcaacttttaaccacttcacatgcaggtggaaaccttgcttccgcgaaggccattttatcctccccactttgactatgatagtctcagggacgtcttctgtttcccctgagcacccgtatcagatggtgctagaaattctgcttcaaccatccaatgtgatataagaatatgattctttccaagaagagggctattatgttttgtccccggttttacctattccgacgttcttctttcctttctgaagttccaagccttcttctattatcatttcctttctgtttggagaagattccttacgggtagctctgcaggatatctcactgaacacaggattcatgcggacagttctgctctttcagcacgtgaaagacgtcaggacacttcctgctggcctctgtggcttctgatgagaaatctgctatcgcttgaattggtgtttcccctctgttttttctctctggttgctttcaacatttttttctttgtccttaattttcagaaatttaattatgatgtgtcttggtgcagatttttggggtttatcctctttctttgggactcacttggtttctggaacttgtaggtttatgtctttcttttgccaaaattgttaggttttcagacattattttttacatatttatttatttttttgagacggagtcttgctctgttgcccaggctggagcacagtggcacgatcttggctcactgcaacctccgtctcccaggttcaagcgattctcctgcctcagcctcccaagtaactgagactatgggtgcacgccatcatgtccagctaacttttgtgtttttagtagagacagggtttcaccatgttggccaggatggtcttgatctcttgatctcgtgatccgcccacctcggcctcctaaagtgctgggattacaggcatgagccactgcgcccagccgctattatttctttgaatagtttttcaaacccattttcttcctcctctcttcctaggaattgaatgaaacaaatattgtcccacaggtccctgaggctctgttaatttttccccctattttctcttttgttcatgtaggataatttctgctctgtcttcaagttcatggattctctcctgtcaaatttttaattttggttattttttcagttctataatttccattttcatatagcttatatttctttggtgaggcttccttttcagtttcaaaagtatctgcaattgcgtgttctagactccaggcccgggtctcctgctgctgctgggtgggagatgtggggttgctgcgtatttccccgagtcctgagaccccctcatcagctactgtttctaaactatttgtaattgcttgttgaagcattttttagtgataaatgccttaaaatccttgtcagacaattccaccatctgattcttctcagtgttagtatctgctgtcttttttttctttttttcttttttttttgagatggagtttcactcttgttgcccaggctggagtgcaatggcaccatctcggctcaccacaacctccgcctcccgggttcaagtgactctcctgcctcaccctccctagtagctgggattacaggaatgtgccaccatgcccggctgattttgtatttttagtagagacggggtttctccatgttgatcgggctcgtcttcaactcctgatctcaggtgatctgatccgtcctcctcggcctcccaaagtgctgggattacaggtgtgagccactgcgccgggccttctgctgtcttttttcattcaaatcattgatcttcggtgttcttggtgtgacgggtaatttttctgcagtatcctgggcattttggatattatgttagaagactgatcttgttaagtgttaaatcctctatttgagcaggctgtcaccctgtttaggtttcgcgtgtacagcctgttcttttggaggctacggttccaatgacaatttgcttttcagaatgcttgctgaagtgctattctggtctgctaaattcacctggagctgccggtctgcccacctgggtccctgccggtgctgcctgtggggataaaatgcccttcttggggtgtcctgtgtcgctgggtgggggtgggagatgcctgccacgggtggagaccatgcccctgggttcactcccaggactgcggggtgcctgctggccacctgcccatctgctagtgtggctgcaggaggaaaacacctgcctcgtcaccttttgccaccacatgggaggctgggagtctgcaggtctgggccacctcctgccactgcatgggaggctgggagtctgctggcctgggccacctcctgctgctgggtgggggtgggagtgggcaggcagggctgctgtcccttgaggtcccgaggctgcctcgccaggccactttgctgttcccacctttagagttgtcctgtgaccaaccgtctgccgtatcatttgcaggtccgtttagctgtatgtagcagagaagagcagagagagacgaggcgacactatctcaccccctggactgctgtctggactcctgaagttggtctctgttggggtggaccagcaatctgtagatgttaaaggtcccagggatgctgtgcacaaccagcgctgagaatcactggtttatttattttattttttgagacggagttttgttcttgttccccgggctggagtacaatggcgtgatcttggctcactgcaacctcctgggttcaagcgattctcctgcctcagcctcctgagtagctgggattacaggcatgtaccactgcgcccagctaattttgtatttttagtagagacaaggtttctccatgttggtcaggctatctcgaactcccgacctcaggtgatctgcctgcctcggcctccaaaaatgctgagattacaggcgtgagccactgcgcccggccaagaatcactggtttaaaaagtccctttacatattcagagatttcacttgactctcaccagcctacacactaaacatgaacccattttacagatgaggaagctgagacctaatgatatcaagcgatctgttcaaggtcaaacagttactaactagagaggctgagatgaggagggctccctagcttcaggaaccagtaaccctatctgctcccaagccagtgtgccctggtgtgggtttgcaggcatgtggggtctaatgcatgtcagatggaagcagacagccttcaagaggcggggtgtgtgtagtacagagagagacccacagggagaaggcaggtagggggccaggagcatggcggcaactgggtagtcctgatgccagttacatgaggctctgcaggcaccagaggcctacccactccatgcccaggctcagccaaaccaggctcctggccgcctcccctccatgaagcctgccatagccaccttgccctcagcaccccgccaggcctgctcttggggccctgagcctcttctccacaggtctgtcctcttccaggctggctcatcagaggtcaaagtcaccgctggacattcaaggccgggcaccttgtgggcagaggactgtggctcacacagcatccgggtctgctttgtggacacctgacccatgaaccactcacttgggcagttcccatccgctcctgggtgcacgggcaggaggcttggaggctgtggcactgcacgggttcaggtcccctctctgagtcttggtgtctccatctgaggaaggggggcacccttcatccctgagcagtggtgaatgagaggccccttggctggtctgagctgcagacttcagaagcaagtgagatgggcccaagatgtccacagagggcttgccatggcctggcttgtagactcgagatgctgagcctcaacaaccctcagagtcaggccacaggatccccgtgtgctcacgtgcaagctcctcaacccccacatgctccctggcaggactggatcatccctgttcttacagatgagggaacttcaaactcagagaggtttctcttgtgcacaaggtcacacagcaagggacgggctgagattgaatcatgggtggactagcgcccgcatgcagtgcccaaggtcacacagcaagtgacgggctgggattgaattgtgggtggagcagcaccctcaggcagcactctctggggccccctcaggtgctcttctggacagttctgcggctttgtattctgggtagccaccttcatgtcccccaccccacagaatgaatgctgggtcccaggaaagaaggctgctgctcagggagctgtccccggaggctttgggaagatgcggccaatcacaagcacggatggcgaggctgctgcctgggaacgggaggcaccagactcttacgctgctcccaggcactaagagtccatggggagaaaagcacacaggtgacagatctgtgatccagggccctgagcctgttctctgcgggtctgtcctcttccaggctggctcatcagaggtcaaagtcaccgctggacattcaaggccgggcaccttatgggcagaggactgtggctcacacagcgtccgggtctgctttgtgggcacctgacccgtgagccactcgcttgggcagttcccatccgctcctgggtgcacgggcaggaggtttggaggctgtggcactgcacaggttcgggtcccctctctgagccttggtgtgtccatctgaggaagacgggcacccctcatccctgagcagcggtgaatgaaatgctggttcagctggactggggaggggaggcagagcttccggtgtcggggcccaggcagcattggaggaggacagaggaggccctggggctgtggctatgagacaacatgagctctcagagggacacggggtgccacccagggcctgtgctgctacccgcagaactgggaggccacaccctgttcagtccctaggtgtggataagcctgctgggcagggggaggtgtggggattccggctgaaggctagtccccaggcaacccaacggcagcggctgctccctggggctccagagcccagcatgctctgcctggggccactgtcctcggggtggtgtatacctccagccacagcatcttctcctgggctggggtcctcgccctgacctctggagctccctctgctctctctgggggctcagagagcaccctgcctgcccagcaggaggccaggccttccagaaaggtcatcactgtggccccagctggccactcctccctaacagcctctgtatagagggaccctccagccactagctggatgccaaggtggccacgcctgagcccccagctctccctgggctgtccctccacgccctttctgcaggatcagccctgctggctgcccccttccccacttccctggcccacttcctctcctggctttctccctcctgggcgctcctccccacttcctctgtggaatctcctgccccccgatggcaccttcccacctgcccgcttgtcagcacacacatgtgcgtgctctctctctctttttcttgctctctctcctcccagcattttgctgagatggggagatgggaggacactgacaaagagtaggctgggggccaggcaggagatcacacctgatttgagtctcagaccctcttgagaaaggaacacaaactcaggacacagccacgtactcacagttggagtggctggggctaccaactcccacggttccagtcccatctgggagccggggaccctcagtctctgcctccagcctggacctctcctctgagctccgtctgccccctggcaaccccccggacgtctcaggctctccaagccaacatgaagacacccacctgttctcatcccatctctgaataaaggtggcctctgccggcctgcaccagagccaacccagtgtcttctttgattccgtcacccccgcagccagtggttcctgagctgccaccatgtgggccctgccagtgagatccttccagggccccccactgcttttgtgggagcccttttcctctcgccctgactgggcagcctccagtccaccgtctatgcagctgccttctgatgttttaaacacagaaaatgcaacatctcctgtcacgctcgtgtcgtgctgacgttcccctccctggcactgcgctccagacctttcctgattggacctcggcctgcttccaccagcttctggcgagtcccagctccgccaccctcaccgtctcggtttcccaaggccgccctgctcctgcctccagacctgtctacaggctgtctgtgctgcttaaatcctgagtcaggccaggcttgagtcctcccaagggcacacaaactgctctgtgacctgacgcatggccctcactgttcttccaacccacggcccggcctccgccctgggtgatgcggaatgctctcccccatataccggccctattcaagtgtacacccacttcaagccgtgccaggtaccgtctctctgcactgactacttactgtatttgaaagtgcacccttcccccagccctctctagccctcttagcacagggcactgatataactcactttcagcttgtttctctttgtctcccagcccctagtagaatgtcggctccccagacagggaactttgtctgttttggcctctgctctgtccccagcacccaggacagcaccggaacacaccaagcactcatgaaatacagagagatgccccttggcttaccacgggctcatcatatcccataaacccagtaagatgagaagatcaaaagtcaaaaatgcattgaatgcacctaacctagcaaacaccatggcttagcccagcctgccttaaacatgctcagaaacctgcattagccttcggccaggcagagtcatctagcacacagcctggtgcatcatagagggctggccgtctcatgtcattcgctgaatgctgtactgagagtgagaaacagaatgggtgtgtggatactggagggtgtgtgggtactgaggttcgctttctacccaatatacatcgctttcacgccagcggaaagtcacacggtcccatgtcagaagttggggactgcctgaatctgttgactggcagctcccacccactgtctctggaccactacgctcttcttccagttttctttttttttttttttttttttggagatggagtctcgctctgtcgcccaggctggagtgcaatggtgcaatctcggcttactgcaacctctgcctcctgggatcaagtgattctcctgcctcagcctcccaagtagctgagattacaggtatcctccaccatgcctggctgattttttgtgtttagtagagacggggtttcaccatgttggtcaggctggtctcgaactcctgacctcaggtgatctgcccgcctcggcctcccaaagtgctgggattacaggcatgagccactgtgcctggccctcttcttccagttctgatgtctgcatattccatacctagggggtctcacgtctctaagcctgaggccaggtgccctgcccgtcccaccagatatcctcacgagattgacagtagcacgtcagggaggctcttccttcgaccacggactaaggaacgcgagaagaactcttctgccccatcttgcagctccagaggagtaaaaagggaaaggaggaagaccacctctgccctggtccccacccaccaccttcccttccacagaaaagctgcagcagggtcgctgtctcctaaccctccctcccaacgggctccgagaccaggcagcagagagacaagcagagacaagcacctcccaccagacatgggactccgcccggtcccacagcgagaggacacacagaaagtgacagaaaatgccaagccacaggcaggttgggggtgaagtgcccccaactggggcctcccctgtgctgctgcagcagttaattcagagctttcctcacccccactcccacctggccagaccacccttggctcccactatcccacctctcacacatgcctcatgtgctgggattggaggaaagggtcttattcccttcggaagtgctgggtcctttctaggggccactgagtcctctgggcagtgcctcaagctgcccgggggtttgtattatgctgacacgcctctgaccttcgagggtgggacgtgagagacctcaaaagagaggatggggcctcaaggggctaggaatgtgggaccccaagcagcagcaggccctactgccggggacacggagtccacaccaccttgtgttcctcccccaaggcagcgagtcttgttctagaaaacttcctataacataaaatcaatagcctcccttcctgtgcagaaatcaggtgcactgataatataaactactctgcacatagtccagataatgccctatgtgtaatataaacaggaacagaaaagcagtcaataataaaatatagatttcactatgacgccctctttggaggggtggcaatgcctgctgggaactaatggaatggggatggctcccgggtttgtcaccgccataaagtcctctggcttccctgctggggaacagggactgggccatgctcaccactgcctagcaccatgtccagcacatagtaggtgctcagtaagtatctggtggagggatggatgaatgactgaatgatgaactcagtcccgggtgagatgtgcagatggtgttgtgggtgagatgagtttgtgatcgggcccttgcgaagccaaagaggtgcccggcgggcaggcggcggcgggatgcgtgtgcgctcgctctgtcggcgtctctgcctctctcagctccctgcacgcttctccaggtcaggggctgctcttgtcttctctgtccccctcggcgccccgctcagcgtctggcacagagtgggtgctcaataaatacccgttgaatgtaacgcatttcaattcaacagacatttattgagtgcccactgtgttgggtgtcacaatcctaccttccttgggcgcgctacagatggacgtcccggggtgcaggtggcgtgccttgctgtgtgcaaatgctttgttcagtaaaagctgtgtgcaaatggaactggtgcccacggactcaggtctgggggctacttggtgacaatcaaaagaaccccgagagaaaaaaaagggtggctccctctcaatctccatgtgctccccttcccgcctggattcctcaggaggccgcagacggcaaggctcacctgatccaggcacagccggcagtctgggtcctcgctgccatttccatgcaaatcgggaaacaaggcaatgccatcgggacagaagtaaaggcacaatcagaatggttagacacagcgggtttcctgctcagaggaagtggatgttagcacaccaggagaaagcgaaggaaggacagcatcatagccacatcttcataagcaggcatggccaggggaaggacacatatgtctgtgctggagcagaatctccccggggaattcatgagtgcagcacgggccattggagtcctgcagacccagcatgccaggatggaggcagccgcagcctgcgtgcatctgcacaggcagcctgggagaagaatgtgacgacaaggggtggggctggcacacatgcccttgccgctgagtgaccacctgacatccacacacctgacatggcctctgggcctcgcaaggctggccacccaccaggctcgtgttctcctggggcaactccagggcacctacattctggcattttcaaacgaggaagcagtgcacgaggtgaaggccacatgtgcaggtcacagagagtatcaggggcacgggggtcacagggggcagcccgtctctagtccggcttctcccacacagcacccccctctcttagtcctgagccacaggcaggccacaaacgtcagtagaaattctggggacagtagttggcctccctgaagagtctgtggggaggtcatcaagtgggggaggtcatcagtatggccccagccttgcagagttctgccggccacctggcaagggaagaactgaacactgaacgatgccaccttgagatccctaaacactgatttcctggttcccagggcaaatgccttgatgccgggacactgagcaaagtagggagggtgctggggaagctgccgagctggtgcaagaggagctctcctcctctaaacacaacggcatctgacacgtgagtgcagggcagatgggccatgagccaggccaatgttccctggcccgtgggcaggtgctacaccagccaggggcagggattcctaggatccgagagagagggaccggaggactggcatgcagctgcccacgggggcacaggcaggcgcgcgtggaccagccccatagcccccttgccctgcctgcagatgaggtgggcagttcctccggaaggagcaggctgccatctggggtgaacccctctccctctgggggatttttgcagggggggggtggctttcccatggtgacatcagccttgtgcctgaatgctgggatcctggtatttacaaagctgcaccccaggcgggggcagaggcctgaggggtgcacagacacctgcttacagagatcatacacaagcaacacacctttctttgtttaaagtgattctttaacacatcatcatttccaagcttctgtgtcttcactctttcctgtcacattgaaacacttttctactttcattgttaagtaggacggtttacagtttgcaggcatgaggatgaggatgaggatgagaaacagtttctgtttactgagcagctactatggccggccgaatgccacacacatacccagttccagtctcctaacacctggcgcccatcacacgacgggtcagtggtgagctcagatttgaacttgggactgcctcactgcaaagccaggtctttcttctgctctcacacccccatccatcctctcccagcccctgcttcgaagctaagcccaagccttgcccaatgaaaactgcccccagcccagctgagacccgcagaccgcttctgggaggcactgagtgagcacttgctactggttttcacctatgatttacagcggccggaagcaaacagcattatctggagttttctctacatttgaaaatcactcctgattcagtcttcaaaacacccctagggtcaggcagacaccatcactgtctctctatgaagcctgaggctgtgcctcgttcaggatgagtcacaggggacagggatggtgcccatcaccaactccaagtctgcactcatcagccggaccatgcccatgtctgctctggagggaacaggccctgacttccacccggcagcccggacgcctttctcctaaacagcccaggagcaggtctgggtttctgcattcttgcacaccttggaaatctgtgaggggacatgcaggcgtggccctcgttagcacactggctcggggacagttcttgggaagccggcaaactgcaaaagccccatatttccttccggtcggtccttagatttgtgggctttgctttcatgctttttaacaggcaaggcttagatgtagggggatagctctgagttctggggcctctttgccgcgaggcattttgtgcacatcacggctccttcttcaaaagaaccactcacgtgagtgaaagctgtcccctgccatcctttggagagggtctctgtcggtcccgctgctgtgggacaaggactgggtgtccaggtctggagaattggtccttgtgtctgcatcccccttgagcatcagccagctgctcttctgctgaaggtaaaaaacaaagtcatgcaaatgtcaaggtcatctgcaatggtgggaacatctcactggacccttcttgtagcttccttacttctaacatacgagctgaccccactgtgagaaaactcaatatgtgagagatgcagctttcaataaaaatcttgccatttagtgagacctatccagacgctatacaggtacatggagcatctgggggaaacggagctgccccatcttacggacacagccactgaggctctgggaggccaggggcccacagggctctgcacggggagaatgagggctgctgcccaagtccagcctcgggctctccctatgcacagccctgctttccagccctagcacaggtaaagcccagcctgcagcctccttttgtcatgaatacgttgttggaacacggagatgcctgttcgtgccctggctccggctgcgttcacagagttcggtagctgcatcggagatggttcagcccacaaagccaaaagtacttactctctggccctttatgaagaacgtctgatgaacctgtcctagaataatggatgccccagggatgcactttgatttatttccctttcacggtacacatctcttcagtcacagaaccataaccaagtcacacgggcatatacccaggacctcggtaggagacgtgtgcatcctaaatgtaggaaggaaactgatggaagggcctcctacctttggcctcgcagggcccctaaggaacagaatgtaagaggaagattcgaagtctcaatcggagaagccctcacaaaagcaatttctttctgagcaaggctgttctcagccagatctgctccctggcattaccttcctgttatcctggtccaagcttccatcctccccatccgatcgcctggcagctggaagggaaaaatccatttgtaaaggccacacaccattgcttgtgggtttctgcctcatggtttcccatgttacagttatgctcaaaaatgaaaaatcaatcaaagagaaggtcagtagtacgagtgcctttcaaagggcaaggaacaaggtaagctggaggaggtccccagggatcacgacccagggagcatcagcagcaggggtgtgaagtgaggcctgatttcagttctagccaaacacccacacagagtaatgttttcagatgtagccacttggccttttgattttgttttgttttttgtttttttgagatggagtctcgctctgtcacccaggctggagtgccatggtgtgatctcggctcactgcaacttccgcctcccaggttcaagcgattctcctgcctcagccacccggtagctgggattacaggtgtgcatcaccatgcctgggtaagttttatatttttggaagagatggggttttgccatgttggccaggctggtcttgaactcttgatctcaagtaatccacgtgcctcagcctcccaaactgctgggattacaggcatgagccaccgcacctggcccacttggccttttgagaacaagcattttaaaaacctcccacgtaacacaaggtctcagtcgtggaggcctacgtgtctgacttgggcgaggggctctggatacgccactgactaccccgcccacccccgcaggaagaagctttgcaccatttcacagatcgggagactgaggctcagggacatggtatacctcgcccaaggtcacgggcaagtgggcggtaggggccaacatgagcccaggccttctgagtccaaagtccttccctgtctgccacacctggctaactgctgctggcaaactgcaaaatggtgacgagttctgctactggaagacatccacgaagagcagtcaggaaatgacaaaattacagaatgcaaccagaaatggactcaatgaaatagaacaagcaaaagttcattttgcaacagttcctttaccaagaataccatctgcagctgagcaacgaggcatctggattttccatttgcctttttctggggggttgtcacccagctgggctgacatttccagcgaagaatgagcaaataaatcacacaaggccatgctgacatttctcggcatccaacttagtaggtaaacacccacaccttgtgtatcccttacagaaacactgaccccatgcactgaacaattacacaaaaacccgtctccgtccccagcccgccacgaagacccaggcctcaggaaggacacgccgaggtgggcttcttacctgcagcgggcggcgggctcgggcccgtctgtcttttgccgtaccctgcctcctgcaccaccaaggacaagactgataccaggccagagagcttggaaatttgggattgggctacaggaccttgacaagataaggccaaaattgaagactgagcagttccgttccgaatacactaacatctcgttactctcaacggctacctgtttctccttcttccaggagagacagtgattttcagcgtgaaaatacaaagccctgctctccccactcacagaggcaaatcaacgccaagcctgctcaagaagcgcttaatggagaggcagagggggcagggagctccgggggacgcatgcccgcagctggactctcctgttgcccagacaacagccgtcacccggcagcggagcccttgagtgtgcagccatacatcagcgatgactcttggcagctgcccagcaagtcccagggagaaggcaggctaggggctgcttggagctctaagagcacaaccattgtccaagccagagaagggccctggggctgagttggctggcaaaaataagtgcatcgtttcctgaaaagccaggaggttggaaagtggatcaccactcttggaataatctgcacgtgcatggacaattaagtcgtcgctccagctgaagggcccttggggacctgaaatcccagcccttggaattcaggcctgggtccccagaggtcagcctggcttcagggactttccttggccatggaagatgggttgactgacacattctggctgaaaagccatctcaggtctcaaaaacagcctccgccatctgagagagggatgctctgccaagatttaccaagtttcctttgcaaacactgccagctcctccagatgtgcacagtttaaccagacttgtaccaacggcttttttaaaaaccagtttgctagcccacagaacagatgaccgagtctcttgagaactaggagcttgggtaggaaaagacaggaaactggcacttcggattattggtggcttgcttccataacagctctgagcctcagtttcctcatctgtaaaatgggcaaaggatgcccacccctccacgttgtgaggatcacatgagataacctgcatggatgctggaacataataggaaactcagcttacaggtttgaaaaattaggaataaacaagaggctaactttgaggctaatttgcagcatgctgctttgggatgtcagaaaaagatcaactcaggacaatcagagaaagagagtttaatatgtcttttgtatcacacaggcagctccttctgagttctggaatgcatttgccagtgaggaaccctcttgggaaaggctggctttctactccctgtattccttgggaaatctttggttggaggcatctgaatgaaagtaagaggtctcaaatttttttttctggatacagaactggcctgcctttcctccttcccaaaccccatcttataattcattcatatctgaacatccatgccagcctgtgtgcatcccttactgctttattcctttccatatacttattcattcacccttttacctacttatccatgcacccactcctttaactatctgtccattcatccagccagccagccatccacccatccatccagccaccacccatcatccatctgcccatccatccacccatccttcacccatccatccatccatccacccacccactcatccacccatctattcatctaactactcatccatccatctacccattcacccgcctatacatccatctgtccattcatccagccagccaggcacccatccactgatccatccacccaccacccatccatctaaccatccatccacccatccttcacccatccatccatccatccacccacccatccacccatctattcatctatctacccatctgtccatctacccatccacccacctatacatccatctgtccattcatacattcatctacccgcccacccatcaacccacccattcgttcatttacccattgatccatccatccttcactcatccatccatccatccatctacccacccacccatccacccatctattaatccatccatctacccactcacccatctatccactgcccatccatccacccattcttcacccatccatcgagccagccacccaaccatccatctacccatccatccacccaccacccatccatccatctatccatccacttgtgccttcacttattttgatatttattcatccagcttccacttatctactcactcacctactcatctatccatccatccatccatccacccactcacccacactcacgcatccatctacccactcatccacccatccattcatccattcctctctttgtccacttcatttctttgcccactgatgcatccattcatccatgtagcccttaatccatcgatcagtccatctaccctctgttcacccttagcccctcaacctttatccccatctccctgtgctgagtgcctactgtgcactgtactgtcttaagaatgggggatgcagaaaaaactcagacatgacccttgtctttcagaagctcacaggccagtgaagtcgaggcagaggtggatgagagggtttctatacataacaagaactttgatgggaggagcaaagtcaacacagagacacttccctgagaacatgcatgtgataaacacttactgaatacctactcatcagataagcactgtattgtggtctggataaacatttttcctttttttttttttttttttttgagatggattctcactctgttgcccaggctggagtgcaatggcgcaatctcggctcactgcaacctttgcctcctgggttcaagcaattctcctgcctcagcctcccgcgtagctgggattacaggtgaccaccaccatgcccggctaattttttgcatttttagttgagacagggtttcaccatgttggtcaggctggtcttgaactcctgacctcaaatgatccacctgcctcagcctcacaaagtgctgggattacaggtgtgagtcactgcgcccagcccttgggtaaacatttgtaaagcatgttaacagataataatagatgctatgaacctcatttacagatgaggagaccgaggtccggagtctaaggtcacatagctggtgattggaaccttgtctgtctgaccctgaagccagagctggagccactttgtcctccacgtcacacgtgtaaattttcagactcagggctgcatcgccactgactttgcttcctgtgacttgtacaaatccactttcccacggagcagctgaagagagatgcttccagggaaagggccgcatctgatgagtctctgcactcccttcagtaactgatgtgccaacctgcagcctcaggtgcacggaggaagtgagtgagatggacatggcacaggggccccgtgtttccaagagagggccctaccagctccctctttggcggcatcaacacaccgacagctctaacctccaaggatctcttgcccatgtccagggggccagcagaggtgtgggggctgttccaccactgtgccaggggtgccagccaaggctctgcagccagcaagtggtctatgccatgctcctcaccagttttctctgcctccagtgcagaatcattcctgagactgcaagaacctgaggcaagtctgggactctggcagccaggagccaggaccggcaccccggcaggtgctctctctgacaagggaaggagctgatagcaactggggaaggtgcccggggtttcatcccttaggccagagagagacgccctctccactcctgggacttcgaatagctgtgcaggaggctttgaggatttgtcccctcctacgtcttccagacttagcctctaaggagttgacccatcaacaggatttttttctgttcttctcagaataatctctatctctacaattcacattgaattggaatgacattgagaggaagagagagaggcagagggagggagagaatgtgtgtgtgtgtgtatgtgagtgagtatgtgggcagggcccacagcatgggcgttggaaactagaaaccttgctgagcctctcacctgtctggccgtgggcaaatccgctagaatctcagctccacaggatcgggggaatgcagggtcacccatgtatccccagcactgggacaagcctagcacatagtggggtgggtgcttgaaaaacatcccttggacaaattaatgaaaaagtcacttaaatccctccatgctggggtttctcctctcttgagtcagaataagaacctctgctccctggttgtcaggatggaaaaagactgcagaggacaaggaaagtgggcctgcagtctcggccccagccagcgcctttgcctccctccctctctccttccggcctccctctcttccacttttcttccttccttcctttctttcttttttttttttttttgacagagtctcgttctgtcacccaggttggagtgcaatggcactaactcggctcactgcaacctccgcctcccaggttcaagcaattctcgtacttcagcctcccgagtagctgggattacaggcgccggccaccacacttggctaatttttatattgttagtggagacggggtttcaccatgttggccaggctggtctcgaatgcttgacctcaggtgatccattcacctcagcctcccaaagtgctgggattacaggtgtgagccaccgtgcccggcttgtcttccacctttctaggacagcctctctgcattcactgcactgcagaaggagaggttagcgtgtcttttgtatcacacagacagttccttcagagccccaaaatgcgtcggccatgaggaaccctctagggagaggctgagttcctactccccggctcccctggggagcctcagtgggggcttcccagtgcaatccgcactctggacacagcctgccgttcctccccatcccgccggtccccaaaccaaaatgagactccaccctttgaggtcaaaaaggacccaaaaccaaaatgaaactcaaccccactagaatctggaatcccagagacacagcaaggagtgattaattcctgctttaaaccagggcacaaagacacagggaacaacgtgtgtcccgtggggtcacttccactgttggctttgggtgggcaggagtgacagcccccacctgccggacaagtggtgggaggtgtgtgttggggggtgaggagagagctgcattgccatctggtggctcatgtttgcttagaaatgaaacagcaaatctggtgaactatgaggactgtccctgcatctggagagtcgaacttactgggaaatgttggggagccatcatttttccctcatgaaatccttttatttatttatttttatttttgagtttttcatcttttatgcatattttcctaaattttatatagcaaatcgatgataaaatcaccacacttcctcattttataagttcaaatcagatatgagacgatcgtaagctactattcctgtctgtaataagaggtgatttcttttttgttgttgtatttttttttttttttttttgagatggagtctcactctgtcgcccaggctggagtgcagtggtgcgatctcggctcactgcaacctctgcctcccgggttcaagcgattctcctgcctcacctcccaagtagctgggattacaggcatgcaccaccatgccaggttaattttggtatttttagtagagatggggttttgccatgttggccaggctggtctcaaactcctgacctcacgtgatccacctgccttggcctcccaaagtgctgggattacaggcatgagccactgtgcctggccggtcatgaattcattttaaactgcgcacagcttccctcccctgagggaatcgatccacagaaggtccctgcccgatatcaagtgtcgtgtgtcatctccctgaaacagcctcaaagccccacgggttatatggccttgagtcccattttccaggggagacagactctgagaaaggaagctccccacgatgtagctggaagccaggggctgtggtttgcactgggtctgcctcctgggagggttgcaggtcccaggaagaaatcactttttctcagaccagacaaactagagccaggaaagcatgaggcaggacagctcctgcctgcgtgctggagataaagactgtctcgaggactttccacagtaacctcaccagaaattccttctcaaggaccgcagaaaccaagataagatgctctccacagaacacctgcccagtgttggcgtctctaccaatgaacggacgccagctccagcctcgagcctctgccgccgatgaactctgtttctaggcagcttatgtgaaacgcttttgctaagaagagcttccctttaccctctcctcttcgggtgcatatatggcttgccacagccatgcatctcggattagaatcctcttttctaattcctcagtactttcaacatatttggagatacttctctccggttttttaggtcaacactcctaaaagtaactgggtttaataccatgagtgaccctagatggtgtgtggaaacacaaaaatgtccacacttattcctgacctgttaaacttcctcaacgttcagcccttgagtagatgacatgctggtgggtgcgaggcctcctgcgccgcctcctcccaggccctcatacaactagccctgcttcatgaccattcctgactgttcagggaggtgctctattcttgcctgtcttgtgttcctaattccctatttattattattattattattatttttttttttcagagagagtctcactctgtcacccaggcagtggcgcaatcccggctcactgcaacttccgcctcctgggttcaagccattctcctgcctcagcctcccgagtagctgggactacaggtgcacattgccacacctggctattttttttgtattttagtagagatggggtttcactgtgttgcccaggctggtctcgaactcctgagctcaggcaatcggcccgcctgtgcttcccaaagcgctaggattacaggtgtgagccaccacacccggcttacagcaaaattttggaatgataaaagaattttggtccttgcttagggtttaatcaaacaggaattaacttgcctttgcataggagaatcatatatagccagatttttaaaaatacacaaagatggccaggtgcagcggctcacccctataatcctagcactttgggaggctgaagcgggtggatcacaaggtcaaaagattgagatcatcctggccaacatggtgaaaccccacctttactaaaaatacaaaaaaattagctggcacgatggtttgctcctgtagtcccaggtacttgggaagctgaggcaggagaattgcttgaagccaagaggcggaggttgcagtaagccaagatcgcaccactgcactccagcctggtgacagagcgagactccgtctcaaaaaaaaaaaaaaaagcacaaagacgatcactggagacagtaaaatctaatctctccactggatggttcaggtaaaggactgaggtcgaaactctttgtcttagatctgggtctgttggatgacaatgaacaatttcataacctggtttgctctcttcccctttctaaggggcagaccccctcctgtcctgcacatgttaatcacacattttaaggcaccaatctgagacaaaatggggggttaataaaaggccaaggtagtcaatcccaatcttgtagccccaccagcacagaatacacagcactccaggcaggctgttcaggctgggtgccatgatggaaagccagtcacttactgtggctgctccttcttttggccaggcctcagtttccccacttgtaacccaagggaactggtctggacaatttctaagggccctagagtctatctagcccatcccgctctgatccctcttggaggttcatgctctacgcttctctggtggaaaggcaatggtagaagccatcatttctggaaactcaagacatttcattcacttttttccttcttggaaagaggaaaaaaatgcacaaagtacaggacctattgccatgatggagaaagtattttaaaagtttgtataacctgatcactgatttgtcagcaagtcacaggaaacacactttttatgagattccatctaaaagtgtccatccagttgtcaatgtgggatgtggctatttgctttaggtacatctggacaagaacgtttaatatggaaatgccttttcccatcgctagtgacttgatacaattcccatcatgtgcacagcactttacagtttagaatgcacttccctattcgatatcccatgaagttcccacggtcagcctgtggaaagggcggggtggaggggatcggtcctgttttgcagatgagtaaaccgaggctcaggatggtgaagcaacctgctgtcaatcacccagaaatcccaggaggaaagagaggggagaccatgtggccccgattcctgctccatggcccacgcaagctgctccctgcgcacctcccaggcaggttcacgtggagcagagctgggcgtcagctcctatttgcttatgcaagaaatctccgtaacggaaggcaaggtcacccatcccatcatcagaaattctcaaaactcaagactaaagtctccctgaggaataaacgaccgattcaagtttgttctatattccaaagatcgggcctggatcagattgtggttctaggagcctctgtccctcaccatcttggctaaagtctctctggctgcataattgaaggcgccaccaccaggctcttggctataaacccccatcccaagccctggctgatgtgcattagcctcggcgtcgtaacgcacagaagttccttactcagacatacccttcatcgtaatttatcagaacaggactctcgggaggctgctagtgaatttgcatttaatagtcagactgctaagggccttggtggtgccttcactgcatttatcagaacacaacaaaaggatgcattcagaagcagatgggtattgacaggcatgcggggcaaaccacagcagcgggaggaatccaaccgtaccatgctgtctgtagatagggggtttcctatagatgttatcttttacgccagtgtctggggaagaagaaagaaaaaaaaggagagaacaggagggtaagcagcaagttgtgatggtttctgttctacagctttttgtaagcaacaagcactcacccagatttagaatcatcaggcaggaactggcacccagcgagcgacagacacccaggccccagatcaagcctccctgactccagatgccaccctcatctgcaggagatggggcagcagccaggaaccttgtggtcccccgggaagtgtagccagctcagacagcccttttccttcaccccattcccaggaggacaggtgtatctccctgccgtttgtgggaatttggaagaaactcaaacacacatcggtttggggttgtgaaaacccgtctgatggttttaaagaaatctcagtgcctggggagcagtggaggagcctggagtgtcgtctggcgcctgctgagtcaaggcaagctgacagtttgggtgtggccagtttcggtgtggacagtttcagtgtaaggagcccagccagcgtgtcccggagcctacctgggacgtggaagtggcgaggtgcctgctggtaggtggaggggggcggcttgctgtcagagagcacggagaggctgggggtgctccggccactttcactgcctccagacggaagggcaaaggcagcagatagaaggggaaacgggaaagcaaagtagaatatttcaagcatgaaaagcttatttgcagcgagccccatctctcctgtctggtggagcagcccagatcccctgcccaggggaaggagtgtgggcctcatccacgttcccagactgtgtccaaggacttgctaatccaaccctgagttgaagtctgtccagagtcccaaggcagaggagcgacattgctgagggcagagggctgggcggtgaactaagaacaccttagggggctcactccatctgcgcctctgcatcctggctggtgtttgaatccaaccaactgcaaattcgccaaaacaaaggcccctcttcctaattatccttgtatataaacatgctgttttccttgagaatctaaaaattagctgctcagaataggattaaagcactaaaatgatcaaaattgtcctttaaaagccattgagtaaaattttgccagctgcagaagataagaaaagagtagtatccatccattaccacattctttttttttttttttttttttttgggacagtgtctcactctgtcacccaggctggaatgcagtggcacaatcacggctctgcagggtgcagactccaccttctgggctcaagccatcctcccacctcggcctcccaagttgctgggaccacaggtgtgcactaccacgcctggctaatttttttaattttgtaaagatggggttttgccacgttgccctggctggtcttgaactcctgggctcaagcaatctgcccacctctacctcccaaggtgctgggattacaggcatgagccaccgcaccctggccacattcttaaatacaactgctttttggcaaattaaatggaaagcatcctctgaccctgcttcaattgctgagctcacctggaactataattctgttttgcgaacaaggttggattatcaagtcacgcatccagagggccgaggtgacctgggtgacgcccctccccccacacctgtttggggaatgaggtgacagacagatgcagggtattgaatgcttgtgatgagagaaggtgtacgctccctgcagaagacactcccaaggccccgttcctcccacctgccagccccaggaagccccctcagcactaggcaatgggctgcaaggggtaaggcgctcttcacctgagaacgttccctcaagctgcacagcctttcagagcagcaggaccctgcggtgacatcgaaatgaaacagaaatagaacttctgcggtgggtgagtgatgtgctgggcctgaaggtggactggccagggaccccacagtggactcgtgaggagggctcgacagacactggcccagagggggctcttgcctggtggtgggctgcatgcagcgggaggtcacctaggagcagggtggccccagccaggctgatgccgtagaaaggactgcaggctctaactttgagcattttctcgtgcttgggcatgggtgctgattttgcctgtcaatgctgatggagcgtcagataactgcccttcccttagcaacctccctccagaacagcatggaaccttctagagcctcagttggctctacaggtgcccttgctggccgtggcacccttgctggtcaggtcacgctcgtcaggatgctccacggtggactcctgcacctcctggtggcagcaggggcctcacagcagggagactggactcacgtgcccggaaaggacaccgcggatccctcctaccgactacggctgtgctggacccatccccactggcagcaaaacagggcaggttttaaaaactgcacccacacgaactctgaacagaggaagacggtttgcttcaggcaccatctctaagctgtgtgtgctcttggcacagctcgtggacctgggaggccaggaagggctggtttcttcctatctggaatcatggcccctgatctgcctcagcccccactcagtgggccgaggatctaacacatcacagtgtacctgtccctccccagttcccagccacagggcagcatcccctgaagtttcaaaccagagtctgtggacacatgtgcacgtctatttgaggagggtccggagactcatcagctttcatcagatacttggaggggcctgaggccgcagggaagctggggacacagccatgttggcccacctcattctggccccccagggccctctaacaccagcccgagtcctgccacctcggtccctccctcccagcaccccgccccttgacgagtgtcctctccagggcttcccacctgtccggacccttcctgggtccaggttcaggctctgcctcctctgctcagccttctggtaggacttggtctctgaggacctctccctcctctgcactcatgcctgcctgctgcctgtgaggcttcgttggaacaaaatgcatcgccagctcccacctggagcactgtgctgctaggctcacatcccagggggcttctgatatgctacagacggggatgcttcagcatcctttaacctgggatgctgcctgttaggagaggagcagcttcagccctttcgaaaagtcttccttctcctcttcttcctcctccactttttcctcttcctcctcctcctcctcttctttttcctcttcctcctctgcctcctcttcctctttttcctttctcctcctcctcttcctccttcactttttcctctttctcctcctcctcctccttcttctctactttttcctcttcctcctccccctcctctcctcttccatttttaaaaatttcagtaaatgtttcattaggaacagcttcaggtagtccagggggctcccgcaccctcccggcccgcgtccctgccgtcccctctcccatcactagggtgcccacagattggtgccacctgcacgccgcacgggattcgggtttccccgggtgtcacctgatgttcttccgctccaggatcccacccaggaaacatgacgttctgtcggcacgtctcccaaggctcctctcggctgcgaccttttgcagacgttccttgtgtctgaggactctggcagttttgaggagggctgctgagggtttttgcctgatgttttctcatggcgatactgggcttatggggttgagaaggaagcccatgaggtgaagtgtcctcaccacatcctatcaagggcacctgctgtcagcagagcggatcactggccgtggcggccttgctgaccgggtcatgctcgtcagccatggtggcctgctccacggtggacttgctccttctctcccctcccacatggcgctctcgggaaggagccactctgtgtagcccacacttgtccacatgtcaggagtgggagttacgaccccctcctggaggacgaggcatctactcccgttatttggaattcctctgtgtgggagatctcgctttctctccatttatttgtttactcaacatttatgtagatccttgtggactgacggctcttgctattatactctagtttacaatccaatgacacatccttcatcgtggtgctcccagtggcccagtgtgtgcctggtgctggctcagctggctcctgtggagcctcctccaggtgacaccgcagagaggccagctggtggccacgggcaggccaggtaggatgatgcccatgctgcaatgcacagccacatcctgggtcctcaaccacaatcaccctgaggacgatgcttcagttatgaggaccttttgcagctgaaggaatggccgctcagcaagatgaagaggcgctgccggggtctgggcagtggagggtgcgggcctggacctgaggctccatcccagggcccctccctccttccttctcaggccaggggttcagagtgggcccaccgctcagcacatggaggctgcctggccagaggcttcagcagcaccgactcccctcccagcctgcacttcctgcccccgctgtcggctcctccacaggggacacgccaaactgaaattcacacaaaagtgcccatggctgtggccagcaccactctggaagctgggtcttggtgggaaggtgtgccgggggtgaggccctgccagcattcggtggggggtggggccaggccttgcctcgggcagccgcccccgtacagtgccgtccggagggaaatgtccactgagaggggccagagacgccagaggagcccggggagcaaacaggaagggctttcccagagggcaggcgacgctgcctggtgtccagctgacccctgggggctgccaccaagaggtcctaggctgggacacactggagcccatggctgcagaggaggacaggcaccttcgtgtggcctccgaggtcgacccaggacctgagggtgaacacaatttgtgaacgggaccccgggtagaagcctgaccttgggctctgccagaaggagctttgggatcttggccagtggcttctcttctgagcctcagttccctcaggagtacattctggaaagaggctgggtgttcccaaggttacggacagccaggggagtctagtaggggcagagcatgggtgccaggctcccccacaccagacaccagagaggtggccaggtggctttttgtgatttcttttttctctttttttgagatgtagtctcgctctgttgcccaggctggatggagtgcagtggctcagtctcagctcactgcaacctccgcctcctggattcaagcaatcctcccgcctcagcctccctaatagctgggaccacaggtgcgccaccacacccggctaatttttgtatttttagtagagacgtggtttcaccatgttggccaggctggtctcgaactcctgacctcaggtgatccgcccaccttggcctcccaaagtgctgggattacaggggtgagccaccacgcctggcctcatgtgatttctgaacgaagggcactggcaggcaatgtggccgggggaaccagggcagagatgggcatcaaagaggcaaaaacctggccccacccaggggaggtctcaaagggaaggtgcctcctggccccgggagatgcccttggaggggctgtggcatagacggcttcggagccacattgtggtggggggtggtgggtaggtgggtagcctccaaactggtggtgggtaggtgggcaccctcctctgctacaaggcgtggaaggaaggggagagggctgccagtccttgggctctctccttggctgtctcgggagctgaggagggggctgctccccagggggcctgtcctgggccttcttcaccctgaagtggtaagaattagacggtggacactcaggacggggcagaggaggggagggtcgccagggctggctctggctctaggacccacagaggctgctcacaggggctgcctggggagcggggtgagcctgccctcggctctggccacttccctctcagggactcacagttgggacagccacaccagaaggagggctgaaggtgggaggagagccgggtgtccagggcctcctggcatggagcaacaggagaagcggcatctccttgggtgccctgccgtgactcacccaaatggttgattcactctgggtttcaggaccgccccctgccacacgactgccgtggaccacacgcagcaaagcccctgctggccatgcttctgttctggggaggggccctttctggctttgcttgtttgtttgttgttgtctgagacagggtcttactctgttgtccaggctggagtgcagtggcacaatcgtagctcactgcagcttcaaactgctggccgaagcaatcctcctgcctcagccttccgaggagttgggattacaggcatgcaccaccatgcccggcgtttttcttttttcagacaaagggtctcaccaggtttcccaggctggtcttaaactcttggcctcaagtgattctcctgcttgggcctcccaaagcagtgggattacaggtatgagccattgcacccaggtgaagactttgcttcttctcaaaggagtcagatcatcccaaagctgtagggacaggccctcagaaaaatgaggacggccatgtccatcaatggccaggaactctcagtaggccacggggcccgcccaaagcaatgatgatgaggtacacggagaggtgtgcaggtctgaatgaaccctgtttggtgaccatccagtgatggagagtccagctgcctgccccaccttctcgctgcctgcggcctgggaggcttttccagagacattcccactcagcagctgctcaggatggggaattattgcattgcttggggaattggcaagaacatcattgctgcctcctctaatgttctgagtgtctttctgtggtgcaccagtcagctgggctgtgtcacaaaataccacagcctgtgtggcttaaacaacaggcatatttcctctcacagtgctggaggctgcacatctctgagccaggtctggcagggtgtggcttctcctgagactgtttttcctggcttgcagacatcgctgtgtctgcagtggccttttacctgagtgtgtgtgtctgcagtggccttttacctgagtgtgtgtgtctgcagtggccttttacctgagtgtgtgtgtctgcagtggccttttacctgagtgtgtgtgtctgcagtggccttttatctgagtgtgtgtctgcagtggccttttacctgagtgtgtgtggagagggagcgagctttggcgtctcttctcttcttataaagatgtcagtactatgggatctgtgcccaccctgaggacctcatctaactgatcacctctttaaaggccccctctacagatacagtcacgtcaggaattagggctctatgaatgtgggggatgcatttttcagtccacagcatacaggaaaacatgagcgtggccgtttccctgcgtgaccagcatgtgggtgcccgtgcagggatgtggatggctcatccactcctggaagagccgagagttggagccacactgggtgtgaaccctgccctgggccccaggagctctggggctgtggaagagtcagggccctccgtacagcgtagcttctgctcctgaacacaaaccctgagagcacctgtgccccccggctgacacatgaaatcagaggtggtgacttgggtaggggttctgaggacaaagcctgtgggcgggtgtgcaggaacccgggtcccctcttcctgtagctttccaagccctctctcccttctgttcctttatgtaacaaggtacctaagttttccttccaggaacatttgctcatggacacacggagccagacacacaagacacacacagagaggggcacagggcatgaaacaggggctccggtgaagccatgcggcagacatggacagcgagcacacagacgccgggcgtggacacccatgagcacccacagcccacatcactgcgtgccttacctcggaagtaggggatgtaatgatgtctgaacacggatgtagggcttgggtgttgggacagggagaggcagctactggtacccacactcacagtaccagctacggggtaacagagagcaagtcagagtcaacctgggctggctggtgcaacgccacacatattcctcatccccactctgctacgaacactgttgcttcctctcttgaggaatgcacaactttttgcacctgaaggtggtcaccaaacatgctttagaccactctcctccaggagcgaggaaaccggacctcagaggaccaggcagaggcccagggtgctgcataggagccttgggctggggttccccagggggggttaggcccctagccaggcctgtcgcttagcatttggggtctcctggggatcaaggactcagctggagagcagttcagggagtggtctgccaccagacatcgtcaccggactcgtccggcgagatgcaagcttggctcttgggttagcctgggccaagcgcagtcaacaagcccaggctgtccttgtgctatggggattgagccagcaaagggcccttaggacgaggagctcaataaagttgactgcccttagctcacctgctcacctgctcactcactcactcatttattcactcattcactcactcactcactcattcattcactcacttacttgctcactcaatcactcattcactcactctctcattcccttatttgctcattcattcaatcactcatttactcgctgactcattcattaattcattcactcaccaattcactcattcacttgctcactcactcattcaatcactcattcactcactcactcattcccttacttgctcactcattcaatcactcattcactcactgacccattcacttgttcactcactcattcattcacttggtcacgcattccttcactcactaattcagtcattcatgcactcactcactcattcactcattcactctctcattcactcatgcactcactcctttacccactttctcaacatttattgagcagaatgtaccaggcacattgcaaggagtcaatggaaataactttgcaaatgaatgagttttgatttttccacaaaggctgcaaaaataagagccatagtccatggatgtataaatggaggcatgcagcagctggccaggaaggaagcagcttggaaaaatccctcgaaaggcagtgtccgtgtggagcgtccctgctgtggctttgacacgctcagggggtcgaggagtttcacagctacagggattgatacacagctgggcgccaggcaggggacaaggtgacacgtgtggaaaggacctgtctcggggctctctcctgactggcggggacctctcacccattctcccgtgaggacagctgtcactgggtgatcaacctagccacaggtgaaatgttaatgggcttcatttttccaccactgactttgctttcccagctcacatcttccgagacccacatgagcttgcagccggccaacgtctgctctcctgacacatatgctgtcttatcttcctgacgtctcttgccacccaatcattagctggaatctaagcgctcagcgtgtgccccctaggctgtgtgctccacggagggctccgctaaccagcagggcagcctctgcagctcacctcgccccaaggcatgaggaggtccttttctttatgccactaaatgaacaggttctcagccacccacccgctggcaatcccacccatttccatcatatttccagttgtataagaaaaatgccacttataaccgaaaaaaaaaactaaaaaaaaaaaaaaaaaaaaggaaaaggacagcatcctgggggctcagaggaaccagggggccaagtacctggacggctgtagtgctgtggtgaccgtgaggtcggagtgtagcgcccgaggctaaccgacccagtggagcttgggctggaggtccgacactgcttgtaggaccggtcatcctgatccccctgggagggaagatgcagcttgtgaacactggagccgggagcacttcccaccccttgtccacccatcccccgacaccatttggtgtttgccctcctgacccaagtggatgactcaacatggccccatgtgggaatctcctgcacctgtcagggcaggtctgaagagccgagtggggctggtgtggtgcagacacactccccgctgtgcctgctggatccttgccacagggtgtggtacagggacccactggcggggatcccccatcttcccctcctgccggtgggggctccagcttcatcctccaggtctcctcctgcctgaccctcgccagcgcccagctcttagaacacagtgtgagaaccacggagactcccccagtccctatgggggtttctcacgtgtgaactgggggctctaacggccctggaggcacatttggaggtagaaagttactccaccccaggccgggaagcccagttgagtcagacccacaagcaccgacatggcagacttcatccaagcaggagcagctgtttgcagcaggcagagtgggaggcaggtggtgtggggtggcgtggcaccatggcacgggggagagcaggctgcctggcccaccacagcttggcatgctgtcccgggtcattacatggcccagcccagtgtcctgctgcagggtggaggttgcagttttgccctcaaggccagcacagtgatgagcaaaggaattcccggtctgggcccatggctcccctggcctgtcagagcacgtctcccaccccgaggtgtgctgtccctaacgcctgcctggtgcgccacctccatgcgctcaggccagccctcatgctaggttcctacctgcgcttcaccctgctccctttggcgactgtctaaccccagcccggggcgcactctctcgggccggctagtgccctgcctctctaccccgggcgtcctctgcacagccctgtccaccttacaggtgtcctggctccttgttcagcttggactcagggcttccagctacatgtgggtttggcagctcggtgcaagtggccccttgtgtgtttggccgtcacatcgttggatccaagagtttgatgcccagctgctgctggctctgcaggtgggccatgttcttccagcagaacagcaccaccaaggcccacacttgccctgttcctctaccatcccccagcactgtgtctatggggacaggctaaggagccaagcggagaagccacggaaggggctctgcagaagattccggttctccaaagctgtcaggacctggggagggcctcagcctcggaccactcctaagggctggactgggaatcctggctgtgtgcagggaaggaaggaagcaggcaagtcccagtaaggttggccgaggtcctgtgaccacctctggaccagaagcctgcaggctgtgcatggctgtgcaccctcccactgagcaagtgtgcatgattttgtgccccactctggggtacagcctgagacaggggcctctgcagggagaccaggctcttcccaggagtgtgctctgtgtcaggcagaccctgcacctcatctggaagggaagctgacatccctccctcaggggttccctgtgcaggtaaatgaggagatgaaaagatgcccggccccaggcctgggacatcaaaagtcaccggtacataggaatcactgctctagggatacagcacccaggtaccatggccgtcacagctcccatggggcaggttgtctggagcaggaggctggagatcccagtgggtgagcataggctctgagccgaccgctgggctgaaatcctcctgcacctcatagtgcgtgaccctggaaaggttatgtgacttccctgtgcctcagtttctctgcggtaacctggggaaaatcacagaacttgcctctgggtgtcgtggtgggggatgaataaatatacattttttttttttttttgagatggagtctcgctctgtcacccaggctgcagtgcagtggcgtgacctcagctcactgcaacctccgtcttccgggttcaagcgattctcctgcctcagcttccgactagctgggattacaggtgtgtgtcacccatgcctgggtaatttttgtatttttagtggagacggggtttcactatgttttggccaggctggtctcgaactcctgacctctggtgatccgcccacctcggcctcccaaagtgctgggattacaggtgtgagccaccacgcccagcctatgaaatgtttacaatggcatcaagcacaggggaagagctcagggcacggtcactgcccaggctgtctattcctggctaccatgacacctttctgctgtggccacccgtgcggccgcacagactgcagtctgattggcagctctctatgtcactgattaattttgagaaacagaaaaaaaaaaaaaaaactagaccactaacagtaaaagctcttttgtagagagacacgtccagtgtttctccacgaggactgggtgcttccacacaacccacgtggaggggcaggaggcaggaagcgctcccaggctcagccaggatcctgaattttcccctaaaggaagccacggcccagaccacgatctgctcagggtagacccgcgtcccaggcggccacatccgcagggctggcagacatatcggggaggcatgcaagtgcggggtgatcataaaaataaccagcagccaggagggtgccccatgtcacaagggccgtggccccgggccccatggtgaagagccaccgaggaggcccttcccgggagtgcggctgggtggttatgtttataacccaggcagcagcgccacggcaagcggggacaggcgagagggtggtggttacctcggtcggcgttggcgagagcaactgaggggactgtggacacaacacacaaagtggccattagtgctggcgccaggcagagagggaggagggcagttccgtgactggcaggcaacacaggcgcaaacacccacacagagccctgatcctccagacaggaaaagaactctaccccgagagacacaagtcagggttccagaaccttctctttggagaaacatggttaattcttcccagagaaagaggcccccggggaaactgatttcgtgccaatgagcccagagcttgtctctacctggccacccccacgtcccactgttctcccacaaagatgtgttttcccaaaaggaagacactggctcagggcacaggcagcaacatcctgagggcccatcacctcggttttctctggacaagagagaaaaggtgctcagcagagacagagggtgaccagaagcctttgggttggagacggctctgccgtgggggtcctggggccctagacagcaggctgacccgtcttcccaggctggcaccccatccaccaccacctgcacatatgttcagtgaggagcatggaggtgggaggggcccagaaagagcacagcccttgtgaggtgagcaagcattgggaaagagaacgccgttcccacagcagagcggggaggcactctgttcacaggaaccatggttattacagcgcaataactcgacggcctctgggaggctgccacgggccctgtgaagccctgtgccatgggaggtgggaagctgaaggccatgggtggaatgatggaatcaagggagaaaccctcaggctgctcccggccatcggcatagaggaagctctgtatggacacacctgacccaggagcccagccctgtccacctgccgaggcaggccccatggggtcgcactttatggctgagagcggaagctcacacacaggtgccactgtttagcagagcgggaggccaacccaggtctccccagagggagggggtgactcccgagccacagtccctcccttcctgccccttctctgccctctggggacaggtcctggggtcaggatcatccatggttcacagatgtcctgccatttgagaggcgcagccccagagaggctgaaagaaacctcagtgacaacagctaagggcccgtgtccacttgggcctggaagctgtgtcctggtcataccatgagaccctggagcaggacagggagagataccagcccaccccaacacacatcacctctgcatgtggcccttcatggccacagagccctcccacagggacacacgcactcaaaccaggaaggggtgtgcccgatgccccaaggctgccaggaggtggaggaggatcgtgaggccagtcctctaggcttgaatcgcacgtcccagagagagcgccaggatgtgctgagaaaatagccagcacatcctgtggtctttgcggggaagaagggactggatttgggtcttagccctgtggccgagacgcgagtcctcacggactctcttccagcatctggtccaggtgcagaccagatgttggacaataaagccaacacacagcctgggcatgtggtaggtgggtacaggtgggtgcagtgggtgggtgcaggtgagtgcaggtagatgggtgtaggtaggtacaggtaggtgggtgtaggtggatgcacatgggtgcaggtaggtggttgcagatgggtgcaggggggtgtgtggtaagtgggtgcaggcaaggtgcaggtaggtgggtggtagacaggtgcaggtgagtgcaggtgggagggtgtgtggtaggtaggtgctggtgggtggtaggtgggtgcaggtgggtgggtggtaggtaggtgggtgcaggtgggtgggtggtaggtaggtgggtgcaggtgggtggtgggtggtaggtaggggcaggtgggtgggtgtgtggtaggtgggtgcaggtgggtgggtggtaggtaggtgggtgcaggtgggtggtgggtggtaggtaggtgggtgcaggtgggtgggtgcaggtgggtggtaggtgggtacaggtgggtagtgggtggtaggtaggtgggtgcaggtgggtgggtagtaggtaggtgggtgcaggtgggtaggtgggtggtgggtgcaggtgggtggtgggtggtaggtaggtgggtgcaggtgggtggtgggtggtaggtaggtgggtgcaggtgggtggtgggtggtaggtgggttcaggtcggtgggtggtaggtaggtgggtgcgggtgggtggtgggtggtaggtaggtgggtgcggatgggtggtgggtggtaggtaggtgggtacgggtgggtggtgggtggtaggtaggtcagtgcgggtgggtggtgggtggtaggtaggtgggtgcaggtgggtgatgggtggtaggtaggtgggtgcaggtgagtgggtggcaggtaggtgggtgcagatgggtggttggtaggtgggtgtgggtcgtgatgccttccctcagctccccccactggtccctctcattgtcagtggggcttgtcacccacatcctcaaattctgtgatccacaggggcagaagcaagtcaggagggcacctgctggccctgagctcttctcaccctccctgcacagcccttgagcttggcaggtgcacccagcagccatgactttctcgccccacaccatccgcatcgaacgcgctgccctggagtctcagctcttgcttccctggaggcccttgttgaagtctcaaaatgagaaggcccaagggaaacgtgtttgaaaggactgagcttccccaccccggggagccccccatgcctggcggcacgcatgtcaagagcacacacactcgggccaacagcctggcaacgcctcctcctacctcaggcagctgcggtcatgttgaaacctcagaaccacaagaggaaaagcaaaaaccaacaaggcattccacgggaaatggacagagcagctctgaataagaaacctctgaggagtaggaacgccgtccacaggcaggccaggaaataaataatctgtggttcaaccaggtcggttacattggctcatgaattcatggggcagaggagcatggggcagagccatggcagcgagggtggcacgggccaagagtccgctacagaggaaatgcatctcatgctttatgaaaataatctaatacttaagaaaattaggagattttcactgagtcactatcatctttcctacaaaccagcatgcttcctactttctactccatttaaggaggcattccaggctcactccttcagcaacggcagctttggggccacagtgccttgggcattactgaaataggatgtgcacatggctatctgatgggcgtgaagaggctgagcgtgtgggtgagtggtgaagatggaagtggctctggccccataggacacatgctagggatgacgcctgtcctgcagggcagcacttggggacacaggtgtccagggccatgtgggcagggtccatacctcgccgtagctctgcctgtcccctgcagagtggctgatgtagggtgagtaggagatcatgtcggggcggtcgatgtcatagatggccttacttttaggaagggctgccaagtccctgtagtccaggatctcaccaccaagcttggcctgagaggggaaagagaattggggaggggacagtcaccagatgcaccccagagggcagcacccccaaagccggatgcatcccacaggacagtgcccccaaagccagatgcatcccacaggacagtgcccccaaagccagatgcatcccacaggacagtgcccccaaagccagagggcagtggctgctccagcagccgtgaagagggtgctggggtcacagcgctttgggcagagtctgagctcacccccagctcctggtataggtgaaatggggacggggtcaaaagcacagggaactccagagcaggcaggcttgggtcctgaggcccagccacaaaagagccagtaggccttgcggaagtgtcttctctaagcctcagtttccttctgtacaaaatgagggaaatgatcacacccgaaggctctggggttaaggaggccatgcctgtgatgtacctggcatggggtctggcaggcagtgagactcagtccatggcttaaacatgtgtacatgcacgcacacgtacaaacacagacacgcacacatgcaaacacacacactgcacacacaaacacacatataggcaaacacacacgcatcccttactattcatgtgggattggccccaggaccctcctcaaatccccaaatcctcatatgctcaggttgttaagtaaaattatgtggttcttgcctgtagcctgtgcacatcctcccatttgcttaaaaccatctcttggtgatttgtaatgcctaacacaatgcaaatgttgggtaaatcgatgttatactgtattatttaacttacataaataaaatagtgtattatttttatattattttatttgtattattttttattgttgtttgctatttttattgttttttaagaatattttcaatctgaggttggttgaatctgcagatgtggaatgcatggatacaaagggtgatgatacatacctacacatacatgtgcacacacatacgcacacatgcacacacacacgcacatgcatgcgcacacatgcacacacatgcaggcacacacacacataaggcacacacatgcactacacacatgtgcatgtatacctccacacagagaacatgcctgtctgagactgtggaggtatagacccccctcacatcctggcccactcccacatactagcacacacatgcccacacccacacactgacacgtgctcacacatgcaatcactccccaggcccatggctcactcacacacaaccggcacacccccacacactggcacacacctgcacacccagattcacccacaaacgtgcatgcacatctgcccacacatacttgcacacaatcaccccacccctaccaagcaagttcacattcaccaccccccatgcccacacgcactcacacacattcacatgctgcctgcagcaaagcacctggcatttgacaggccagctgggacacccctcagcagggtcgggggcccttctgtcctgtctacctctggcctaccctggcccacagtggcgctcctgcccttgctgaatgaatgcgggacgctgggagaacccctgtgtttgctcagggaggtccagctggtgtgtgctgccctctgctctgattctgcccagccttcctccgcggtaccccactgtgcactgtgcacgtgctcttgcccctgcctgtccccttctccctggctctgggctccccaggagctgccgggggcattttccagccacaggtgactctggtggagatccctgttgctgcttctcgattctgcctcagcctcctctggacatgatgagctgtctaccccgagacatgcactgggctgagccctccatcatctgctcgcaaaacacaatgatgccacaaaggggtgctcacagaagctccttttcacaatgtagaagccagagcccagagaggttgggtaacttgcccagactcacagagccaggagggtgcagggcagcacatgaccctggctgtctgactctaaagcccatgctccccaccacagctctcccctttccaggcttcactgctggggggaatgcctctcaggcccagatgcatcccagtggtctcagctcaaaccctctgggagccccctcttcagctggacaatgtaagccctcattatggcccccaaacttggccttcctgttcctggcagcttcaccctaagctgtctcttccccatgtccccaggtgtgccaggttcagccccctactccagctttcctgtattcttcagggtctgttagcctccagcccacctcctccacgaagtcttccctgatcaccaggcttgagggttctcctgagatgttgggtcttggggtgaaccctgacatttgtgatatgcatgaagagaaagaagttctgacatctcagacctctggctgcccctttggagcctggggcagggttcaaaagacccgagatccaatcccgagccagccatttgtaatcatgagatctgatcctgcaggattttcagcagctcccctctgccttctgggaaattggaactctggcgcttgtttacccacttatccatgccacttagcactcaagtcctttcagctcccagtcactcacagcctgggggctttgcacctgctgttccctctctgggatgtgcccctcccacacctcttccctaagctctgcctctggtccttccaggctcagcgaaggcccctcctcgaggcttccttccccacacccccgcaacaagttagtgttgatcttcatctgttgagttgtcccttatcccctcaagactgtggctcctagaggcccaggattcatcactgagacccttgcccagctgtgaggttgacagcaggcttgtgaattgaacaaaagccaatcaagcatttgcaaaagtcaggtgaactctcagccagatgcctggcggggtgtgttttgcatcctcccttccccacctccgtcccctccaagcagcgatgatcacagcattcacctgtccagccccacagcatagggggccgccttgccctgggttagctcccagccttcctcaggcttccctgaaccacccagccctgacagcaggggtcagagagggcagcctgcacgatgccaacagcccctgcccgacccctcagacaggttgctaagtggccttgcagatccactttcccccatgccaagtccttgggtggttgccatgacaacgggctgcactctctaattggcggaaggtctctggagtgtgtgtaaagggtttttcctctttgccttcttccttcccacactccacccagcataatacacactaatatggccacttacaacagtatcattaccatataacccagtcaatgataacacagaatggaagaacgttgcttttatactctgcactattgccatgttgaaataaaggttacaaaataatatgttcagtgtgaccccatgttataaaaattacacacacacagaagcgagacctgaagggtatctcagaagcatcggcagggccactgtggctggcaggatgtaaatgctttaatttcctctggtgtgctgattactgttttttttttttttttttttttaataaatgcagattgcttttggcagaaagaaaagagcagtaaaataggtgatgtccaaaagccccatggtttatggagggtctactgtgtgcacattttatcctggaaactaagatgaacgaggcccagtccctgcccgccaagccctcacggtccgtggaggagatgcagccacttggtggattctggtgcattcctgtgcacgtgaatggcagggggagccggtctcttcctcacggtgaaggaaggggatgctgcatttgacaaccacccacagcaggcaggggtgggcagctgcaacctgcaaagcacccgacggggacatggaacggcccctttctgagaccgtgggggtgctcagcacagagcagggggccaggcgcacagtaggttgatgacagacaccagcagaggtgagataaaaagcagggtggccaggcgcagtggctcacacctgtacccccagcactttgggaggccaaggtaggtgggtcacctgaggccaggagtttgagaccagcctggccaacatggtgagaccctgtctctactaaaaatacaaaagttagccaggcatggtggtgggcgcctgtaatctcacagacttgggaggctgaggcaggagagttgcttgaacccgggaggcagaagttgcagtgagccaagatcgtgccactgcactccagcctgggcgacagagcgagactccatttcaaaaaaaaaaaaaagaaaagaaaagaaaagcagggcagaaccctgggataaggagggcttgcccaccacatcacatcatcttggtgaagagccggaccgtgtgcagtgcccactcatgtggcaccaaccccaaggtgggagagagagcagggctgttcgggcttctggcctgtctggcccctgggagggctgggatgcagccaggctgggtgctgaccatggtgcttggagcacgtgtcagaattgggagcacgtgtccttgcattgtggctccattacttagaggctgcaaagtcagctcatatctcagagtggcatcagcgacgtgggcacactgatggcaggtccctgggcagctctgaggccaagaggaagcagcatggcaccccacacattctcccttgtgtcaaactaagagccgggagactggattaatttgttcgaggccttctgtttaaaactggaattgtgagcacacctacttggccgagcaggaagtccatcaaagctgagacacagtgcaccacgctgcagttgacctgggtcaagtgcatgccccactggtgcagaaattctttgcccaccaacatcccttggcaggcgtcccacctgaaacccccacttgggtctgccccgatctctcctgtggacgggaactccttcccctacccagaacagggatgccatctggcctgatcgtggctgggtccccagggctccacagggagcttgtgctcacccatgcttgtaactgcctgatgcaagaagaaaggagccaccatggctgtttacagcactgagcagcagggtctcctggaaaaaacctaagcctcggagtcacggagacctgtgggctccaagcccagctctgccttgaaagtgttgcatggccttgaaagtgggaccatgacaacagaggccgctgtcactgctcactgcatgcacacacagtcactaccatcccacgctccttgcaaatgccagtttgtttaaaaaaaaaaaaaaaaagaggctgggcacggtggctcacgcctgtaatcccagcactttgggaggccaaggtgggtggatcaccaggttaggagattgagaccatcctggctaacacggtgaaaccccgtctctattaaaaatacaaaaaaaattagccatgcatggtggcgggtgcctgttgtcccagctactcgggaggccgaggcaggagaatggcgtgaacctgggaggcgcagcttgcagtgagctgagattgcaccactgcactccagcctgggcgacacagtgagactccacttcaaaaaaagaaaaaaaaaagagctcatatttaatgagcagttactatgtgccgtgcaggttccaacaacaacagcagcaacaacagcaacagcaacagctaccacgaatgagcgcttagcaggcaccaagccggatgccaagtgctttgcaaatgttggcgctcagaaaacaataccccaaagtacggagccacagcatgctgaggactttgacctaagggagagtggaaggcctcggaagcagggtctctctgaccgcctcctgccctcctgtctctcaccctcttccttcctacccccgctgaagtgagccataccaaccagagttcctcttccccaaggcgggtcatagaaactagaagttcctccccaaagccagccatgaagcctagaaacatgagtctaacctttccctcattctgtgcacaacctggccatggagccattctctgacctagcttgcctgagagtaggtcctaagaccccctgtgccctatacctggaggaagaaggactccccagagaggccaaggagcatctgagcagacggccctgctgtttccccactcagtctgttcccatcagatcacacacattttgtccaatcatatttctacatggccacccagttatcatccaatctaagcataaaaataggccaggcacagcggctcacgcctgtaaccccagcactgtggcaggccaggcgagtggatcacctgaggtcgggagtttgagaccagcctgaccaacatggagaaaccccgtctctactaaaaatacaaacttagctgggtgtggtggcacatgtctataatcctagctacttgagaggctgaggcaggagaatcgcttgaacccagggggtggaggttgcagtgagctgagatggagccgtggcactccagcctgggcaacaagagcgaaactccaactcaaaaaaaaaaaaaaaaaaagaacagtgttggccagacgtgatgactcaaacctataatcccagcactttgggaggctgaggcaggtggattgcttgaggccaggagttcaagaccagcccgggcaacataaaaagacctcatctcaacaaaaaatacaaaaattagccaggtgtgatggtgcatgcctgtagtcccagctactcgggatgctgaggtgggaggatcgcctgagcccggggaggttgaggctgccatgagccatgatctcaccactgcactccagcctgggcgacagagccagaccttgtctcaaaaccaaaactaaaaaggacagtcctccctgggtctttggacctgcgtccctgaaggctcctgtgtcacctaaaactttgattaaatacgtctgtcatgcttttctcttgtgaacttgtctctcgttataggagtgtcagctgtgaccctttcaatgggtgaggaaacagaccatacctttgtgcgcctacacaaacatgatctcattcacatgataattgtcataatcattattcatgaggatgatgatggtattatggactgaactgtgtctccccgaattcctgtgttggtaaagtcctaaccctcaggacctcagaatgtgactgcatttggatgcagggccttaagagaggtcatcaagttaaaacaagaccgttagggtggatccaatccaatctgcctggtgtccttatgggaagaaatcaggacccggatgcacacagatgacccgtgatgatgcaaggagaggacggccgcctgcgggccagggatggggagccaaccctgctgactccttgatcctgggtttccaggctctggaactttgagacaatttatttctgttgttcaagcccccaggaggctgacacagatgatggtaacagtaacggcagcaagcgtttcccacagccttcttctgggcaggcgctgtgctcactgccacccaggcagcgcctcagtgagccctggaccgaaggtgcctgggggtctccgtggattactgaggggctcccagaggctccaggcgggcggcacctcgcccagggcatgcagccaacctggtgccttcatgcgcccgcctaagcttcagagtgcacatcccaagcgccacagtgccactcactctccaggccagcagtgcgtcatggtaactgaggactcgtgcacccctcagtggcactgtcaggattaaggtcaggaaggaccctgtgtccaaccactatgagagaggagggtcgaaaagaagcacagcagacagcagatccaataaactgtcttaaagttctggagcctagaaacccagtggatccagcctccgctgaggcatgaagaacccaggtcctggcctggcggggacggggaggggagaaggggcttgtcccagtcaccagccattccagtgctgggttctggtgcaggggcagcctacatggcagtcccgggtgacccctggccaccaccgcataagccatccctcacctggcgcctgggggtcctcgcctagataaggaattttggtatttacacaagcaatattagcaaacattaaatacaatattaaatattaaatttacatatacatatgtatatgtatgtatacatatataaatttaaatatacaatattaaatgtattaaatattaaatagaataatctcccatctcgaatcccaccacccagaggaaatttctggtaacaacttgttaaaatgttttcaatcatttttatatttgtatgtgattatggaagcgtgtgaggcgcacagacacacacacacacacacacacacagagtctctctctctctctctctctcgaacgaacgaaaacgggatcacataatttacatcacccttaacttgcttcttttagggaacacgctgggagagcgtgcgtgttgatgtacacagatccgtgccgttatttgcaaactctgcagggtcccgcctgggtgtctggcaagccccaactgtcggctgttgatgtgacgtgtctgcaccactataaacaacagctgtgtacacaccactgtgtggctcttgtcaccagataattggggacaggttcccaggggaattgccgggtcaaacaaacatgtctgtgtttcagactcataaagcctgtaccaacctccaccccgaagcagggacaagagcaatggccgtacctcaggccccagatgatagttctcggaaaactctcttaggggtgggcttagccacggccaccgggccccccttctctctccaccctcccaccgccgtccccataaaaaggccctgacttacataaatcacacggctcggagaccctgaggtgctggaagcagggacagaaatgatgctctctgaggaagttctggtttcctgagaaaggagagaggaagagattgaaggcaggtaccaacattcggggccttcagaggcgactgtcaggagttccactccagcagccacgccagcgcactgcggtgtttctttaaagttggggctgggccgggcacggcggctcacgcctataatcccagcactttgggaggctgaggtgggcggatcacgaggtcaggagttcgagatcagtctgaccaacatggtgaaaccctgtctctactaaaaatacaaaaattagccgggtgtggtggcgggcacctgtaatcccagctactcaggaggctgaggcaggagaatcgcttaaacctgggaggcggtgctcagtgagccaagatcgcgccactgcactccagcctgggtgacagagagagactccatctcaatgaatgaatgaatgaataaataaataaataaataaagttggggctgaaggaattcttggaataaacacacaggcttggatgaatgactgaaaagctagcatcaggcagacatggtgggccacatgagaccagagtgatgcacaggccaagccattctgcaagctccggttatgctcagaggcgtcattttccaccgggattatggggactcgctgcagcttagtccactggcccaggttcctgggaacacgggaccatcttggtcaccctgaagaccctctctagcttggcccccggctctgtcctccatgccctctgaccctccatgggcccccaagcctttctcagctcaaagagcacctgctcccacctgacacacaacttagaaatggcccttcggagccccctggcagccactctcccaactgcacctgtgggcttgtcctggcctttttgctgctgtcacgcctgggacctgtgtcctccttacatgctcgctgctgtctggggccactcctcccttccggaccacacccgctgtgtcccctgggctgatggtttttgtgactgtcctgcctctccccccacctcagccccctccagccctgcggacacactccttctgtggtccccacacctctggctgcacctgctgtccctccccacctgcagggcaggggcctctcctggttcagctctcactggagctgcacacccctctcctggttcagccctcactcctgggccacctgcctggccttccccacgcctcctattcaccctgtccaaaagaagcccatatccacagaggcctccccagccctcagcagccaagagctcagccctcactctccccacggcccccacgtcctctgctgcttcgatggtttcccaccccgaccacagcccccactgcagctccctcctctcattttctgagtagacccttttcttgccacccccaacaattctgtcctgcccatttcaggggcccatccatgcagcggtgcctgcagcccaggaggcaccacagtggatgggctgatctgtgtccacattcgtaggttgaatcctaacccccaggacctcagaatgtggctgtatttggagacagggtttttaaaaggtcactaggatgggccctaatctgttatgcctggggtttctacgagcagggatcaggacacagacacacacagggagtccatgtggaggcacagggagaaggcagcatctacgagccaacgagggagaaaccaccccagctaaccccgtgatcttggccttttgggctccagagctgtgggaaggtgggtttctgctgtgcaggccacccaggccgggtgcctttatcggggaagccccagctgcctgactcaggctgggcatcgtgcagcggctggcgtgggtgacagtcagcacctcctacactcagcgcacaccagcgaggatgggcaacatcagcgccggatgtggggccacgtgcagcagcaggaggacaaccctgtgcggcatgtgggtggcgcctgggcaaccctgagtgcaaacttgattctgtatctagaaaggaaggagaggagggagtgggcatgacactccaccacctgtccgccacctctgcactcgcctccgctccaccggcccaggtcctctccatgccccgtgtctccttatatcctaagcttggcaactgccgctgccaccgcctcttcctcctcctcctcctcctcctcctcctctttctcctcctcctcctcttcctcctctatgaggcctgcccagcttccttgggcttccctcagccctggtgcaacacaccaggtgggcatcaactctggggtctgcctgcctcctgggaccacggatttctgcaggctggcaggggctgggtcctcagtcatgcccacgatggcccaataccacctgctgtttgcaaagtagacagctagttctgaggtatgtgacataggatctgctgttcccactgttcctgggccaggtcgaatgttttactggccaaaatgatggctgcatacattttatatgaatacattgaaacaccctttgagtctcagcatcctcgtccatcccccggcaacagctccctgaacgggcttaccgtttctgaggattagatcagggatgaggcacgtgaggtgcttagcactgaaaaattctccccactattatttcagctcaaggtgggctcaggagatgaccttgacagagaaccctctcctctgcaaagcagatgaacattgggtgttttagaagaaagattctctgaagccgagcacaccaacagcagcacaggaaagtctcccaggctcccgaggaatgtttcacagcctccaactgtgccttggtacatatgggagggagggagcgttggctggtttcagcacggggccaggggccaggtttgctctctgcatgtttgagggggtctaggcggggcagccaggtcattgtcctcattcccttctctgggctcagtccccagctctgcgatgggtggggatgagtcagaagggagctgagtaggcctgattttccccagtgggaggaggctggagctttttctgactttctccctacccaactccaatcgcacaaaggtgcttggcaatggaactcaatatccatatgttctcccaggccccagtacaagcgccttgttcagacccacagaaatggaagggctgggagctcacctggctccaatccccaccggctttgcctggccccagggaggcagctgtccttcaacagtcactggggaggcctgccattacggtcacatggtctgacccctctcatctccatgtgaaagctgaggggctgaggctcagagagggctagtgacttgcaccaggtcacacagctgggaggaggcagagcagaactccaatgccaagcctcgctctaccgcccttggccaccgtggagaattgccgggaccgtctcgctcccattcagccggaacggccccgcgtttggtctccacaagcctgtttcctcgttcctcaatggccccaacagtctccagcttcctcctggactcccacccacagtagccaccactgaggcctcagtcttaacttttccaaaggagacccaccttggaaacccacaacctacaggaccagcccggccagtccaggctccctccactgaagtcacccagcccctggccagagcagggacccctctgagctgagctgtccctgtggccaccttcaccgttctcggggcttaccttgggctacccacaggcacagggccacccccttctcaccccaaggtcctgaaacccacattcagtcccctgaagatcactggttcctcagacacaccacccagagccagaaccagactggaccatcagccgcagctccaggaagccgcctgtgaccactgccagctgggcccgggcccctctcggtcacggcgcctctgagcatcctgcacatcggaggctgcccatccacgtttgtctcccccaccagacagggggctccttgtgggcagggacccctcaggtcttattcacctctatgttcacagtgctcaatcccagagcacacacagtaggtgcttcgtggcttgtgtgttgagtgaccatatgatcaaacgcctgaggcgggggcatttgcactggggacagggcagctaggaccacatccttctcacctccgctgagcaccctggccagatgccagggacgtctgacatgctgtctgtaaaccaaaaattaaatgctggggctccccagccatctcaatggactctatccacttggccagggcatgccaaagttaacctgaaagactggttcaggccatgatgggaagcgggggtcagacatgcctcactatgcccgcctccctttggaattcaggaaaagctcaccagcatttaacatcaacgcagaccttaagtctgatgagaaacatttacagtctattctctctgaagcctgctacctggcagcttcatttgcatgacaaaaccttacactccacagagacattcctttctacagatattaactctttcaaccaactgccaatcagaacattttattttattttttttgagacagggtctcactctgttgcccaggctggagtgcagtgccatgatcttgactcactgcaacctctgcctcccgtctcaagcgattctcgtgcctcagccacctgaatagatgagattacaggcaagtgccaccatgcctggctaagttttgtatttttggtagagagcgggtttcaccatgttggccaggctggtctcgaactcctgacctcaaatgatccaccaacctcagcctcccaaggtgctaggattacaggtgtgagccactgcgcacggccagtcagaatgttttaaaatctacctataacttggaagctcctgctttgagttgtcccactttctcgaccaaaccaatgtcaatcttacatgtattctgattgatgtctcgtgtcttcctgacatgtataaaatcaagctgcaccccaacaccttgggcgcctgttctcagggtcacatgagggctgtgtcatggtcactcatatttgactcagaatgaatctcttccagtattttacagtttcactctttccgtggacaggtccttgtcctgggagagctcccatccccatggtgcagaaggggcagccatgcgatcagggccaccttccaggctgcagagaatagtgagtgctccctcctccctactgcaacctttcctggggccaggtgctcaggggttggcctcttgctgaagagcaaccctgaggcagggatggactggctcctgtgagggtcctggagtcccccaggagctggcacagaggggctaggaccgggagtcatttctcctcttgactagcaggtagcactgagaagctacttccacctgggtgtcgggtttccaaaaacaagtgaggttgatgctgccgggagccggccaggtctgcctgccttctgcatattctctccttaactggcttgcacctgacggaacaaaacagagcaggagggctctccctcccacccccaggccaggaagcgccaggccctccggacagttagctccaaggggaccgagatgtgtatgagaaccattaggccgggagccacgccagtccctggactcggcgctaagaggccagccgctctcagcctgcgccgcctcctccctgtgttggccagaggccaactagccctctgttaaaaataactgcttcaaaagcaacttcaaacagagcccaggaaacaaggacgcctgcacaggcccccgagcacaaggactccttcctcctctgctggcagcatccggtggttaagtgacccctgcccgctaggccagtgacccggaggtcagcacgggctggcatcagtggggacagtgaagctgttgctgccgcctggccagtcaggcctcctgcaggtctcatggccgctccacagtaggggtcagaacccgggagctgtcgccagccaccccccaccccgcccttgcggggacctggctgtggccgcggagctcccttttctagccctggtcggtttcagtgtggtaggagttattaagaaattattttaggggccgggcgtggtagctcacgcctgtaatcccagcactttgggaggccgaggcgggcggatcccgaggtcaagagattgagaccatcctggtcaacataatgaaaccctgtctctactaaaaaaaaaagaaaatacaaaaattagctggacgtggtggtgcgtggctgtagtcccagctacttgggaggctgcggctgaagaatagcttgaatctgggaagcagaggttgcagtgagctgagatcacgccactggccactgcactccagcctgaagacagagcgagattccatctcaaaaaaaaaaaaaaaaagaaaagaaaagaaattattttaggcagatagaaaggaaaaggggtccttgggcagttttcgttttcaaagcagctcttagaaccaggcaggcaccgtttgatatgcaaatgcaggccactagaaactgggtccacccaaacatggcgattcctgtggccttcttgcccttgccccacatgtccctggcaccatggccacccccacatatccacatgtatgtggaacatcagggcgccctgcatttgcatattaaaagactagggtgggagggccagcttttccatgggctatgtgaatgacacgcctggtcaaaccaatcgcctaagccctatgcaaatcagacactgccacctcgagcccgtgtatatacctgactggtatccaccccacttggggttccctgtcttggctttggagccccccctccctctttctctctaccagggagcttcttccttctgcctttcttctttcttgcctattaaactctccgctctttaagactacaccacgtgtgtccgcgttgttttttctaattctactagagatgaagaccctggtgtttctccactcatcggagccacatcatcaggagacagggtggtgttcccatgcacacatgcaagccacagtgtggtctggtggccttggcgtgagaggctccctcactcaggtcccttccacaggcctttggtgggcatggaaggatctcacaaatggtgcgggccctgtggtcacttcggagtcacacactgtggcttgctgagggaagggctgctgccttgctcatccctgagacccagcgcagcctcagggtagcttgtagaatgaatcatggactgcagcagctatttgagaggacaacaaaattcacaatgtgccagctagctgctgcgatcctggccaagctcacagcgggatttcatcgcgtgactcttctgccactgtggaaggcagaaaagggcagacttcccctgggaccccctcccctgccaaaagcagagctgctaggagagcatcagggacacaggtgggaagccagggcccctgcctgcccccgtgcaggcctccagccctgcctgctctgctggccagcaggggagctggccttccaggaagggtccagatgctgggcatcctgcagcttcgctcagacgggcctgcatcggaatgctgtcctgaaccccatcagacactctgaatgccccactttgttccctgcaggcacagctgctcaaacaagagcccagacttgccgctacaggacatcagagtcactcaggacccccaaggtagcctgcttggtggaatggatgaggtctacgggataccccacattcgagagtaagtgggaggccaggggttgctgagatccgcagcaggatgaggacatggcctggcctgtgggccttaggggtgtcctcaggtcctggaccaccagccagatggggccatagaccacccttgggtcacagaccaccagccagatggggactgccccaaatcactaagctaaagggaaaagtccagctggaaactgcttggggccaacctgcctcccattctattcaaagtcacccctctgctcactgagataagtgcagatctgattgcctcctttcagaactcaaaagaatgcaatcacttgtctcctatctacccatgacctggaagccccctccacgctttgagtcatcctgcctttgcttcaagttttcccgcctttccagactgaaccaatgttcatcttgcatatgttgattgatgtctcatgtctgcctaaaatgtataaaaccaaactgtgctctgaccaccttgcacacatatcaccaggacctcctgaggctgtgtcacgggtgcacatccttaatcttggcaaaataaactttctaaattaactgagacctgtctgggattttcggggttcacagacatgaggggggtcttggggactgtttgggccccctaacactgtagttgttctcaaattttcacagccattggagttcaccaaatgagagaaaagctcagcaggccagtccacaaaggctcttagatgcctctttgctatgtacactccaaaatttgtgtgttggaaacttggtgtcctttgtgacagtgttggaggtggggcgtttgggaagtgactgttcatgagggctctgccttcctgaatggactgatgccattactgtgggagtgggttagttatctcgggagtttggcccctttttcctctttgttcatgagttcccgccttctctccccgtcctgccacgggacggctctcatcagatgccgcaccctgctcctggatttccccacctccagaaccatgagctgaattaacttctttttacgtagattaccttgcctgtggtattctgtgatatcaacagaaaacaaagatgcccttgttccatctgtattattgctcaccagtctacttgtttaccctccccacctcctaagcctggctgcccccatcctgcagcccgtgggactggacaatgagcctgtagaatctggtcagtgtcctcttaactgtacaaagatggtgcaggagcagtgaagggtacatcagagacaccagtgaatgccaccaaccttgtttctgtcttcagttctggctgcttgtcgacacgccggatgccagatggaggaacctgttgacaaattcccaagagggaaatgattagagttatttcccatgttgcaggggcctgtgtggaaacgcagaggagggagctggtccatgcacagacgtgcactcggactccaccctccaagcggccctgagcatcctctctgtgctggagttagtgccgggcagggggtacccagatcacagtccccgcccctcaggggctcacagcccagttgtgggacggaggcagcaaacaaacagggaaatggctgctgtgcactaactgctcccacaggaggaggcatagggtcttgaggaacctggggggcagctggaagattcttctctgaggagggggtatttgaaggggtttcaagtccctgcctaggatgtaggattggctgcctgcatgttgagggcaatggctgggcccacctgcagagacagctggtgctgcaacctgggtgggagccagccttggggaggaggacttgcagggcagggctctaagctgagaggtaggaagagagaacctcagctgggaagtgggcctgctccttagggtatggggtgaagaacaggtgtgttcggtgggagctgggcacaaggctcaaacaccagccccaccctgttactaatttactcagtctctgtggcttcttgtgtctcagtttctctagctgtcagttctgcccagtcacccatgtcaacagccactaccatcaacataacaaggccacccggcaccaagtgcccccagcatccctggcactctggtctctactaattcaacctcaaactaccccaagtctttgtttttgttttttttttttccacctaagaatagagctaataagaattctaccttgtcaggtcactgggtgaatttaataaaatcaagcagaggtaataaagtatcagaaaagtgctttgtgagttgctgcatacaaatgttagttgcattagtgcgatccttcttgtgcatgggggactcagtgaatgtcaactctctctgcccaccttcccatccttcaggatctggggcacttgctcctcctggggcctccctgaacctcagcctgacctgccgctccctgtgatgggctggcactgtgctcacacacccagcctgacctgctgccccctgcgatgggctggcactgcactcacacacccagcctgacccgccactccctgcgaggggctggcactgcactcacacatccagcctgacccgccactccctgtgatgggctggcactgcactcacacaccctctgctaggtgcatggctgtgtctccatctctcaccctttgctcccacgaaggtgagggctgtggctgacttgtgtatcccacaaaaaagccacacaggctagcacatggtaggggctgaaaagtgtgtgtgcaatgagggaacttatcccatctcctgcctgcaaagccctctgggtcatgtggatttcatggcggctcgtttctagggacatagcagcaactcgaagctctgagagatggtgattggactacatgtgtgtgtgagtgcatagaaaacatttcttgtttataaattaaaaataaattatgaccataaaagtaatagggctgggcgcggtggctcacgcctgtaatcccagcacttcaggaggccaaggtgggtggatcactcgaggtcaggagtttaagaccagcctggccaacatggtgaaaccccatctctatcaaaaatagaaaaattagccaggcattgtggtggctacctgtagtcccagctactcaggaggctgaggcaggagaatcgcttgaacttgggaggcagaggttgcagtgagctgagattgcaccattgcattccagcctgggtaacagagcaagactctgtctcaaaaaaaaaaaaaaaaaaaaaaaaaaagtaacagatgtctcttattaaaaattatagaaaccttaaaaaatgtaaatgaaattaaaatcatttctaatctctcacccactttttgttggctgccttatagtacaggtgtacctacaaatggaaggggttcagtgtaatacacagtttcttctttctttctttctttttttttttttttttgagacagggtctcactctgttacccagcatggcagtggtgcaaatatagctcactgcagcccccacctcttggtctcaagcaatcctcctgcctcagcctcccaagtaactgggactacagaagcatagcaccatgcccagctaatttttcatttttttgtagagatggggtctcactatattgactaggctggtctcaaactcctgggctcaagcaatctgcctgccttggcctcccaaagtgctgggattacaggcatgagccaccacacccaggctacagacacaatttcatatcctacatatttgcttaaaaatgtcttgaacaggccgggtgctgtggctcacacctgtaatcccagcactttgggaggctgaggcaggcggatcacgaggtcaggagatcgagaccattctggctaacatggtgaaaccccgtctctactaaaaatacaaaaaattagctgggcatggtggcgggcgcctgtagtcccagctgctcgggaggctgaggcaggagaatggcgtgaactcgggaggcggagcttgcagtgagccaagatcgcaccactgcactccaccctgggcgacagagcgaaactccgtctcaaaaaaaaaaaaaaaaaaaaaaaaaagtcttgaacatttcccagttaattaaattaaatatcaaaacatgcaactttaagggctatacaatgtggacagataagaattttatctctctactcctctcctgatctttcttttttctttccttttcttttctttctttcttttttttttttttttttaagacaaagtctcactctgttgtccaggctagagtgcagttatgcaatctcagctcactgcaacctctgcctcccaggttcaagagactctcatgcctcagccttctgagtagctgggattacaggcatgcgccaccacacccagttttagtagagatggggtttcgccatgttggccaggctggtcttgaacttccgacttcgggtgatccatccacctctgcctcccaaagtgctggaattacaggcatgagccactgcacctggcctcctcttttgatctttctaacgttttatttatttctaaatgacattgcaggggctccactgcacacaactggcacatacttcctagaaatggagtcttggctcaaagagtggggtcatgtttagggctcttgagatttttctgtcagtttcccaattttcgcccctactagctgcataagaggcctgtgtccttgacttctcaccaacatggggctcacacttcctttttatcttttcaccccagtgggaaaaaggagtatctcattattttaatacgggcatcttaacaattagcaggatctaatgccccaccccatgtttatgggaaagtccgcggcaggaacggtggtggcattgcgggggttggcctgcctcatcgcccaggagaccgtgggggtcgctggggcccatgcttttcagagcctttattgcagcaggatttgccagccaaataacatctgcatggagccccgacatccctggaggccacacagagggtctcaggatgaccaggcagggtgggtgccccaaggaggcctgtgccagggagcagagcctcaaagccacacagctggtcagacctgtcatgattcagactgagaaatccaagttaggagaggggacaggcctgggttcgacatcccacagaacctcacagcagaagcgggggctggcctcaggccagtcctgaagggcgcctttgttcctgagatgaggttacccttgatgtgaactcgtgtccccgagctgctgtcccaaggccattgtgctcagtgtccaccgtgccccactgtctaagggtgccctttactgtgggggccaaaccccatgcagagcaaggcccctgcccagacagcctggcactgctgggacggtcccaaaggaccctttgacgggctctcgagcagagactcaaggaacaggcgacaccggggacgaggctgtcctgtctgacatcaccccgctgggttcggcctgagaaaggcaggcctgtgtgatccacggccctgtgacaatggccgcatgaggtcattcaacagcccgcaggcacctgcacggcagacgctctgacagcagctctcccagacctggccgggcccagctggcctctgggagcactggtgacagagaatcttcaaaagggagctgtggctaaagagatgaagtcacaatagcagacctgtcctcgccggggcccctatgccccgtccaatccatcatcaagtctgggggctgcactccagcacatggcccctgtcccaccagtgctcgctgggaccagacccttgggtcaggctcctctgaaccctcttctcaattaggcctcgaactttgcccaggtctccaccatcaccctcccaacccatccagtcttaggcctgcctggctcagtttcagcgagaatactgcaaaatcagtctggcaggaatcccctggcctagaagcctaatctccctccacttctgattgagttcctcatcccatctttgacgactcagtccttagcctgtcttcggcaaccatcttgtggggtcagttcagcaagaagcccagtacctcgagcgactttccacctgctgccccaaccctgctcattggctgcaacccccactgtctgccatattcaaaatctcaccccctctctcatccattgcgatggtcctgactcctgttgggaagagtcttccttaccggttttaatgagtgccacaataattttccttagcagggagtgctcagggaatgaataagcaatacatagcggggtggtcagagtgataagatgaagcataactctaggtgcctgtctgcaaggagagtgatggggctcagaacatgccaccccaaacaggactagcaggccagaatttgctgcccctgacatgcccctctggcataagggttattttgagttgattactgggggaaacagcagactcagaaaagcattgaaaaccaagcagaagtgaccattttgtaaggggaactgagatctccaaaggaaacctccaactctaacggtgtctcctctctgcaccaggaagatgaggatgaccggaagtccctgggtctcttctcagtggagaaggcacacagcactcctcccccttgcctaaggtgccccctgtcccccggcccccccacttgacataactatgcctccccacacctttcttctttgttgtaggggatgccgttgtctcagcctgaggtcaaaactgcctctttgatggccggggcatggtggatcatacctgtaatctcagcactttgggaggccgaggcgggcagattgcctgaggtcaggagtttgagactagcccgaccaacatgatgaaaccccatctgtactaaaaatacaaaaaaaaattagccgggtatggtggtgcatgcctgtaatcccagctacttggaaggctgaggcaggagaattgcttgaacccaggaggtggaggttgcagtgagccaagatcttgccactgcacttccagcctgggcaacagagcaagactctgtttcaaaaaaaaaaaaaaaaaaaaaccccaaaaaaccccaaagctgcctcttggagatctgcccctgcgtgtcctgtgtgtcctcatttctctgggccaccctttgcacgtacacaaggtgcacatgttaataagcttctgttcatccttatcttgttaatctgtcttgttacagggatctgtcccaactaagacctataaaaggtagaaaattgtgtttcttccccttataagagtcgttgtctccctcctcccctgccactggatacctgcattgtgaaggtataaagggtagccgaatgccgccatcagaagcttaatttaattgtgaaaatgagaagctatgagctaaaaagggttaatctgggaggaggagagacgaccagtcctcaagtctcgccctttcttcaggtctggcagcccacaggacgccccgcctttgtgatgacacttatttttaatggtgagggggcctgggccatttcccatggggcctgttagaagtccgctacattttcctccaaatcctcctttcgtcaatgctctgtggggctggctcttcccttgctcctggaagaaagcctcggctgctgccagtgaccctcagtacctcattaccaacctcctttgtggacagaggggttgcagcaggctggggtggctggggcgggaaacacctaaaactcctaacttggactccctgagctggggcggctttctagaaggggcctaaagtggcgacggatgtgatcaggccgtatttgtttaagctttgctacttggagccaaatagccagcacttctgggtgctggtctttggctcggcccttttcctttcttgctggtctcgggctcgctgagatcattggacagacaaggcaggctgacgaggctggcctggcacgtgccaccgccctgccctgccggctccccgctgtggctgggctgctcgtgacctagcgagatgacactgtcaccaacctgttcacacccagcatgtgtgtggacatcgaagagggtagttccttgctctaggggaccaaacaacacattttaatttgtaccttgaagatacatctcttcgccttctgcaaacatctggccgcacctgacacatagcgcgcaggaagggtggtagtgcttctctccggcctgtaagaaaagcacaaagcagaatgtttctactaaagccagaaaggtcggctgggtcccagcgcccggcatggatacagcatgccctgagcacaggtactcaggggatactggaagggccagcccccaccatcgggacccaagacccctgagcagagcccagacccgggggtgcccccgggctgtccaaggcgccctgtggggaggcagggggagacctggctgcacttgcccagcctgcaggagcccagcatgcagctccctgccggggtagtccaggaggggtcagcctcctttaccaggcggcatccagagagaggtcttggtatttccagagggagcgggagggacaggaggaggaagaaaaggggagagggaggggagggaaagataatatgatttccctaggtgcaagaattaggggagtggggtgaaaaaggatgaatactttccttttcacatctctgtattgctcagtatgttcaatgagcattttgtttttatcattcttgaagtttattaaattagactacaaatgctaatactgaaataacccaaacaaaccacattgcctggtttggcttatttttgcctggagcaaaaaaaaaaaaaatcaccccgaaatgctccctttacccccacgttccagcacacacttcctaccctgagggcacggcgggtgcagcctattgctaaatgtggatgctaaatccccgtggctcattctttcctaaaacgggaagaagtttcctaatccctacctacatctgaatttataataaccagtttcctgaatcagtaagtaaagggctgaaatgtcattttgagcatcccgttttccctgtcctgtgccttccctaggatgaaaacagccccgagatggcccctgtgtattgggaggaagagcccagagcaggcttttctcctgcgcagagcctggtgtggcctcctctgccaacctccgggccaggtgataaggccgtgaatcttccagcaaaggggctcttcccgcagggcccaggcctcggcaccagctgtcccctccactggagcagccctcccacactcccacccctgccaccctgactgctatctcatcccacctgccacctccactcgggagctttctctgaacccttccccaatctgggcattcacagccccatttccacactgttcagggattacttgggtgtattcttccccactagatggccagtctctcaagcgcagggcctggcacctgggccacgtcagggagtaccaggtgcagggatctctctggatagcaggtcacaccacagcatctggccccagaatgtgggtgaaacaatcatttcgctgatcacaattattcaaatgcccagtggtctgggtagcactctttttttttttttttgagacggagtctcactctgtcgccctggctggatggagtgcagtggcgcgatcttggatcactgcaagctctgccccccaggttcacaccattctcctgcctcagcctccgagtagctgggactacagacccccaccaccacgcctggctaatttttttgtatttttagtagagacggggtttcactgtgttagccaggatggtctcgatctcctgacctcgtgatccgcccgcctcagcctcccaaagtgttgggattacaggcatgagccaccacgcccggcctggtctgagtagcactcttaagtgtaaatcagagattgagacagctctgtatttttaaaaataaaagtcaccaggtatcaacgtcacagttgtcaactgctggctcactgcattcataatgagtattcctgagtttgtggcctgtgacctgtcctcacacctgcttaaatccaggtgcccccacttcacactgacttcctctaacagcaggagttctgtgacagccacaggggacagaaagcaaccctgcagggcaaacaaaccctgctgtctacacagcatgtctacatggcacgtccacatgtgaatcaagggagaacactgctgggacagcttcttttttttgagacagagtctcgctctgttgcccaggctggagtgcagtggtgcaatctcagctcactgcaacctctgcctcccgggttcaagtgattctcctgcctcagcctcccgagtagctgggactgcaggcacacgccaccacgcccagctaatttttgtatttttagtagagatggggtttcaccattgttggccaggatggtctcaatctcttgaccttgtgatctgccccccttggcttcccaaagtgctgagattataggcgtgagccaccgtgtccagccttctgggacagtttctaagacgatgggcttgagccctccacagcagcagtggctatggtctccacagctcgggccaagaagcctgttacacacattaacttgtcaagtccttgcagcagtgctatgggtatattattactctcactgaccataacaggcacagagaggtggaagagcttgagcaaggtcacacagcagcaggtggtagagctgcggttacagtccaggagcctggcccccgagtgcagagcttaagcccatgcccaggcctggcaggcactcaacccccagcctggctgtccgcaagtcctggtacagatctcaggtctggggtgtgcaccccctgctcacatgctcactgctaaggcttgaatgtttgtccctgttagatacagttatgttccctcttcaaacagcttatccagtttccccattctctgtactataattccaaataccccccttgcctttgctgtgccccaacttgtctgaataagcctaggcatgcctggacttgctacagccccagtccacattcctttcgttaccagggaataagttaccttcctagtcgctccataaatgaccccctttctctctcttctcacctcccttacatgcctaccttatctaagaaagtttaaatgtttagcccattgggactagtttagactgtgcagtccgatcctagccaatagaggaaagacacagaagcagaagctgcgttagagataataaaaaccctgatttcctttgttctgtgtgctctcgccattgctccacaagcgagacatgctcttctgcagaaataaatttgccttgctgagaaaccctttgtcctttgtccagtgctcattcttctttgtggcaccgagcatttgttttcaacatccccttcaaaactcatgttgaaatctaatcacctgtgtggcagtattgagaggggggcccttaagaggggagcagaccgtgaaggtcctgccatcaggatggactgatacattcatggattaacaggccatcatgggaacaggacgggtggctctgaagacaggaggaaagctctgagccagccagcatgctcggcccctcaccatgggactctgcagaaagttcccaacagccacaggatgtgcccccttcacgctggacttcacagcctccatcactttaggaaatccatccttttctttataaattccccaggagtttcaggtattctgttacatgtcacaggagtgaactaacacacgccgcaccctcgtgtcctgaacgaacaacatggaggatgctggtgaactgatccaagccaagaagtcggacacaagagaacaggccccaggtttaggatgttcaaaaccaggcaaagcgatctacctggctagggtgcccttggggactcacgggggagtctggggcaccagacctgttctctttcttgactcggtactggttccatgggtgtgtccagtttgtaaaaatgtaccaagatgcacaggtataattcacgcacccctctgtgtgtattacatgccaacaaagcaaagacctaaacgcaagagctaaaactgaaaaacgattagaagaaaacatgctgttaagaggacaggtgcagtggctcacacctgtaatccaagtgctctcagaggtcaaggcaagaggatcacttgaggccaggagttcaagaccagcctgggcaacatagtgagacatggtctctacaaaaaaaattgaaaaattagccaggcatggtggcttgcacctgtagtcccagctactcaggaggctgaggtgggaggatactttgagctcaggagctctaagttacagtgagctctgatcatgccactgcactccagcctggatgacagagtgaaacccagactcttacagaaacgttttaaaaaggtgggcaaaggacctgaatagacacttcttcaatgaaaatatacaaatggccaactggtacatgaaaagatgctcaacatccttgtcattaagaaattgcaaatcaaaaccataggagacaccacttcatacccatgagggtagctacaataataacaacacagaaaggaaaagaaaaggtgttggtgaggatgtcaagacacaggagccctcgtgcgctgctgatggaaacacaaaacagtgcagctactgtggaagacagtgtattggtttttcaagaagttaaacacagaattaccaggagccaggaaattcactctttggcatttaaagaaaatgaagagaaaagaacaagagaaatgaaaacttggctgggcacagtggctcaagcctgtaatcccagcactttggaaggctaagatgggcagatcaccagaggtcaggagtttgagaccagcttgaccaacatggtgaaacgccatctctactaaaaatacaaaaattagctaggcttggtggcgggtgcctgtaatcccagctactcaggaggctgagacaggagaattgcttgaacttgggaggcggaggttgcagtgagctgagatcgcgccactgtactccagcctaagcaacagtgcaagactccagaaagaaggaaaggaaggaaagaagggaatggaagggaaggaaagggaatggaggggaggggagggcaggggaggggagggagaaaggagggagggagggggccgggtgcggtggctcatgcccgtaatcccagcactttgggaggctgaggcgggcggatcatgaggtcaggagatggagaccatcctggctaacacggtgaaaccctgtctctactaaaaaaaaattacaaaaaattagctgggcatggtggcaggtgtctgtagtcccagctaatcaggaggctgaggcaggagaatggcgtgaacccgggaggcagagcttgcagtgagccgagatagcgccagtgcactccagcctgggcaacagagagagactatgtctcaaaaaaaaaaaaaaaagaaaaaagaaaggagggagggagagagggagggagggagggaaggaaggaaggaaggaaggaaggaaggaaggaaggaaggaaggaaggaaggaaggaaggaaggaagggaggggtggttccacataaaaacctgtacatgatgttcacagaagcattctatataacagcgaaaggatagaaacagccccggtgtccatcgtggatgaagaaatagtggcgtatctatgccagggagtattattcagccacagacaggaatgaaagcactgatcctgctacaacatggatgaactctgaaaacgtgtgcagtgaaagatgccagacgcaaagccacggggtagaggattccttcactatggaaaatccggagcaggcaaatccatggagacagaaagcaggtgagtggctgccagaggctgggggaggagggaatggggagtaactgcctagtgggggtgaggtttcctctcggggtgacgaaaaagttttggaactagagagaactggaagttgcatgatattgtgaatgcaccaaatgccaccgaacattttaaatggttaattgtacgttacgtgaatgtcacctcaactttttaaagaagagctgatccccaaatggccaacttttgaatgaccaaccacataccaagcattgtgtcaggtgctctgcctgcctcaagttcatcctcacagcagccccttggggtgaacactcttgtctatccttgttttccagaggaggaggtcgaggctcagagaggcgaggggggcctacccaaggccatgtcattgagagaatgaggagccaggatccaaagaaggcaggctggatgctacctcctgggaagactccatgggccatggggacaatcggggacatttgtggctgagcccctgcaggtccggggcctcagagcacggaattaactgcatcctcagctcaccggctccctgtcaacagccctcctcccacacccaacgcacagacacaggaaaaggaagggtcgcagagctcctagtgagctgggggcagagacggaagccttccacgctgtacacgccacggcctggcccatggcacagaggagcagcctggggtctgagaagtcacacagcagagttagagccaagtctgagccagtgccagctctgcaccctttccagtgatggcacagccgcgtggccaggggcagccggcaccctcactcacagttcgggccactcataaagtatgagagtcaacagccaaacccttacattttaaggacgctccatgttctggaacaatccacccatggtggaggggcagggctggagggcctgtgtcttcaggctctgaggaacaccacggggccgtcaagtggacggagcaaatgtgcctgccggtgctcaggcctgtcccaggctcgtggccaaagccatggaggtgacagattccagcctgagattctctcttcctggctgtgtgactcaggccctgtgtcacgtgctggggttcagtgtccccgtgtataagatggagaggactgtccctccctctcaggctggggtagtataaccgggctctgtgattccagaggacatttagctggaaggtaccggcatggcacaggtcaccccctccctaccccatacttcctgctgagaaccagtgggtcacaggcggccatcgatgggctgatggagtcaaaaattagaagtgtcctcattccctgtgtcacctcctgttgtcattcccattctctcatagtgactggggcgtcccagtcatcggtacagtggccacatcctcccaattgccacccgaggagtgcctgaaacctcggccgctggttgttccagtgggcgcacggctccccaggcaggcggaagtcccaccctcgcccgcgtggggctcatgatggctcggatttcaaaatatatgagcaactgaaagactttgcagtgagtggttttaggaagacatcttgtgccttctgaagggtggctgtcatctttaataaggcagaacgaggtgccagggaagcacacccacagcctgtggtggctcagggtgaccacaggtcctcagccagtgctgggtcagagggcagcggtttaagggacgtccccactgtgacgtgcagaatagggccagcaggacagaggtgtggcaaagctgtcccgcctccagaaacccctcctgtcccagcagaggagagctagtggtcccccgtctttgggcttctggagaatggatcagccctctctgccatgagcccctcacacctgaggcaggaggcccctttcctccctgaatccaaccacggaatccgggtgcaaaggcctcctctgcccactggagagctgccacacttccccttgcttcttccccgctgcgggctcccgctcagccgagggccagggctgggcctgcgggctgcacctccctgcagcaggcagctcccagcagctgctcctcacagtcatcggcccagttcagagctctagtttcctttctgaacttccagaactgagtccaggtcttaaaagacctaatcaccatgatgcacaaacaaaatgaaatttacaaagaaacaaatgaaagctgtgagcaggggatccccctgggggtgtttggcggccaggacagaatccccagaatccccaggggccactgcatcccagaaagaagggccccactctgagcagtgcccagcaaggccccttgagatctgggccctccccagaccttccacaccctctggaacacagctcctcttggccccaggcctgtctagcacactcactcctggccccactgcctcttcctctctacccagctcccgttaaggcgtgagcctcaggagcgcttggcccagcggcctcattctctgctgtaccccggcgtcccctccagcagtggcactggcagacgagccgtccagtggggacgttctgaacaaggcaacacggtgcccaggaggccagcctgagcggccctagaggaccagagaacttgactaagtttgggaaaggctagggcagaatcccgcctgtggatgttcacacgcactgcagcgtgtccaggctcggagggtcccaccacgaagacagtgatgagcacattgcccggggaccaggggacgcaagggaggacacgacaggccagcgtggaagggtaggaccaggggctctgatgcgctgccggcatgaggcaaggcaggaaggcagagatgcggcaaagggtgtgtgcgcatgtgcgtgtctgtgtgtctctgtgttttgcctggtgtctgtgtggatgtctttccgtgtgtctgtgtgtgcatcgtgtgtgctgtcttggttgtctgtgtgcatttctgtgtgtctctgtgtgtgtttgtgtgttgtctgtgtgttgctatgtgcagtctctgtgtccatgtgtccttgtgttgtctgtgtacgtttcggtgtgtccatgcatgttgtctgtgtctctccgtgtgcttgtgtgtctctatgtgttgtctgtgtgtacgtgtctgtgggtgccgtgtgtgttttctgtgtgtctgcgttgtcgatgtctgtgtccctgtgtttatgttggttgtgtgtgtcatgtgtttctttctgtgtgtttatttccatgtgtgttgtttgtgtgcctaagcgtgctgtctgcacgtcttgtatgtgtatgtgatctgtgtgtccttttgtgtgtttgtgtgtgtctatgtgctttgtgtgtgtatgtatctgtgtatctgagtgtgtctgtgtcatctgtgtctttctgtgtgtttgtgtgtctgcatgtgtctatgtatgtctacaatctgtgtctgtgtgtgtacgtctgtgtgtgtatgtgtgtggcctgtgtgtctgtctgtgctgtgtctgtcttgtgtgtgtgaccgcgtgtgtctgtgttttgtcctgtgtctctgtgtccacgtgtgttgtctgtgggttgtgcatgtgtgtgtatatctcgtgtgtgtctgtggatgtgtgtatctgcacgtgtgcaaaatctgaaaggatgacttctagatgccagcagtagttagctgtgggggtggcactatgaatgttttggcttattttatgataaacaggtattccttttgagtgagagaagttggggacttgagaagtcgctatcacctctacccatcagaaatgctgtatttatttggaaacacggtttgttttctcccagtgacgagagtcatccgtgcttcctgccccaagacagacaggaggaagcaaagaacaaatgtcccgcaattgcaagaatgatgttcaactggtccctgacccagggcagagagagcctcggcaccccctttcctgccagcctcccctgtggcagggatctgtcacctgcgtctctgtgaacccagcatctagcccagggtggaacacacagtgaggccaggaagggtctagaagggagtggttgactggggaaggaaagagaggaggggcagagggagggaaggaggaggggaggagtaaagggaggaggaattgattcgcagaaccagggggacgctgggcttcttgttaccggggagacggcccctgcacagactgcacgaggcacaccggtccagacctcagccctgacagggttaacagagggtggggctggaaacaggcacccccactcccgcccacctcttcaggaggtgttgacagggcgagggagggatggggttcctggaaggtggggctctgaacacatggccagtggcttctcctcatccacacctcctccctttatgcagccctggtctagaggctggtcacaccgctgtccccgtggattcgccagctgagtcccagctccctctgtgggggcagcgccatccgtccccagcagctggctctgccacagttgctgccaggcgccacccacctctgctgccccagcccagtgcctcccccatccctagccagccatcccggcccaggagtgggacacagatatcagcccctcccatgcccccacaggaccccagcaaggagccggctcatcaggacagacacccagagatgggtgggatgcaggccaacatgcatgagggtgctgcacgtttaggagaaactgagggagagacggggaaggaaaaccccactgtcaccaccaaatgcacatttcgcgggcaggcgggcactgcgggcgccagcacttaggatggcaccatgcccaccacacgcagacacagcacaggcgagggctcggctggcagtgggagcctgggatgctctgtgcttgggtcctgcagagggaagccaggggcactgccaagcgccttagggggcaaaacgggggtgggggaacaggtggctccgaggtctcacacctgactgctctgtccccaaaaacccacccacccgcagcccctcctggcccctgtgagcccccatcagccccttggagttgcgggccaggtttcctacctgcacagcttctgggcaccagagcccagtctgacggccctgcttgagtgccgtgctccctggaacgtgtgcctgcgagggtggacaccctcaccttcagccaacagtctgtcacctgctcctgctgcgccctgggagtccactgtcacccagcggggcaccggcacactgggccgagcatcaggcagtgccaccgcggcggcggcagctccccttctgcggagccaggcttgtccccgcccgcagttcccaccttgcacccggggaggatgctcagagctgtgcagagcccgccgactcagccacgccgccacagactcgcctccccggcagaggcgaaaacaaaagcattaatcttccccaggaggccctttctcctccacagcagaggaggaggaaaaaacccagacctgttttgctcctgttcctcgaattaggatggttccttcccgatgaaccagggcgcaccccaaattctgtatttggcattaaatatcagggatgcttacattgcagacatgggacgcttgcctcccaatccatcaaggggagggggggctgcctgatgaaacccactttgctcgcccagtgcggagcgtgcctgaggcagagcagccccagtttgggtggggtctgcccccgaccccaggccagggcctctctggtgtgggggctgctgcccatgggtgtcagaaacgcggggcaggtgaggctcctgcaccagcagcagcaacagccgcagctgactgcacccaagatacaccccactttaggccaccagatgttccaacgtggctatgctattaagccaaaaatgcaaacctgcatctgtgcaccaggagaagacaaagggttgggggaaacctgcgcaccccgggctccagtctggctctgccaccgactctcagtggctgatggccgggcacgtgggtggatccagctggacgcccaggtgagtggtgggaggcagtgtgtatgtggcggagggagagtgcctgcatgtggtgttggcctggctgagcatcagagccaccagcgcataagaggagcagggtcagggacagcacctgagtggggaacgcaggccctgcaaggcccctggggaagtagggaggggtcggtaagaggaggcttaaaggccttagggtttcctgcacacaaagcccccggatctgcagaagagcagggagagtacaggtggaggagcacagagagggtctctgagaggcagtggggccggtgcgaagggagaggagaggctgagtctctgcagtggggacttccataccaggctgctgtttttaacgggagagatgaacactctctaaaacgccactggaggggaagccctggcaggtaaggtggggaagatgggaggagacaggatcaagcacggcagagggggcgatggccagagcggctggacccaggcacaggcgtggtaggggtgggggtggtgtgcgggaagcagcagggcaagggagagagtcaggatagaaatggggtctcatagagagtgagccacccaggccgtcctcgctgaggtctggctgccaactctttgtcaagcagaagacaaggccgctgtgtgggcagggagcgcagtccaggacagtgtggaaggtctgggctgttcttcgcggagaacggaaacgtggctttggactgccaggcagtgcatcaggccaggctccatcctatcctgcaggctcctccagagccctcaccacctcctacagggtggggtgtgccagcaagggctgagcaaggggaggggtgagggagggagaggccacggccccaggagaaggggagagaggagagggccaggcaggacgtcgtccctgggatgcatcactggctgtaaatatcagatatgatcgccacccaggaaaatacttataggacagacagaacatctgcagccttatgtgatccacccgcacagaaggcacaaagaccctaaatagataagcaggcaacatttacaacagataactgaaatacaagaattaggaatggctacaaatgacaaaaggttgggcatggtggctcacgcctgtaaccccggcattttgggaggctgaggtaggcagatcacctgaggtcgggagttcgagaccagcctgccaacatggtgacattctatctctaccaaaaatacaaaaatcagccaggcgtggtggctcacgcctgtaatcccagctacttgggaggctgaagcaggagaatggcttgaacccaggaggtggaggttgcagtgagccgagattgcgccactgcactctagcctgaatgacaagagtaaaactctgtctcacaaaaaaaaaaaaaaaaaaaaaaaaaaaaagacaagactcagcctcactagggatggaagaaaggcaaattaaagctagaccctgcagggtgcggtggctcacacccctaatcccagcactttgggaggctgaggtggaaggatcacttgaggccaagagttccaggccagctggggcaatacagcaagatccctgtctctaagaaaattttaaatactatccaagcatggtattgcatgcctgtagtcccggctacgtgggagcctgaggaagtattgcttgagctcaagaggtcgaggctacagggagctatgacttcatcactgcgctccagcctgggtgacagagcaagaccccatctctaaaaaaagaaatttaaaaaagcaagatcccatgtttccacctatcaaattggcaaaggtttagaggagaaatactatatcttgttgacaagattgtaaatcagaataatctttctagaaagcaatttatagtaaccatcaagaacactaaaaatgttcctagtttttgactcaacttctacatttctgtgaatatatcttaggaaaaattagaaatgcaaacaaagcattatttttaaagggtgttcgctgcaatgttactgatggttgtaaaaaactggaaggcggcattgtgtccagccataaatgatcagcctggtaattcttttttttttttttttttttttgagacagagtctcgctctgtagcccaggctggagtgcagtggcgcagtctcggctcactgcaacctccacctcctggtcctggttcaagcaattctcctgcctcagccccctgagtagctgggattacaggcacccaccaccatgcccagctaatttttgtagttgtagtagagacggggtttcaccatgttggccaggctggtcttgaactcctgacctcgtgatccgcctgcctcagcctcccaaagtgctgggattacaggcatgagccaccgctcccggcccagcctgacaattctgagagtcatgatgaaatatgatgcgagagtaaagcttatgtccgaacgaaccttgaaaacatcaagctatgtgaaagaagccggtcatgaaagactacatatttcatgattccattcatatgaaacgtccagaagagaagtctatggagacagaaagtagaaagtagaatggtggttgccgagggcttgcgggtacggggagtgacagctaaaaggtatggggttctttctaaggtgaggaaactgttctaaaattgactgtggagatggctgcaaatatctatggttattgataaagaaaaccattgaatgggctgggtatggtgactcacacctgtaatcccagcactttgggcggtgaaggcaggtgaattgcttaagttcaggagctcgagaccagcttgggtgacatagtgagaccctgtctctacaaaaactacaaaaattagccaggtgtggtggcgcacacctgtagtcccagctggtcgggaggctgaggtggaaggatcacttaagcctgggaagtgaggctgcagtgagctgtgatgacaccaccgcactccagcctgggcaactgagtgagaacctctccaaaaaaagaaaaaaaagaaaaccattgacttgtgccctttaaatgggcaaattgtgaactctatctcaatgaagctatttaaaaagaccccacaataccaaaagaagaaatgcttatggggagtttataataaactggaaatctgctaaataggaaatatgagttgggaaacacagggatgtttgggatacaacatggcacagatggtttgagatcaactatgattacatggaaagaaaaaacgaaagaaaactggccagaaagttaggctaactatgattgcatagtcagtggttttattttcttcttagcacctctctggactttgcaaacttcctcacatcaatgagaatggaggacatccctctcagagccactccacagaggagtgcagagctctctgcagggccaggacccttcccgtgggggcatccagccccctggagtctgcagctggggaagtgagacacagtgactgggactgggatgggtgtggccacccgtctccccgccaggtagagttgctggatgcgggtttgaaagaaggtggcctgaggccaggtccagctctccgccagctgcctttttcttgccagaaaagccactctgcgctcactgttccattcccctccgcattctgaatgcttttgggtcctgggtaccagctgtgggagctgcagaggggagccttggggatccaagggtacaccccattccaccctctccagactggcctctgcggcagccagtgggagctctctaaaactccaatgtggcccagcattccctgcaccaaggccttcctcagtgcccctccctacagcctcatccccagccccaccctatcctcccagccaaaccccagaggccagctcctgcaacctcctcgagaggggctcccacaccaggcacagcccctctccattctcgagacccccctggtcacctgtcgcttcccccatggaccatgggccaatccagggatggggacagtccacctgcctgaccagcaccacagcactgaggcaaggaggggctgcagggttggggggggtctgtgaatccagagggtgggctgcagggtgggggggtctgtgaacccagagagggtgggctgcagggtggggggtctgtgaacccagagagggtgggctacagggtgggggggtctgtgaacccagagagggtgggctacagggtgggggggtctgtgaacccagagagggtgggctacagggtgggggggtctgtgaacccagagaaggtgggctgcaggatggtgggatctgtgaatccggagggtgggctgcaggatgggggttgggggtctgtgaatccgaagggtgggctgcaggatgggggttgggggtctgtgaatctggagggtggggtttggtcctagttgccccatgggatttatcttattgaacaaaacgcagaaaagggcataatgtgtaattttcacacagggaacatgcccacatgactacctcccagaccaaggcacacaaagctatcagcacctcagaagctccccctgcataattgctatctgccctgcctcccgggcgaccccgctgtgcctcctatggggacgaggtcctggtgtgggctctcttccatcttccgtgcctctgagtcccaatctagacagcaaacggctgggccaaaacatctcaaggcacttcccacatgctctgaatttgtcaagaggcacagaagagagcatcacaaggcaggcttcctggaggaggtggcactgggcaggccctggacagctgatgagggtgtccattggctgagctggcaggaatagggaggtgaagctgcagccagacagattcttgcacaaacacacacaaatctcccagtcaactcccaggggggcagttaggccctagctcagagcgggcaggggcccggcccgccgcgcttacctccagcacgcgccccgtgatgtatttctcacagctgtcacagcggatgccgaacttggcgtgatagtcagcttcgcagtagggcagcccatccctgcaatgagacaggcagtcaacacagggcgggtgtcgcccgaggacccttgagatctaacaaccctcaccaacaagagagtctgccctcaaagtgggggaatgcccacctcctcctgctcaggtaacaatgcttccaacaggcagtgtcattgggctctcacagacaccagccccatgagaaatatgatgacaatggtcccatttcacagacggagaaactgaggagcacaggccagaccacctgcccagtgggtgggaggggctgacagcagcagcttctgggaaacgagagctgcttctgtagacctggctcttctttctggctccttccatccaaagttcaacatctggggtgccttagaaaactgtgagccaaagaggggggacagtaagggcacccacattgggaacagggctggagaatgacagaaagcccagatgagggtgtggtaggttaggacaagactttactgtcccccctgcatcctggcctgcatcacagcccccgaatatgaggggtgacaaaggctggctctggccacacttggagaggcctggccttccgcagtgcaggaaagagcaggagggctgcacgtatgcgtccatcccctctccccacgcacacgtgcggcctgcctgctatgtgccaggtgcatagggctcagggaattggtgtcgaatgcccatcatcctgggcctgcccctccagcagaggcttcctccgagtctccataaatgagctacagagaaaagccgtctgcggggtcatccctggcacagctcctgagctgaccttcacacccgttatcatgattattaagagatcaacatgccaagatggatggctgtgcagatgtggggacagcaggtcagcagtggccacactcggtgtggggaggcgctgctctgctgagccgtggttgagtgaacaggcctgtgctcaaatgccacatcccagctgtgtgaccctgggcaactcacttaacctctctgagcctcagcttccccaactgcataatgggggaaataatagtaaggactaatgaagagaatggcaggcactctccaaggtggctgaagcattgtcattactaaccagggctgtcctctcagccccggccagacccagcacgtgtgggggtgactggcacagagcgaggtacctgccactccaatgcgccccttccagcatcgctgaagttgctgtagtgttccaaatttggtttgagtttttgcacagctactagagaagggaggatttctcaggctgtcatggattagaccccagctcacgttcttttcctccaagctccgggctgttgctaggtccccaggatgtggggtcatgagccccgggcctgggtgcccctctctggctgcggcctggaagtggcccacagctgggataagccatcgctcagagagtggcagcccttccttccatgtgagggggagacatacaatgagtcctcaggcttacttccaaatgccgctgacctcaggactcccgtaataacccacaaacgagtgttatttgcagcaaatgggaagttaaagataacatctccatggcaacaccaacgccctccttgtcaattctgggacagctctggaggctgctaagtaacatgcacggtgtgggtgagctgccaacgctgcgggaggggcctgccgcctgcacggggctgggcattttcattttatattaaagtgctgcgtgcaccacaccgggcggtccctggatgaccgtgacacaggcggggaaactcatgcaccgcacaggtccctcaccctgggtgcaagctcaccttggtttggaggttttacttaaaatgatgtcttgaagatcattgcagattccccagcagttgtaagaaacaatacagagaggtcccatgtacccttcgcctagtttcccccagtggtgatgcagaattagtatacaccctcagccaggaagtcaacacgggcacatccaccgacgtgattcaggttccgtgtgacatgtgctcgaatgtgcatgcatatgcgtgcgtgcgtgtgtgtgtgtgtgcgcgcgcctcactccatgcagttttatcacagggcgtttttcatccccatcaattcctgtgatgattttgttcccattgggcattgagaacaagcacagcatagataaaagtggccagaagaccctctagctcccaggaaggggccctctgcgctcagaggagctgcccgccttcagctcgtccacatattcgcccctcacctgcaccatgcggaaggcttgcctgcctcaggtccccaatcccccagggttaaaaccgacccccagctcctggccctgagctgcctccattcaaggccattatcttcccagaagccttccctggttcccaaatcggccaccaccccagtgtgactgcacatttgtgggacatgtttggtgtcgatggcagctgccccaggggcccccgctctgcagaagacagagtgcgtggctgtggggccccagccctgacacctgggatgggtcagccccctctcctcatctccatgctggcttctgctgacattgcttcacctcctgcaggacatccaggcgccggaaaggcagctgatcccatggggatggtggagggggactgcgacggggagggaaggcacttcaaaaactcagcactggcagccctggtagctctgcttctcatccaaaaaaaggagccggatgctgcaaatgccgttagagaagccagggctggccagggaagggggacataaggctgttgggacaaattcgctgagctctgagccatgcttctcacccagcagcagggcagtagtagctgtgtgaggaataggagagacacagagagggtggcgctggggacacgtgcagagtgtgggacccccacagagtagggaagcctgagcggaggctctcactagagccctccccccacttacttgctgatgtactcggcattcaggagcttcccacagctcttgcacttaaaacagcccaagtgccagtgcttgtccaaggctaccagggcctggccattcttgatttctgtgccgcagcccccacaacctggaagaaagagaagagaacacagacacccccaccattgtgagaggtgttggggaggcctcctgctctccacactccgtgaaggcccctggggcagccgggaggggcgggacagaccagcagccacagcgagtgtgcttggaggagtctcttacacagcagtctctggagcatagggaaggcaactggggaagtttgaccctgcatgcattgagcactgactgcatgcagcctgggctatgagctggggaaacctagatgaagaaacagaggtcctgtcttgcaggagagcggagttggctcctggcaccgagacgtaccaggttgaacccaactgtgactcgatgtgccccccaaagggaaatggaccatattagagagggccgagccagcccccagcccccaaccccgtcagccctgggagctctcccgccacacccagccagccaaacccaccttctctctttctgccatccctacggtgactggcgctctccaccccgtggccaccagcctcgtgggaccctgcctggcctcctggtgccctctctgtccttcccagccgtgcctgccctgctcacttgtcctgtgtcccagggcctggtctttgtgcacagggcctccaggttttggccctgccctgagccagcggcccacaatccctccaccctatgagccaccataccgggggctccacagccagcatcatgggcatgctcccctggcagagcgggtggagcaggctggggagctggggagagcctggtgcacgagcctgagcggggtgcgtgtgagtgcatgtgcatctgtgtgcatagggtgtgactgtctaagtatgtggatgtgtcttatgggactgtgagcatttgtatgtcacctgagtcttcctgtgagtcttcctgtgaatatatgaggtcaggggcggggagtgggaggcagagcggcagagacgctgtgacagcatccccaagggaaagggcctctcacaaggtgaacacctggtgacaacagcagcaactgggacggagcagggcccactgagtcaaccacccaggtgtgcattgattcatggatcacacacgtcctcactccagggacctgcacctgtcatagctgaatgtgcgtcagtgtgtgtgactggtgcgtgagtgtgtctacgtatgtgtttgtgtctgcatgtgcgaatatgtctgcacgtgagagtgtgtctgtgtgtttgtcgaagtgtgtgtctgcgtgtgtttaagggtgtggttgtgtgttgggggcatgacaagggaagggcctcggaccccgtaatggacagggaggaagagggtgtctgacaaacagggccttgccgcctgcaggagcccctgagtaattcacagaccaagcagggacccctcgtgcccaaggaaacctctacccaagatggaaagaaggtggccccagggcccgacgtgctgggtacaaatcctggcccccactatgcgctgggtcacactgagcgtattcctcctgcgggagcccccatttcctcatcgtggggtggggtgatcacctcctcacttggtgcctgcccggatccagtgctaatttacacagaagacctggcccaaagccttgcgcatcccgggtgaacagtgagcatcggcgagaccccctgtgggcctgctgtgcggtgagagctcagcagaggctgcttccctgcgtggcttcattagtttcttttggcagagacctgagtcatattgtttttaacaattaaaacaaacgaacactcacaaagccgttggtcaagctcaggatttcctaagtgaccacactgtgcacattcacatgctactttggaaaacagccagagagcagattcaaactctgagggaaaggggggcctcttactcatttcaggaccctggatgcccagcagaggctgtgggcttgagaaacacgtggggaatgaatgaatgaatgaatgggaaccaaagtgagaggatgcctccgcccttctcaagtccaggaggcgacccccacatcacccaatctgccgcgctccttcctgtgtctctgcagagtcagacgacgcacagccctgacttagcctcctggcttcccccacttagcaggtgatgaggcacattttgcaaagctctgcatcagtggctctcaacttggggcacttttgcccaagagacatttggcaatgtctggcgacccttttgattgtcataacttggagggggttccaggcatctagtgggcagtggacacaggatgctaaccgtgccaggacagccgccctcaacagggctctctggccccacatgtgaatggtgctggagctgagatccccggctccaagcctctgttggcttctctgcatgtcaagggagcacagcacatggggctgtgtgtcgaccagaggacagacagcagacagcagcggtcagatcccagcaatgccccccaccggctgtgacctggggaagtcacttcacctctctgtgcccctggaatgagggcacgtgtgatccgtgaataaatgcacacacgttgaccggtgaggtgggcccacctctgctctcactgccactgctgttgttgccaggtggtcccctcacgggtggcctgctccctctgtgatgcctttatgggcatctccgccactctgcctcctaccatattggccggcgccctcccctgccaagaagctcccttgaccttgagctccaaactgcagaggggatgtgaacctcacacctgcctcggccccctcattctcctatcagcagtacacgtggagatgagagcaaggtgcaaaaggagcgttgccatggaaaccacatcctcactttctaaacacatccggagctccacattgctttgcgggctctgcgcatggcagctcagagtcctgtgtgacacaggctgtggactagagctgtcagcggcaggatgtccctagcagggcagaaggggccccaggaccccccaatgtcagctggccacgtgcccgtacatcctggttggcactgccatcagcagcaatggcataaccctcctagaaccttccactttcctattttccccaaaaggctccctcttccacaagatgtggtcatggtgggggtggttgttggggggtggctaggatgtgccaggcagcctcctggagcctcagctggagctcagggggtgcaggtgcaggagccagaccccctctgcagcacctcaggtctaactgggggtcaggggagtaggggggagtctcagattctagatcaaatctgagactgagttttggaaacaaggactctgaccgagctccaaaacttgagagtgattgaaaatccacgaacttggcttgcagcttcatttaggaacctgtactgaggaagaaaagccgctggaaaagataaaacacgttcaagttcggccccagcgcactgcggtcaggactagaccgggacaggcctgccatgggcccagagcgggacgggggctcctgcgaggatcctgggtttacctcccaggcgcacccaggggttctcctgtttcctaggcagcccgggagcagtgggagctcctgggtttaaccccggcctcacctcgaggctctcctgtttcccaggcagccagcaagggggcgggggctctggtttgggcacccaccctcttagcactacccttgcaggagcaaaggacacaggggctccacgtgccacagcccaggtggtcaagccctgttgctggaagagtggaggaccccaaagccccattcctgggcctgggaccttagaactgcatacatcccttcctgcctcttcatccctcactctggtggggcctccccaggtccaggggatggagctaaagagccaggggcggccaggcccaagaagtggctgtggggtctcctcagcacggatggagctgcttgccatcccttttccccaggccaagcccatttttcccaattgccagcctgccgcccacgcccctgctggccccacacccacatcaaaggcccagagaggggacacctcttgccctcggcacacagtggtgaatgcagggtccacccagggtatctgggctcagagctgcctctggttcggcacggcgctcgcactctgcgacggccgccctgtgacaggctcgtgaccagcaatgggtcagcactggagagctgggggcctcacgggaaggggcagagcttcagggacacaggggacctcccaacgagagtggtggggaagctgaggcatgcggggtgttcgctgctccttctggaagaagcctgtgcggcccaccctaaaggatttcttgttcctaagtggcctgcttggggcagcagagggaagctcagggccacgggactcaagcttgagctctgcctcaagagccagccactctcccctccccagggaggggcagccacacaggcagccatgtgaggccccaccctgctgccccccggcccagcaagctggccaggcagacggtgctgcttcctacattctggactgacttgactctaccccactccacaaccatctattgctcctcacggcctccagatgtaccgagaacaccacggcgtggctttggaggaagctgccatctggtgttggtgtctcagtgccattcccattccccgcccccacgctgcagccccgtccactcacacgggtctgggggtgcccacgctgcagtcccgtccactcacacggctctgggggtgcccacgctgcagccccgtccactcacatggctctgggggtgcccacgctgcagccccgtccactcacgcgggtctggggggtgcccacgctgcagccctgtccactcacgcaggtctgggggtgcccacgctgcagccccgtccactcacgtgggtctgggggtgcccacgctgcagccccgtccactcacgcgggtctggggggtgcacccagcacatttcacaggtgtttagtctttgtactcatctgtagcatcctcccccttccagacccacctgctggaattcagcctgcgtctccagtttcagaaccaaggccaccttggacagcctctagtcctagtggggtgagctcacttgctttggagttgaaaggccttggcccacccctcggcacttccgccccctgatggacagagcacccagcacacccacccctgccaggtacagggcactcctgcacctgcagaagagctcctccaggcacagctgctgagaaaactaaaggaggctggactgggaagactgcagacatccacgcaggaaccaggactgctgctcaatgctttctaggcacagaaatggttctaagctcaggattctcaccacaggctgggggaaggggcaggttacattattagttatctaggggtccggggaacatttgttctttgaaaatgcaaatttgatatttcaaaataaatttacatttggagagggcacagcctttctgccaagggtatttttgaaaacctcaaaaaaaaaaaaaaaaaatctcagacagtgattctgtggttggtcatatttccatcccctcccacttttttttttttttttttttgacattctcactctgtcactcaggctggagtgcagtggtgcaatcccagctcactgcaatctctgcctcccaagttcaagcgattctcctgcctcggcatcctgagtagctgggactacaggtgggcactaccacaccaggctaatttttgtacttttattagagacagggcctcaccatgtccaggctggtctcggactcctggcctcaggtgatccacccgccccggcctcccaaagtgctgggattacaggcatgagccaccacacccagcccatgtttccctttttaatttggctgccaggaagctgtggacaaactgttcaaaactgatctcccccttttaaaatttgccatagagcttttgattactatctgaatttaattataacagtactactgtttgtgaagccaaattctcaaagatagataaaaggcattaaataaaaccacgtttacattaaaaaaaaaaagcagtcaatccaggccccagctggagagaaatttttgaatggaggactctcctagcaagcccggaagcagcgccctcccgacccggtggggctgtgaacttcatcccaagggatgaaggctttgctttggctcacagagtcaaattataaccagctcccagggccagtgctgcacctcggggaggctggaagtggaatcgcctctgtagagactctcaacgcagcagacaaggtgggggagaaaggaggcatttgacacaggagaggaaattaattgcgggcaagatgttgaccccagaaatcaggagaaacccctcctctgtctggggacaccccagtgaccacggtgctcagagtgggcttctgcaccaggtgcctggcagcggcggggcctggtttgctgggcttccctcccagagcctgtgtgccatctcatgatccggcagagccaccccagctgggaaaggccacctggctgcccactccttgctgatacttggccccacacctgcaaacccctgacacttcggctggcatttgttttttttccacactaacaacctcctgcttcctaattcaggaagcatcttgagcccccactgcatacacacctggcctaactcctgggaggtggagcagtgaacccaagggcccctgactgcgggagcccggagctcagtgttcctctacaggttcccccaaaggggtcccgggtggcctggaattaacagaggggagctgaggggagtgaatgccagagggagaggacctgaaggagacctggaaggcttcctggaggaggtatgctagagctgggcaaaagcagcagtggacattagatgggaaagcagcagtgggcattagatgggaaagcagcagtggacattagatgggaaagcagcagtgggcattagatgggaaagcagcagtgggcattagatgggaaagcaggagtggcacatggggtggaggaaacagccagtgcaaagacttggcggcacgagagccccagaaacttccatccctggctgcctcctcacatttattcacagcgttcactgcagctgctgctgctctgggtccccgtttctcaggctctgtccctgggcactgcagagaccaagcccccaactcagcaccccccccacaaccagcaagcccccacttagcatgccctatactcagcaccgcccccactcagcgccccccagcacctcccactcagtacgccccactcagcgccccccaactcagcatacccacccatttagcaccccccactcagcatgcccccactcaacatgcccccactcagcgcccacttacttcggaggccctgggacaggtgcgcgctgctgcccaccgatacgggcagggaacacttctggcacatgcattccttcccgttgaaggtcactcggtccccgggggggaagggcagcctgaaacaagagagctcgttaccagccaggcccaccttctggctcctctctgggggagccctgtcccagtgcaggagaccagggccaatgtctccccaggatcttgcaaaggtaccactcacaggctgaggaaatgcagggcctctccacccaggcactgctgcgtccccgcaataggacctcaggtagtcatcgacacctgagcctcagtttcctcatctgtaccaacaggcagaatcatagcacctaaggtggtggtgaggaccagctgagggccagcccagtgcttggcacatggcaacatgccaggctgcctgggccaccggcccctccagcccaccctgccttcccagtcacatgggatgctttcttcatatcagctcagcagcaaggacagcagctatgtacactgggcatctcctgtgtgcccagggcccactactgtgataggtgccctataggcatgcctcatgagtaaccccacgccattcaacctagttggtatttgcttcatgttttctctataggtgagaaactggagttcagagaggatatgtaacttttccaaggacacatggatacgagtcagaaccagaatcaaaccaagacctgtctggcttcaaagttccacgatttaactacctgggcctctaagagggcagtgtctataaaagcacacctcgtagacaggaagatgctggacaatcggatcctgtctttatttaaaattctgccattttgctctaaatggattttttgcatttatttcaattttttaaagtatcgcattaaaatatcatttacttgactactgagttttttggcaccaccttaaagtccgcctccgcagcaagtgcctggagtgaggccaggtgagggaccgcagagagctggcccatcctcctgcagtccggggatgtctttggaaactgagggatggctcaagtagctgcatctagcaagctaaggccaggccacctgcagacagggccagaagcacagcctgagaatgctgccatgtctgccctcgacacctgctgccatcaagctcccagcagccaccgggccactttccttccccatctgagcctggccagagaaccaggtgcttttcaggcagaagcccgtggaagtgtcagaccacgggtgccccttaaatcccctgtgtggccaggcgcagtggctcacacttgtaatcccagcactttgggaggctgaggtgggaggatcacttgaggtcaggagtttgagaccagcctggccagtgtggtgaaacctggtctctactaaaaacacaaaaattagccatgcatggtggtgtgcacttgtaatcccagctacttgagagggtgaggcaggacaatcgcttgaactgggaggtggaggttgcagtgagccgagattgcaccactgcactccaggctgggccaaagagtgagattcatatcaaaaaaaaaaaaaaaaaaaaaaagcccctgctcaaacacctttgttgggttctgtctgtcttcttcagggaggagacaatgcattcattgttgaatgaatgaatgggtgaataagtgaaggactgaagctctcctagggggccacgcttggtctactctctcctgccaagtccctgcctggcctcccaccagggcctgccagatggagctccctgaagctggagaccaccgtgccttcccctgctgaaggcctgccagagcacccacctgtggggctggcatccagtaccctcggtccatgcagcaggtgtgttcctgggttcccactgggccagtaccttctggggatccaggacaaatacaggctgagctgaacccagggccctcccctcccatccactgcccaggagcctgcacggctctcccatgcccgtgttgccaccgtgtcaatgctatggtctgctgccacctgggtctccgtgtcttgcaccctccctgtcatgggggatcttgagacagagtgggagcccctccccatccctggatgtgcttggagcgaatctctggctgtttaacctggaacaagctactcagcctctctgaaacacttcccacctataaagtaggactgagaatgcctgcattccaggtttgtattcatacattcattcgcccacaggacatcctgcctaggaagctctggcttattgcctggacctgggaggggctgactcaatggcagctatgattgtatttcctcaactttattgaggtaccttgtgacaaatgtacacacccatataactgccaccaccacagtcatgatatggaacattctttccactgcaaaaagccccctgtggctgtctacaatcatgctgctcacgacctctggccccaggcaccgtgatcatcattgtcaccatggccccagacactgtgattgtcactgtcaccgtgcattagatttgtctttttttttatttttatttttttgcgggatcacagagcacatagtctttggtgttttgtcagcctcgcgtttttcaggtccactcatgctatttgccaatatcgatcctttgttcctttgaggacggagcagtgtccatcccatggataaatcacaacagccattccatgcaactgctgggggcttctgggctgtttccagtttgggactgttacaaataaagctgttaagcacggttgccaaccagcctctccgcggacacaagctttccttttgggtgaatacagaagatggattttctgatcatatgctaagtgtgtgtttaactttatcagaaactgccaagccggtttccatggccgttgtgccattctgcattcacaacggcactggagggacactcctctggcttcacatcctcaccagcacttgccatggtccatcttttcagttttagtcgttctcatggaggcgtaatggcatttctttgtagttttcatttgcatacccctgtgactaatgatggtaaacactgtttcatgtatgctgttggtcatttgtgtgtatatatataattatatataatattatatattatattatatatatataattatatatatattatatatataatatatatataattatatatatattatattacatataattatattatatataattatatgtaatatataattatatattatatattatatataattaattatgtattatatataattatataattatatataatatataatattttatattttatatattttgtataaaatataaaatatatattatatataaaattatatataatatttataattatatatattatatataattttatataaaattatatatataattatatatattatgtataattttatataaaattatatatataattttatatattatataattatatattatataaaattatatataattatatattatataatatacataatataattatataatatatattatattaatatgtattatatattaatattatatatttattatgcatttatatattaataattatagaattaatatattatatattatataatatattatataaataatataatatattatttatacaatatattatatatacaatatatattataatatataacataatatatataatatattgttataatatataatgtatattataatatataatacatattataatatagaatacatatttttatatatattataatatataatataatatatatatattttttgagacagagtcttgctctgtcacccaggctggagtgcactggcacaatgttggctcactgcaacctctgcctcctgggttcaagtgatcctcctgcctcagcctcctgagtagctgagattacaggtgcctgccactacacctggctaatttttatatttttagtagagatggggtttcaccatgttagccgggctggtctcgaactcctgacctcaagcaatctgcccacctcagcctcccaaagtgctgggattacaggcgtgagtcaccacacctggcccatttgtatatgttctttagtgaagtgtgaaagacaatagaatctcaggaccccaaactcactatgccaaagggaaagttaagctgggaacggaatcatgcaaaaactgctttccttttgtttccagagaactgtagtttcacaaccccatgtcacatgtaaaatgtaaaacagaatggcgtatgacaaatgtaaaatgtagatttacagagggttagtcttaactgtttcctggactccctcttttcacatgtaaaacatagatttactgaggctctgattagcatatgagatgtaactataaagactgtagctatctgcctcatggtcctcctcctcctccccttttttctctccttcttgctctttcccccttaaacactgaagtgtcccaaaccccctttggaaaaagcacagctcacaagtgctcctgcggcttgcgtttgaccccaggcacatcctcaaccttggctaaataaacctctgttgattgagccctgcctcaatctctttttggtttatagtcatctctattaaactcttttgtccatttttttaaaagtttttttgagatggaggctccctctgtcacccaggctggagtgcagtggcgtgatcttggctctctgcaacctccacttcctgggttcaagagattctcctgcctcggccttccaagtagctgggattacaggcgcccaccaccacgcctggctcatttttgtatttttagtagagacagggtttcaccacgttggccaggctggtctcaaactcctgagctcaagtgatctacccggctcagcctcccaaagtgctgggattacaggcgtgagccaccgcacccagtctcttttgcccatttttaacagtattttgggtcttattattattgagttgtgaataatcaatattttgtaaataatcaatattttgtagagcagcgcttcatcagacacaggtgtgagggtgcaaccttgaactcatatctaacatggcactctctgccagctgatggcttgcttttgcagtttctcattttgcgtttccttcagcccacaaaacttcctgtaagtttattttggtgcagattggctggcaacaaattctcttagctttgcgtgtctaaaaaagtctttatcgtgccttcgtttctcagtaacagttttgacactttattcacatacaatgtaatgtacaatccagcagcttttagcatattcagagttgtgcaactatcaccataatcaattttagaacaatcttatcacccacaaaagaaatcccataccctttagcagtcttgccttcatttttggaagttttttgtgcttagtctagaattatttgatagatatttttctcagcatttaagaaatgttgttctattgtctcctagcatacatagtttctgatgagaagtctggagtcatacatttgttcctctgtaaataatttttgttcgtctggctgcttttaagatttctttttagcactggttttcagcaatttgattaggatagatttggtagattctgatgtgtttattctgcttgaagttcattgaaatacttggattcatttgtttatagttttcaccaaatttgcaaaatgttcagcaattacttccttaaacacttgttggtctcccttatccacctagatagagaaatagatctacatccacagatccctgaggtgctttttgtgtttttcagtttttttgtctctctgcttaagtttgaattctttttaatgctgtgtcttcaagtttactgatattttcttccaaaatacccaatctactgctaattcctttcaggagattttccacttcggccattgtatttttcatttctacaagtaccagtggtttctttttatatcttccataactctcctattatgttcatatttccttaaaatacttaaacatatttacagtagctattttaaagtcattatttgctcatttcaccattcctgtcatttctgggcctattgctgcagcaggacaagccacagacaaaactcctcaaacaccgagttaaagaaggaaggtctttattcagccaggagcttcggcaagactcacgtctccaacaactgagctctccaagtgcgcaattcctgtcccttttaagggctcacaactctaagggggtctgcatgagaaggtcgtgatcgatcgagcaagcagggtatacgtgactgggggctgcatgcaccggtaatcagacaggaacagaacaggacagggattttcacagtgcttttctatacaatatctggaatctacagataacataactgattaggtcaggggtcgatctttaactaccaggcccagggtgtggtgccgggctgtctgcccgtgtatttcatttctgccttttaggttttacttcttctttctttggaggcagaaattgggcataagacaatatgaggggtggtctcctcccttattgctactgacttttcttctggctttgggtcacattttctagtttccttttattaggttgctgatttttactattacttttaatgacaaaacccacaattacttttgcaacaacctaatacaactagtaattccttccctccctccctctcttccctccctccctccctttcttcctttcctcccttcctttccctccctccttccctccctttctttctctttcttttcctttttctttctttctctctctctctccccccacttctttccttccttccttctttctttctttctctttctttctttctctctctctctctttctttctttctctttccttttctttcttttctttctacagggtcttgctctgttacccaggctggagagcagtggtgcaatcatagctcactgcagcctcaaaatcctgggcccaagcaatcctcccatctcagcctctcacatagctgggactacaggcatgcaccaccatgccagactaatttttaaattttttgtagagacagggtcttgctatgtcacgcaggctgatcttgaactcccagcctcaagtgatcctcgcacctcggcctcccaaagtggagggattataggcatgagctgctgtgcccagccatcaccagcaagttttgattggacactgaacacttataaattttacgttgttgaatgctggatttttaaaaatcttcttgtgaaaagtgttgggctttgctctggcagacagtttatttgcagatcaacatgatcttttttaaaaaataattaattaaaaaatagagatggggtctctttatgtttcccaagctggtctccagttcctggtctcaagcgatcctcctaccttggcctcccgaggtgctggattacgggtgtgagcctccgcgcccagccagcatgatcttcctgaggctcgttttgtgctttggtagagcaggttcactgtagccttcgctctagggctgttttgtcttctggatgagacgcgaccttttggtgtccacactgcatgccctggggttcgacgaggaatctctgccctggacaggactcagatgtttcccaaatccaggaattgtttcgcttgcagcaacctggtcattctctgccccactgtgtgaaattcctctgcgactacagggcttcatatttggtcaaagactccaaggtacctgtgcagttcggcgctcttgctctgtggtgcccctgcccctctggtattctgcccaacatgttccagctgtgcctgcctttctagtcactgtctcctgcctcaggacgatgccacgctccccttgggtctctcccccaaccccacgctatccttccggaaactgcctccaggaaggaagctggggcaatcacaggcctcgcctcgcttaacttgttcctttctcttagttctgagctccagagtctggaaatggttgtttcatacattttgtccagtttcctagttgttgatggtggctggacaagtccagctccagtgactccaatgcgaccagggctgtctgttattattttttaaaataatggattaaccagaggcgatctttcaaaccaactgtgagatgtcaaccctcatctctaagccacgtacacaaaaatcaaacactcggataatccctgggagagagaggtctgactcaggtcacgctacgatgacacagagcgactctccctagacatactccttgtcatcgtcacctcctgtccttagcatcctctgacgaaggttccatttctgtctccggcacacgctgtaaccacagggaactgctttggaaacaacattgaaaacgtcccctgcaaacacggtgtggtgagacagggagtacagaacagaaaacaaactgtttttcatgtttctcttctttgttttctagaaacagaacatttcctctgggaggaacgagtcaggggctggggagggaagggggaggcagggaccacgtaggaaggctcctgctcagccccaggaggtgcaggcggagcggggccggtgcagtcctgttgccgggatgaggacccagtctccgcagccagcacttgctgcatgcttgctctgtgccatgcaccagacccaaagcggggcagcccacccctgccctcacggagctccctgtgaggaggcctctgtatgcaccaagacagaagggtgcagactgtggggcctggaacagcctcgctgcaggatgcagagggcgggtcacgggagggagcaggaggaagaagggaagggagggagggaaggagaaaaggcccagagaggcaggggaagcagaggccaggtgcccacttactcaccggcagacggcacacacgaagcagtcggggtggtaggtcttgcccagcgccgacaccacctcaccctcaatgaactggtcgcagctgaagcagcgggtgccgtagagcctctggtagtccagcgtgcagatgtactcgccctgccgcacgaagaagccgccctcggccaggtcgcagccacatgctgggggaggacgggcgaggtggcgttagcggcagaggggaccatctccacgtcccccaggcccgaggtgcacccccctccacacacacaccaccacctgacacaggcactgaggcctcggcacacacttggggtggcttgctcaactctcggcgggccgggctcctgggacagactccagctctggcccctggcctggtggtgagtggactttccttacagaagcttgggaaagggcactgaccgggacaagagccaggctctcttgaggggctgcccagcctcccaccctcgctagagtgcccccagcctctgtgaccccgccagggatggtccctgagcccctgctgtcctccagtgggctgtttccagcactgggcatacagatcaggaaggggctaatgcctgatcacctactgtgtgctagactctgtgctgggggccgaaggttcccaggaggacagaccaggtccttgtggtcggtgcctccagcccacctctaggcttcccaccccctcccccactcctctgggtctccatgccctcatggccctcgacgcctgtctccccacagtgtgaacaaggccagacctgcaggaggagagagcctgtggactcctgaaagggaagcactttgtctcttttcccaacacacacccggcccaggaagctgaagccctggagctccatggagggctgagggatctctgccaggtagggaagggaacactcgccctcaggacaacttgctggtcaccaccagctcagaggcccccagtccatgtcctgagacccgatcgcattcctcccacaagcttcccctccagtgcccaggccatgcatggtttcagagggagcagcccacagcctcccctgacccagctggcccaggccctccctgctagagtcacagaggaaccccctgcagccccagcccctctggcctggtcagtcctgggtcctgcctgctgggtcaatgcagcttacagccaccaaggaagggctttgagaaaccatgtagccctcatacattttaaacctgacatctaaaagttttcatcacaatgttaattgcttgcaaaggacgtcgtttctgcacattgtgaatatgggcacctttaaagttaactgttacatcattcctttgagggcatccagtgggatatcgaggccaaagcaagaccctcaacatttgcctacaaaacccccaacagagctctgggaacaaactggctggaagcaccagagtggctggaacgcctacattccagggtttacttgtctccatttctccaaagagatgttagctcttctgatatggtgagacgtcaaccgagcagcttagattccagatgccggagctgccgggattcgaatcccagctctacccgcgtagtgtgctgtgtgtccctgggcaagttccttaacctctctgggcctccttgtcctcatctagcacacagaacctacttcagaggggtacacggcagcacagatgagcatcccgtgagccagtgcgatgtgagacctgagtcctgcctggctcagtgtcgaggccctggctgctgctctaatggctgctcctaagaggcccaaggccagagatgctgattctgaattctgtctcaaggtaaaaatgaaaactcagaacgaaatcccatctagatggtctgggagggatgagggcatggtataagatgcctgcactcgctcctcctgggcgttccggggcgtttatgagaaacagccaaggactcccagcatcaaagggaagctccagacaggtgggcctcagccctgggccagggtgcccttgctctgcactccatgctctggctcatgaaaatccagaaggaaacctgggctgaggatgaaaatgctttgtccgatcttgcaccatagcgtagaccaagcaaatacatcccaactggggagaagcagagacttgggggcctcactttggagcattatagtattctgatgtcagcgccacctgccccaagacagtagctggatggtgactgggctcacagcactcatggctctggcatttctgtatttctctattcttcttaaagacgtgacggcgtgagctgttccttgaaggagaaacatgtggcagtggttctggtgccccactccagtgctgtgagtccactcccgggagcaccaggcaagtgagcatgtccagccccagccgttatctgggaggttgctggtcagattctagctgtcctgagtatgccaaggtcaccacaaggtggttaaaacccagacctctgactgggcacggtggctcacacccgtaatcccaacactttgggaggctgaggcaggcagatcacgaggtcaggagatcgagaccatcctggctaacatggtgaaaccccgtctctactaaaaatacaaaaaattatccgggcgtggtggcgggcgcctgtagtcctggctactcgggaggctgaggcaggaggatggcatgaacctgggaggcggagcttgcagtgatccgagatcgcgccactgcactccagcctgggtgacagagtgagactccatctcaaaacaaaaaacaaaacagcaacaacaaaaaccccaggcctctgtgtgctaaaaataaaatgttcaagttccctggtcattttagaaatccttatggagacaacacattgttcttatattgcattttgcaatttatcaaactagcacagacactggcaggaggcagggcaggtgggggtgatgggagcaccatcctttgggcacacgctgtgttcatttacgagaaacaggcaggagagggtggcggctggggggaaaagatgaatcaacatcactttctggaatatcatttggcactgactctaaggaatgtgaaaacttttcccgccctttgacccagcagtccctctcctgggattgtcccaaggaaatgaccatgactgtcacagaaattcagttgcaacaatgttccctgcattatgggtacagtaaaatgttgtaaatagatgcctgggctttagagtcaggcagcctgggcttgagtccttgcttcttccacttcccagctgtgtgaccttgaccaagttacttaccctctctgaacctcagagtcctcatgtgtaaaatagagttagcaatactgatcttgcatggtggctgtaagaaatcagtgagatgaaggcagggtgcggtggctcacacctgaaataccagcactttgggaggctgaggggggcggatcacctgaggtcaggagttcgagactagcctgaccaacatggaggaacctcgactccactaaaaatgcaaaactagctgggtgtggtggtgcatgcctataatcccagctactcgggaggctgcggcaggagaatcacttgaacctggaaggcggagattgcggtgagccaagatcgcgccactgcactccagcctgggcaacaagaatgaaactccatctcaggaaaaaaaaaaaaaaaaaaaaaaagaaatcaatgagatgaggtctaacaagctgattagcccagtgtctgcctggaaatgatgttgacatccaacagtgcaagagtgacgactacatttactgtggggcatgcattggaaggaatttgggaggatattgacatgaatgtgaggaatctgcatggtgaggaaagtgcccacacactaaattgaagcgaacgaatcaggtatacggcatgccttcacattttaaagagactcagaccaggggaaagctgggaggaatatacacccagatgggaacagggaccacccaaggtgctgtccacccgctgctatttttctatattggtgagtggaagacggagatgccaattcacatcaaaacacaagaaaacagagaaccccaggggcctgagtgagccttaacctgggcgagggctccagggctggccgggcatcgcagctccgagtcttggcccagcccggctcaggatccccttctgtgaataacagggggatgaggcagacgtcatctgagattcctcctgccgggactttcacaactctgccatgtgatcttgacactcgtgccctgtgcggcttaggctgtgcggaacaaggagtgccctgggccagggccaaggcccacctgtctagagcttccctttgatgctggaggcccagggctgtttctcataaacgcctggaacgcccaggaagcacgtgtgcaggcatcttgcaccattccttcattcctcccagaccgcctagaacaggcggctatttatagtcccagatggatgcatcctcagggacaactccacctgccttacatgcgcagctcacgggctctcctcccggacacacgtccttccctccctgcctgttttcttggctcttgctaacattgtggacttgctcagttccacttccaataggaccagaaaatgcccgctctcccgagggcacacatgggtgtggcctcatcttttcatcattgcattaacaacacatcacagttaaaacatattcccaaagcacagagctcagccaccctttgaaggccaagtaaaccagatttgtttttccaggcattctgtgctatgcgtttgacgtatttatgttctgcatgtattcccatttgtagagtaaggacagagccagctggatctcaaagacatccagaatgagacaccttcacacccctcatcccagccgccattggctccagcctaggtgcccgcacctgcctctagcctcctcccgactcccaccctggcctccctgcacaagcaagcacccagagatccatggaaacctacaaggatggagcaggaccctcctctgtgtttccttgctagtgtcaaagccacggtctttgcagggatgtagaggctctatctccctaatccccttggtcattctgcttcagccacatgggcctcctgctgtttcccaagcctgcctgcttccgggtctctgcactggctgttccctctggtgggaatgctcttccctcattaacttcctcacctccttccaccaggctttgcccaaaggtcacctcctccgtgaggcccagcctgaccacccagtttgcatctttccttccctagcagggctcactttctagcacatgatgaaatttgcttatttattctttatcatgtttattatctgtctccttgcattagacctggtccccatccccataacgggatgtctgtcttgttcatggctatctcccaaataccctgaacagtgcctggcacatagtaggtgctcaataaatagttattgaatgacttttacttagaaaaactgggttgagacacctgcctaagatccacatgagctgtgggtggcagaggtggaattcgaatgcccaagcctggggcagccacggacaagaggataatcatatgatttcacagattttcccaggtaaactgaggcacaagtaagtgcctgggtagtgggaacccaacacagtaggagctcttgaattgtcttccctgctaacagatcctgctttggctcaactggtaatgtgcccacctgaggacggccatgattgggctaagtcagccacgagccccccgttcctctttgccggtgggggtgaacgtgtgaccgagttctggccaatgagtcatatggggagtctatggggacttcaggaaagggttctcctccctaatgagagggagggttatgcgaggagacaggctttgcctgtgcacatctccaggctgcatgccatgcggtgagaacgtgatgttggagcaacggcagccatctgagaccatgaggagaggcactgctgacacgcacagggtgcagtgtgggagagggaacatttgggcatccatcatgaccctggtgagttgtttaattagccagccctggggtaggggtgtggggctacctccagacttcgtgttaagatgacaaatatccatgttggatatttatgagttgggtcttctttttattcatcccaaagcaccctcaatgattcatacgctgcactctcatgagagcctggagagaagattaatgcaagactgcaaggtcctcatgcttaaacaagtgcagctcatttgaaagcttgcaggaaatcgtagttactccatgccattctccagcacagaggccacccactgaaggcagagctttcccaggagaaggggtggtcactgccctggctgccacatctgcagggccaacaggcctggcacaggtgcctggcacagagtgagactctaactggctgtgggtgggtatgtggtggatcttggcactgggcctgccctcagacccctgctactgctggagtccatggtcactaatcatcttgggtgatggagtgtgagtccccagccctgggtcagcctgccattgacactgtctcatcccatcgcctgtcgctggcgaggaagaggttatggttattcccacatccactgaaggaggctgaaatggcctgcccaggtgacagaggagggggacccggggcagtttccgccagctatgagtccgctgggtcacaggaggtgatgagcttgactcgggtctgatgcattttgctgcatgcccaaggtctgtgcttatggaaatcctttcaaataaagtgcaagcttcccctttgtcttttaaaataggcttttaaaaagaggcatctaatggattttgctttccagaaatgtggcaaatgtatcttcagggagagctgaaaaaattgcaccagctaaatcccacgatgccctggaaagccctaatgaaaagcatgaaatccactagctgcagggagagaaaggccagggtggaggccaccccttctcccaggcaatcgctccctggcgctgacacgccccctttgctttgcagcctgggcgggggatcccgaggctcaggaaggcaggtggaccacctgcttgtttttggaaatgtgggaggatggaggccggccacactcacacccacagctcgtgcactcactcccagaaaacaaatccttccccgcgtgtgccggagagcgtgctgttcacttcgttgttcttccaaagtagcccccagaactgccatcctgggggtgtccctgggtccccccatgaggactgggcttcacgctgcctttgtcagggcagtggtattggggtacctgggatgccagggtgctatggggagaattcactgagggctgagccaggctgtggatgtacagggaatccctggatccaggtgattcttggggcatcaagtgcccccggtgatgtccctgatagtcacccacgtccttggacagagtctcagcatctctgaaggtcggggctggggtctgccttagcccaagggattcagggcactcccactcctgccagaaatggtgcagcccccttggggtcccagggccagtggagagctggctgagctcagcgtcttccctaagtcaccgaccccctgcagggctccaagtgccgcgctgtggcctctgacctcctccagggccagcggcaccagggtcggttctcagatggtccccttttagcagcagaagactctagaccattggttttcaagcttccttttcaagcaacaggactctacacacagtctttagactgcgcctgcagacatgaaccggactagtggacaatgtctgcactccgatgggcagcactggagacagcacctgctcccctcctgctcccactcacacccaggagaccctcaaggcgcctccacagaaacccaggagggaagaccctggcccagggctgcagacacgcctggaatgcaaaccctgggcaagctcctcgcgcttccagacctcagtgtccctctttctgaaacacagtcacatgtctccctgggctgctggcgtcgggaggattcccttctgtctggagcagccttgcttctgccaggcagatttctactcccgaggttctagccagcacgccacctcctctgcgaagtcctttctggagtcttcgaaatccttccctgtgggcatccccccctacacacatatacttggtttttactataaaaagccaccttttcaaatcgtgttgcacaccttacctaacattatctccctcagcagacagcgaatgtgtccatgctaaagcttgcgccttcctggtctttagaacattcaagagcctggcgcacagcagggcctcctagagcctttgtggagcggatgaatgcagcccgcagccattggatgggggccgtgcaacgcctgatgaaaatcatcatgctcaattatcggcttgtggcacatttcctagttttgtttgcccagaaaaaagcaaaccgtcagcgcactagggttcatcgagggtcgttatggttaagcgagtgtgaatctccaaatggcccagggggccgtcataccgaacccgcagaaggcaggcaggcacggggccgcacaccgcagcagggatttgcagtgtccttaatgtgattcctttaaaactgcaaactcctcgggtcgacatccatcaaattggtttgatttgcacatcccttcctccagtgctatttttaatctatttttagaaaattagcaagggcacatgcgttatctttgtataggaaggaggaacaggctggagggagactcggcacaggccatctccgttggccgggcccggttggtggggcctcacgtgattttttttttgttttccttttttctcaacttttcaggatgattggaatttagtagattatttacattattggtttatagtcatagagaaattgaagtgattttagtctggagtaatggtagtgttcgcagtgctacttcgggtgggggtccccgcgtgcctgggatccagcaaaggtcccgcgtgtcccccactactgagttcatgcggctgaccatgaccgtttatttacctgtgtggctacagtgctcaggtggccaccttcctctggccgcaggaccagaattctctgaggctgggtgcagccacacgaggacacccctagggacctggaccctcatcccctgaccctccccaatctggtgatttctccatcacatccacaagtgacaaggctatgttgaaaagatcccactctcctctgaagattctgtatctggagtgttctccagtatcccaggcccaggcagagcttcccaggaggctttgcgggcccaggatcgccgctgggaggcccgtttcaggggccacactgcaggggaccgggggacactcacctttacagacgaagcacttgatgtggaagtacttgtcctgcacccgcagcacctcgcccttgcacacattcccacacgtgttgcacaggatcgccgtgctgggcgacttctccagcgggctgggagcagcctggggctgcgacactgttgggaaagagagaagagcagcgttcaagggtggatgtgtgaggcacaaaggtgagcaaagcaggcgtgtgaggacgcacagctgaccctgccagcgggccccgcacccaccagcacgagccgcacggggcatcggggtcggtctgttgtctccttttgcctggggacccacaggagtcagattatgcaggggttaggggccagagggagaaggtcatctggtcaagccccagtgtgggctcctgtctacagtagccccatgcagggaggggcccgtgcttctcatccacatgcacaactgcggcaatgaggccatcacctccccacctggaagatggcccaaccactgctgccttaacctggcacgaccttaccctcaggggtctcagggacaaggcacccctctgtgagctcagtaaccctcagcagcagggaccaacatcctctcttctgccagtacagcagccacggtcctcaggggagctcacttcaaatttcctctgggtcctgggacatggagctgaatattgctgcggtccccttaaatctcccttaaagccaccacagtacaggacatttaaggagtggatggatggacaggtcaggatggatggtcacagggcctgactgtggggctcccggggaccgggcagggggacacactcctcatccccatcttcccaaagcatctgcagagaccagcgcccaggacagagggccacggcccagaagcctcaggtctgccctttgaggggctcccagtgggcattagggatggccaggtgagcaacagtgaccaccaggtggccgagctggcatcgctttgaagcttgaggaggagttggtagatggaggtgcaggatctggatgtggagctctggcaggcacagagccagccacacaggacccgggcaggacccagctgcccggacaagtggaggcaagtgctggcctgtgagagtgaatcagcgtggggactgaaggctcagaccccagggcaggcacaggcggtgggcaggaggttctgtagctagtgctgcagtcggcagaacaatgctcccaagatgtcccctttctaatccccggaacctgtgcatatgctttctgacatggccagaggggcttgcagttgtgactaagttaagggcttcgatgggatatgatgtgatcgtctagctgagcccaacatcatcacgggggccttaaaatcagatcattatgcggctgtggccagagggaggcgtgactgtggaagaaggtcagggagatgacacattgctggctttgaaggcagaggaaggggccacaagccaaggaatgtgggagccttgggaactagaaaaggcaaggaaaggattctcctccagagtcctcagaagaaaccagcccttctcacaccttgattttagcccagcaagacctggtgggcaccgtgacctctggaactggaagctaataaacttgtgttgtattcagtttgtggtcacttgttacagaagccagggaaggtaatgcagtggtcaacctgtcagataggtgggggacgcaggggcagaggcaccaagcccctcccctctgcattctgccagccactccttgtttgggagtgagagccaccaacagcaaggaccaccgcagtgcggcagcccagggcgggctttcactcggctagggctgcgccccatgccttctgctcatgccaagttcaccccgaatgatctcattgacagactgaacacacagacaatggccgggcccagagaaaggcagagctcagacaacacctgcagctgccggcccaggagtcaagtccggccacggtacccagccgggaagccagctgcatggcagactcgcggggaggcgactactctccctcgacaaccaggaggttaaacaataactcggtcccacatggccaggacttgactcacaactgatagccgtcctaattcgtgcccccgctttccagttaggatcatttggagaaagccaaatacatccctaaccaatcacacgggacgccccccttctgggagccgcctccagtcccccgaggccgacagcctccatgggggctcaccaggagccatcctttcccctcagaggcttcccaaccacttgcctgcctgtgtgggcaactcccttgccacagcggctctgagaaagttgcctccacttgtcctcacgtcttcctttatttccacagcagtctaacgccagctccccctgtcttggtctgggttcccatgaagccggccttgagaccaggctgtgggtgcgatggtctatttcggggaccccaggcaccaggccagagcgaggagtgggaaagatgaaagctggtggcaggtgtgttgttgagctgctccccatgtgggagagggaactcactggggccgtccaggaaaccccgcgtagcatgtcccagctcatcccgtggaaggaagggaggccgcggcactggccccccaccgcctgtcccctgagtgcaagagctgctccaaggcggaactcccagccccctcttctggtctgcctggcgtataggctgagtgagtttctgaggcacagagccaggggtgctgcagatgccagggctgggcagcctgcaggtgatggggcatggcccacctggttgcagtcgaaaccacaggtgggccgagggatgtggcacaggcccagaaaacacctgccccccttcatttgagggctaagcgtattcacgcacagacgtactcactcacatctatttacccaattgctaaatgccagcgctgattgagctctgagcctggaaggtctcctcatctccctggtaaaaatcgagtgactgcatctcagacagaggaggccatttccccatccagttccaacctgcccctaagcgttcccagaaccccacatcccggaagccaccgatctggccacccatcctcgcctagggtccctgcccacggatggaactgtgacaggacagcgcaaaggaggaacctgggtcatgctggggccgcaggtctttccaggccaggggttccaaacagaccaagggcggtgggtatcagctgtctggggatgagggagaggggttggcctgggaagcaggcatgggaaaggagatgaatggcatgaaaaataactcagcatcaccctgggcctgcctccggttttgcaaactggacggggcacagcccagtgagggtccctgtgggctcagtctgcagccgctggaggccaccgtggcctttctcactctggttgaatccacagcaggcttgtcccacgcgccttttgcctgcggagtcattgtagaaaccacctcatccgttatttaataaagatggtggggagggtacagcaggtgaaggctttctgggctggaatcgaagcctcccagtgcagaacgaggattagaattgtggactgaacttcaaatggtgcctctctcggccacgcatggcccaggccatgggggcccctgtaggctgccacacgggtgatgcacccagtccacatctgaggctcagtcagagctcacaggggtgggggccgtgcatcttcaagacgcttatgttctcatctattggcaacaaagagaaaaatgcacaagcgtctcttcatgatccgacaagggagaggttcacgctgctggaatctggcccaaatccagcctgagggaagtgtcagcttcagattcccgggggacagcgcgggtggtggggtcagctggcctgggatgcaggcttagctggccttctgcatgctgtgacctcaggtgaggccctgaaactcctggtcttctgtctgtgtgtctgtctgtctctccacccaggcatccatcttcttcttgtgttacctggccccaaggatgccaggaccatgagcaataatgttcccatagcaaccaacccagcaaacaacaagtgctcaatacacaattgtcatggttattttcaagaacactggcctgacatcactgtttccaggtgactggaaatatacttggtcgggggtggcgggggtggggtgtgggggtgagggttgagggaagctgctaagagcatggatttgcttggaggccccaatctcgcctgctggggccgcctccgaggcgtccgggggctgcagggtcatggcggaggcgctgccctctcgcgatgggagatagacattgcgccgtggggacgccgctgcctccatgcaggtgccgctcctacaggcttccctccagctggcccttcctgccaggccctgggaacacaggtaggtaagtgggtatgcgcttgcctcccaagagggttcattcctcacctggctgcagctgccaaattgtgaggacggctaggggggcaacagccaaaccatgcaaaagcaggggccaagtggcattctctgttcccctaaacctggcccaaagtcagccacgtgttttacattaaaaagagaagtttcaagtggtccttcagcaggtgaatggataaacgagctggggtgtatccagacgatgaaatattattcaccaacaaaaagaagcatgccatcacaccatgagaaggcatggagggaccctcaatgaatactgctagctggaagaagcctggaaaggctatgccctgcaggattccaattatgtgacatgctggaaaaggcaaaatgaaggagacagtaagaggattgatggttgccagggctgggatcaacggagcacagggcgtttttagcagtgacgctgctctgggcaatactgtaatggtggatccacgacactgtacatttgtccaaacccatagaacctataacactaagagtggcccccactgtaaagtatgaacttcgcttaagaatacatcaacgttggtacagttacaacaaatgcacctcaccagtgcaaggtgttaatcatagggaagatgggatgggagcacatcggaactctctgtgtcttatctagaaaccaagagatgctctgagaaataaaatctatcaaaaaatttaaaaattctaggccaggcgctatggctcacgcctgtaatcccagcactttgggaagctgaggtgggtgggttactgaggtcaggagtttgagatcagcatggccaacatggcaaaaccctgtttctactaaaaatacaaaaattagccgggtgtggtggtacacacctgtaatcccagctactcgagaggctgaggcaggagaatcacttgaaacccgggaggcagaggtcgcagtgagccaagattgtgccacagcactccagcctgggtgacagaataagactctgtctcaaaaaaaaaaaaaaaaaaaatttaaaaaggaactaaccacaattgcggcaggttcatttcactgcagtttcaagattggctccaataatttggcttaacaagtctctaactgtgataataacatagaacataaactcaagtgctaagaatctatcacacaggggctgagagtatttaatccctcatgataatgaaaccccagccttgggaagccccaccgggaataacaaaaatgattgctggtgtcgttaacacacaaccttcacaacaaagggacgtggctctctcaggaaatccccctgcctccccctccaggctgaactcctggtctgccaccagccagccagaatgggagccagcagggtccggtttggacccaccatccaggggcagcggtgtgaccttggtgaatggatttaactctgcaaagcctcagttttcacatctgtaaatcagggcttgatcttaggaggatgttttaaatgtccattgaagtagagaaagctccacgtgcaaggtctgacaggtggccgtgaacagtagctgttagctgaatcctctccaaggctcagagaccagacttgcaggccgcaggatggaggggtcagatcaggggtggctatcagaaagaggaaaaacgatgactctgaggtctactcgaggtttcccagtccagagcgggagtccacaagcattttcaggaaaaggcaagacagtaaatacagtgtaggccccagggacaccacagtgaacacaacagccacggtcccagccctcgacattctcttgtttgttccataccatgccccacaggaatggtcagtcatcctcatctcacggatgaggatgccaaggctaggagatggtcacacggctaagagactgaggcccagctcaggtgtgtccgaggctcctcctcccaccccttccatcacctgctgggctgcaaaccatgtgttcacttgttcaacagacacgggagcagacgcactgtcaggtactggggagagaggtgtgccattcagcaccacaccagcgtgacaggcacaggaagagggacatgccaggccaaaagggcataggcaggggggcaaactcctctttctgtccagcgaaccagctctcacgacccagacagcagagtcctcatcattccgtgatctctgggaatcttttttcttctcctgaggcagggtctcgctctgtcaaccaggctggagtgcagtggcgcagtctcagctcactgcagcctcaacctcccgggatcaagccatcctcccacctcagcctcccgagtagctgggaccacaagtgtgtgccaccacacccagctaatttttgtattttttgtagacacgggatgtcgctatcttgctcaggctggtctcacactcctgggctcaagtgatcctcccatgtcagcctcccaaagtgctgggattacaggcatgagccaccgtgcctggctggggatttgcttgactgtttatttccgatctgtgcccacggatctatatttagttccacccttctctaagggcccagtgaactttggacctctgagcatgtattcctggtttggccaaagaccagcagctgtgctcgccttgttctcttgctttcctcatttgctctggaggtaaatccaccttgagaatgggcaggggacccccttgtgtactcacacaggggaaaacttggggtccacccatggcaggggttctcatcggaggcccgctccatccgccaagatgatttcagaaagctccccgtctgctgtttgtatcatccaaacggctggcttggggtttccaaatgtcctaaggatgttctaataatattcagttttctaagcctacacacgcacacatgaactccagaggtcccggctcacccagagcgggtcacaggacacacagttccagcttccctttcacacctttccttctgaccatggcaacgagcagagcaatacagagaggggcacagggctgtgtgcaggcacagcagggagatgaacctgtgtacaatcagggagggcttctgggaggaggtgacataaactagaagctcagaggatggacaggcaccttctgggacaggagcaagcacacatcacagtgctcagctcaccttcattgcggcacagccctgacacatgggtggctgctgtccactggcctgcctgcctcccctggcctggaagccctcatgggcgggggctgtgcccgagggatttgtctccctagggccaggtgctgaggagaccagagctgatgctggccctgtgctgatgtgtgctcagccagtccttgccgggagacaggcatggctctcacacaccatggggccacacacaccctgtgccagctctgccctggggcacagggctttctttgggctaattttatgaatatggaattaaagcgtacaggcacgcacactttgcatcctcatggatcctgccacactgtcttttcggggacttacaaacccccgcccgtgccttacagtgtgtcccctccctcaggttctcactttataggtcatgcctcggtttaagagcaggtccaggcctccctactgccccgcccaagtgttacttgttagaaaatcatgccggatcacaggcgggcacttccttcctaacctacttaagggctggctgctgattataaccatgaaccgaggacgctgctctctggagccggccccattctcaccacggccatcactgcctgggcttggcaagggagctctgcaggtccagacagggcggccctctgttcaatcccccattaagcaaagatgcactgggcactctctccttgccaagagctaggccagcaccgggccgatgttgggcagccaccgccccgtccccaaacagtcaccagacagttctgggcacaagagcacacaggaagctcatggtgccagtgctgtgggaccccaggcccagggacactcctcccggggcccacccagctttatttcagtggtgacatgagacacctgcggggcgccctggaacgcccaccaggagacgacctggccctcttccagttccccaggagtgcagtctggcttctcccatctgagtccttgacctgcccatggccagaccacgggtccctgaggaccgcaaacagcttggctctgctttggggtcctgaggatggacgcagggcttgtgtgcagatgtgtgcagatgaaactgattatgggaaaatacctcaggctcctgacctccacatgcccctctcagcatcactgtcaccccaaactacgacctcctgggatgtcatccaccctggccctcagtgccctgctcagggctggcccggacatcagcagccaaactcctctttctgtccagcgaaccagctcatgaggggaatcacttgagcccatgagccactcctcctttcgcgcctgcctgctgcacagaacacatcctttgacatccatctcctctgtagggccagtgggctccatgcctgctgggctcacctggaggcccagccccctgccagtgcctgaaccctaagatgtgcttggggaacaggatgaacctatgcatctcactctgacccgcaaccaccttcccctcagcatgtgacagtagcatccagccatctcagcacctcccatggtgtccttctggaagcctctgagcttatccctctgagctccccacgggctgtctgagcaaagccctgtggcatgctgcatcttcaaaggtgacgatcacaacaaccgttcttacatgctctcctacaacactatgtcgacccttctcctattacctgatggggtctaaagcccctcaccttgaacctgggtggacctctgcaactgctttgaccaaaaggatatgacagaaaagacaccaggcagcttccaagctgggtcatcaagtacccccagcttctgccttgctttcttaggatgctcattctgggaacccggcggccatgctgggacgaagctcaaaccactccacgctgtgaccacgcatggagcccacatgccgctattctggcagaaggaccacagaagtccccacggatggccagcaagaagtttcagcaaagacgcctgtggaggattctggctcccagctcttgagtcactctcagcctttgggtcggcccagtgaaaccacagacattgtggagaggagacaaggcatacccactgtgccctttctgaatggcagcccctcccaacccgtgaatgtaacaggatgtttgtcttatgccactgaggcttggggtggtttgttaggcagccattgaaaaccagaatgccaccacagtgatggccccagacatcaaaagacctctttgcaaagcttttgctcacatcgtttctatgcagctctctctgtgcatgccccccaagggcaggaaccccatcccaccctgctgagaagctccccctccaaacccaaggctggccacctcctcctcactctccgatcccacttctgctatcgcacacatgggcttacacaagatgcccaggaacgggttctctaaatccgtgggtttccacttggggaccctggggattttgcaaggggtctgtaaatgcatttgcacaccatgattgtctgcagacaaatggctccatctatgttgcacatccggggactatggtttccagttgcaggtagatgctcaagggatttttaaaaaatgaaggctgctagaaagtgttacaaaatcctcagttgcctttgttactgaatagttcttaagcaaaataaggattggatatagcacgaggatgtgagttcattgagaaaggggtcttcactctctggaaggttaggtggctcataacacagatcacagcagcttccctgctctggagaaacagctccaaaaaaaatactaggtcccaaactgttcctgatctaatttctggaacttgcccaccaagcaaaaagttaggtttgatgaggatagcagtttatagtttacaaataagccttatgcattttatctctgctcatacaaaaactccctggtatagacagtaggagaggggactcagtggcgacgcctggtctcctcaccatctctgcacagcctggctccagacctctctagagacagtaaagtcactttctccacagccaaagtcccaagaggaggcacttgccgttttgatccaagaagggaaatgcccttcaaatcctggcgtgaccttgcctggaatcttcacagccactcttggaggtagatattcttttgcccatttggcagagttggaagcttattgaggtttagtgaccagcccaaagccacaccgtgaggagtggcagagcaaggattcaagcccaagtctgcctttcttcagctacccatttccaaagaaagctgcgactaaccgatttgcagcccactgcccctgcccactgcaagtcacacctacagactccacccaccacagactccacccacagcagattctcctgcttcaggctccactcaccagactccacccactgcagactccacctaccacaggctccacgcactaagactccacccactgcagactccacccgctgcagactccacccaccacaggctctactaagactccacccaccagaggctccacccccagcagactccacccactgcagtgccaccactgcagccttccttcctctcagccttgcctgggatccacccacttttcctctggccccaaagactgcttcttctcccataccctgtgatcatcattctcctaggctcgaccgagaagacctaaccgtactgggatgactttattatctcctgggcatgtttccagaagccagctccgcttactctaaattcaagcagggtgtcctggccaattcccatgtgggcctctctcctatccccccacgcagcgtcctgttggcccagctgctcactgtgggaagagatgatgggttgtccccaccccagtgatcaactgtaaagctcaggacagttcaagggaatcaagccccacattctctgggcttcatgcaggacatcacagccaaacacagccccaggaagaggagccctggtgattttcagaggcctgtgttatgatccaggccagccctgctagctccaggccacattctcccaggaaagtcaccacctctggagcctctccctgccatctgcgcaggaaggctgcggctgtactgagcttttggtggtgtggtgagactcagaggccgaggctggaccctgagcccagcacacagcatgagctcaacacacgccagggcttagggatccttgcacactgactgccatctggggagacgccagaggacagttccagaagagcactccacactcatgtctagaggcccttgagagctcaggcaggagctggccccatgagactcgtcctccaatcccacagggttgtagggaggcctctgtcttgctggaaaacttggggtaggtcccttttccctccagcccagtttctaatctgagtcggcctcactgcgagggggccgtcagcatgatggagtctccaagacaagctctccaagttggcaaggtggcaagatctgggagggtggcctccagcacaagctgcacccctctgcttaggtccctcccccattcaagaaccttccatggctccccacagaacacagcccagcccctaaaccagcactctaagcctggtacccacctggttgcctgacttcctcactgccctctgatcccacactctttcccaaagttgtcctcgatagtcctggcaccagcctgggctcccaccattcctgctccggggagcactgtgtgcccatctcacctgggaagaccctacttgtccttccaggcccacgtcaaatgccccctctgtaccgacagcgtattcacagacaatgattcactcttgtgctgagctctgcactggaggcttcaggacctaagcgcccttctttgcaccctaactttaagaaaattgtccttattttacagacgcaaaagctcaccaggtgaggggatctgtctgttgtccacctgggcccactgatggggtgaccttgagcaagtcagggcacctctctgaaacaggacaagcctctggctttgtctacagtcccatggtgccagggatcctctagagacctgtgctgggcctggggaacaagtggcccagcaagcctcaggctgtcccaggacacttttgtcctggcacgatcactggtctcaaacgtgtctcagggtggggtgtggggctgaagagagccccaatctcacttctgaggtgaggtgagttggggatgctgggtatggaaggatctagaagcccaaaggaggctggagagggcgtgtagtcttgtggcacaggtctcgggcttccttctttttttttttttttttttttgagacagagtctcgctctgttgcccaggctggagtgcagtggcatgatcttggctcagtgcaacctccgcttcatgggttcaagtgatttgcctcccttagcctcctgagtagctgggattataggtgcgtgccaccacaccgggataatttttgtatttctagtagagatggggtttcaccatgttggtcaggctggtcttgaacgcctgacctcatgatccgcccacctgggtctcccaaagtgctgggattataggcgtgagccaccgtgcccagactgggcttccttcttactaaacaatcttaaaatcaccaaagaaaatgattccattttcttgatactttgcacagtgctgcaaataacagtgacactgtcttttaaaaaacaaacaaacaatcaaacaaacaatttcctcttgggccctggctcgagggcttggttgcttggaccctttgtgaagttggggcttttgcgaggctgaaactccactagccctgagtgagcctaaggggtcaggggaggggttcccagcccagtgggaagagcagacccttcgcctccgctcagatctggggtgcgtgctcaagtcctgcgggtggaggtgtcctacagctccttccggcatgaaatccctgtgatttccctattttgaggcaggggtccatgaggacaaagtcactcttggccacaaataggctctgttcacagagcgacaggcacagacgtcgggcggcagggtccctggcggcccccagagcctgagaggagcctctcctctgggaggcaggaagagaaaaacagcccagcggccacgctgccccttcctcccagaagaggacgtggcaggaagcaagagcggtgccagcggggagctcgagccatctctgtgggctgaaccgggacccccagatgcccacgttgaagtcctaacccccggacctcggcaagtgactgtgttcggagacggggccttcaaaggtgtcgttatggtaaagcaaggtgatctggagggtgggtcctcatccagtctgactggtgtcagaaaaaggggaaatgtggacacagagacaaccccagacaatcccccgtctgtgtgttttgtcgtggcagcatgggaaaccagagggaacccaacatgaagacgcgggagaagatggcgacttagatgccaggagaggggccctgggacgggtccttccttgcagcctcagaaggagccagccctgcccgcaccttgatctgggacttctggcctccagaactgtgggaggatgcacatctgccagtccagcccccatctgtgtgctctgtcgtgggagcatgggaaaccagcaggagcacttctcagcttacagtgcaggtccgtcctgatgaacccggggcaagctcgtgacatcactaagttgagacttcactgacttcacctaacctagcgaccatcacagctcagcccagcctaccggaaacatgctcagaacacctacgccagcctacagctgggcacacacatctaacgcaaagcctgttttataatacaatgttgaccgtctcacgtaagagtactgtaccgcagattgctagctcagagaaagatcgaaattcaaaattcaaagtatggtttctactgaatgcatattgtttttgcaacattataaaatcaaaaaacgatagtccaatcatggtaagtgggggcctgtccacacgccatccctgcaggtgggaagagccagagctggcctcagagcccagctggggactggctggctccctggtcacttccccgagcctgttttccatctgcaaagtgggacactgatcctacccaaggctgggcttttggagaacggtgatgtgacggtgaccacacggggctggcaggagtttgtgtgagtgtcaggtgggggcttccttccaggggcagagctgggagagacggtactgggcagccacccccgctcaggctggctgtgggctccgggcagacgccagcccagctcctgctgcttccaggactctccaggcctccagtcgctggcccaggcgcccccggcacccacattcctggagggtgttattccatcaccagaagagtgcagccgttccagagcgaggagcatctgaggagctcatgggaggtgtcccggagggtcagggctcagagcatgtacactgactcccctgccaccccccacacagaggcagacagggcggcccagcccaggtcacgcagcaagtctgtggccaggccaacaccaaggctcgggtctgcaggctcccagcccagggcttgtcccccagggtctcattgccttgagccagagtggccacgctggtccaacaggtgacctcctctaggccttcagcgtacagcagatgcccagtgaatatttctcaaatctaataggaaacaggaaatgcgctgagtgactgcagggcactgtccagtggatgggggggtgatgatgaataacccatgtcacatcatctttcagttcctgtgtccaggcaaacaccagggactgcactcagcacctccacccacaacccaggtcacagagctgcaaatggcaaaaccacacagttgggcaccggacccagacctgcccagacctcaagccagctctcaactccctctctgggaggagctgaggggctgagctagtcccaccagggaccccactctctctccaggcagctgctgtggtacatgtccccagtgcagggacctggcaggctaggggacctgacaatatgcccccaagcatatactggccacacctcagctgcaacccactcctccccaggcctttgaagatggggccacagccttgacctggagacaccacaccagcctggatggggagtctcgctgccccctgtgcatctccatcatatccgaatggcctggtaaggatggccacagagagctggagaggtcccccactttgtcctcggctcccatcctccatttcccaggggacaccctctgtcctggtccatgtgggctgccagaacaataccagatgtggtggcttaaaagactgacacttatctcccacagttctggagcctaagagtctgatattagggcagcagcatgctcggtccctggtgagggctcccttcctggcttgcagacagccgccttcttactgtgtcctcacaaggcagagagcgcgctctgggcaggagtcccatcatgaggaccccaccctcacgacctcatctaaaccccatcacctccccaaggcccctcctccaaatagcgtcaccctgggggtttgggcttccaagtgtgaatgctaggggaacatgaacattcacttcttaacaccatccactgtcagaccctacatggtacttgccactttagtccacttgccactttagttcttttcatcctgcacagctgggacctgtcctctcttcaccatttacggatgggcaaacagaggttccaagcaggaatgcacctccccaggccactgggacccaggcctctctgaccctggccttttccaccatgccccaccgcgtggatgaggggatgggagagggagaggggtgaggggcgaaccagccctaggggtggcaaatctgtctgggacctgaccagtgtgggacgtcttcccggaggtcgtgcctgcctcccctggcgttcccactctgcaagcctccttcctatctgctgctgctcttcctggcatgaagcagtcccctgtgcgtggttaatgccctcaaagcccagcactgtgtcccagcactgctggaggaagacctctttgcccgggtctggactccttaatcctaattgcggtcctcagagcattcttccctggcagctggtgccccttacttggggtctctaatccctgcctggccctcccctgtgcaggcatggtgtgggcacaacagcaccagccccatctccaactggcatgagaggcgttgtcaccctcaggctgcaggcaagggaaccccatctcagagatgctcagtaacctgtctagatcacacagccttcaactggcagggtggggcctggagcctgggcctctatgtcagggaactggttttctgcctgtctgccctcccgtctccccctcaaattcctgacccttctcatgttctcctgatctgctgattcaagggaggctggtgtgagggaagcatttccggcatgtctaattaaaactggtcgtcgggatggctggcctggagcccagggaaagccaggccaggcaggggaaactggctgcagaggctctgtgacattcactaaccacctgcatgacagaggcagccagcccctgccttaaagcgggtctcctgggggcgtcatccttgtactgacagggtccggctcacacaccaaagcctgtgggtctacacatgggcaggcaggggtgtgccggcattgggtcacacagcccaactggggtgacaaggtcctggctccacccggacaggccaagaggaggggcaggaggtggcacggggtgggagccctgcctgggatccttgctaacctctggagacacggttcctttgggttcaatgacaaaaataacttcattttgatgacctaaggaatgctactcatggctagaaacccaaacagtacatcaaagatgaaggaaaatttaaaatcccctgcttcccttttactgagacgaccactcttaacagctcagcggctgctctaccatgtgcttctgtaggccacaaacaaaaaccacacactctcacacacctgggacatatgatatgacatcacaacctagaataattcatctatcttctcataaggcagcacctcgatgtgctttcagaaacaatattctcagcacctccacagagcctagccagctctgcagaagtgctcggtgcacacatctgaaaatcataacttcattgagatataattcacatagccgtacaatttgcctgtttggaatgcacactcaatggcttttggtatttcacagagctgcgtgctgatcaccataatccattttagaaaatttccatcaccccaaaaagaaatgctgcatcctttactgtcactcccgttttccctccgcagcccctggtaacaactggtctgtctctgtggatttgcctgctctgggcatttcatgcgaacggaatcccacactgcgtggtccttcgcgactggcttctttcactcggcgtcatgttttcagggagtgtccgtggtgtggtgggcgtcagtgcctctttccttttgatggctgagaaatattccgttgtacagacagaccctatttggctcatccattagtcagtggatgaactttggggctgtgtctactttttggtgattgtgaataacacggctatgaacattcgagtgtgaatattcgtgtggacataggtttgcatgctttttgggtagatacccaggagtggagttgctgggtcctgtggtcactctgtgtgccacctttcaaggaacagtcagactattttccacaccgggttctgatttctacgcatccccacagcctgctctgggtgtgcctgcgattttgatccagccattctagcggatctgtaatcgcgtctcactgggattctgatgtgccgttccctgtgggcgaatgatgctgggcatggttcatgtgtagattctccctctgggagtcttctttgtaaaaatgtcgatgcagatgctttgcccatttttcagcttggttgtcttgataggattgagggatgagagttattcgtatattcgagatacaagtcccgtgtcagcttgctaatttgcaaatattttctcctattttgtgagttgtgttttcactttcctcacgatgtctttggcatcacagaggtttttgatgaaatccagtcgtctatatcttgttatgacggcttgggctttggtgtcttttctaagaaaccatcgcctgatccaccgtcatgaagatgcgcttctgagtgttcttctaagagatttacgggttttttggttttactgtaattttacatgaataattttacacaaatagaattgcatctatgtgactgctagttttaattgtggatacccttgcttcgcatgtgaatcgcgatctgcagtgctgatggccgcaggtttgcctggggccttggtgccagactgcttctgggatggctctgccatcagcgttgacggtctggtccatctaccacagtcgatctgcagtgctgatggccacaggtttgcatggggcctcggtgccggggctgcttctgggatggtcgtggttggctctgccatcagtgtgacggtccgtccagcacagttgtccacagttggtggaagcacagtgggcctgagaaggcatcgcagactcagctgagctggagaggcccgcccagcctctgccatggaaactccatctgggacacggacatcgtcacctgctgtctgctctgggcatccacggctgtcctcagaatgctccagcaccccagccatgccagctcgtcctcctgggcaggagggcgaactcacactcggctgtgcgtgggcagccttgggggacccgccgcttttgggaacacacctgcatgtctccttttttggttcacaacaccctgggagggggaagccacacagccaacccgctttttctgggggcctcatgggcagggcagtgtctcctccaagccccacggtgaggtcaggcagaatcagggctcgaagcttcatgggttggactccagggccactgtcactgcctgagccagggctgctcccttcagtaacattccacggagtttcagagtgtgaggcgctgagggggggctatggacaagagtcccagttcctctgtgcagggcagaacccacaggccagaaggagggcaccagggagggaagactctggtctggctgcccagagatgaggccctgctgggcaccaggcctcgtgcccacacagagtggggaacatttcagggggaggagggagccgctggaggccctggcactgtgtcaggccccctcccctgtgtaccccctgctctgcttccaggggtctgggctgcctccccactgttctccctcccctcccttccctctcccctcatctcactccccctgcctcccttttctcctctctccctagccccccagattttgccatcaccttcaccccacaggccgcctggtcaacacgcaggattggagctattggaattgctggttgttcgtatctaaggagcttgatgggccctgtcttttatgttaatatcagggaactgcggcattcatgctgtcccccgagcaggacaccgggccaggcaggtgctactgcgtggtgtcctgtgcaccacaggacgctcagccgtggcctgaccccttcctgccagatgccagaggcacaccctcctgagctgtgaccatcaaaaatgtctccagatggccgggcgtgtggctcacacctgtaatcccagcactttgagaggctgagatgggagaactgcttacacccgggagttcaagacccacctgggcaacaaagtgagaccccgtctctactaaaaaaattaaaaattagccaggtctggtggcgtgcaccttagtttcagctacccgggaggctgagctgtgaggattacttgagctcaggaggttgaggctgcagtaagccatgttcatgccactgcactccagcctgggtgacagagtgagtccctgcctccagaaaaaaaaaaaaaaaatgcctgcagacattgccacatgtccccctgggagcacaggagcacagctgcctgtgggtgagaatcaccaccttaaaggaaaaaagaaaagggagggagggaggcccagacgctgtggtcagtgggtgctggagtccagacgcagctccgataccagcaccgtgtgaggttggatcagactcttcccgtccccagccttagctgacctgtacaatggggtcaccctcctcaccccacagtgctgtccatagagagtgtccccgaagcctgcacccactggcgctcgtggtgccggcgctcatgaccttcacgcagggcacaacttgactggacccgtcctttcccaccagacccctgaagctgattcatggagctcacagctcccagtcccctgaagctgactcatggagctcacggctcccagccggatggtctgggcaaaagcgcagtttggggatttacctgtgtctccccctggcacccccatggagcgtggctgcttgcaaagggccagcgggtcggcggctctccctctgcgtggctgggcctggcacccacggaggatcgggcaggagtggaccggggaagagcctctgtggcccacagggctcccacaaggtcacgtggcagctgccaccctctgcccggggaggggcagagccaagcccttcccggcacactgaaatagactcccgccacactatgcgccagagacacacctgtctcccaggcatccgggaaaggggctctgaaaaggcactcggggtgggggaggagtggtgggggtggggagcatctgctgacccttcctccatgtgtaggggcagcaatagtgagctcacaacccccacagccccgcgtgctgggagtgacagcctgcaccagggttccctgaaatgggggcttcaaacaacagatacggattctctcgcagttctgggggccagaagtctgacatgaaggtgccagcaggaccctgctcttcacaggggtatagggagctcaggctgcctcttcccgctgctggtggctccaggcgccctttggtatgtggcttcagggctcctgtttctgcccccaccttcacaggccgtcttccctgtgtgtctctgcgtgtcctttttagtctcttatgaggacaccagtcactgcatttggggtccgccctcatccacaatgacctcatctccatctttaccataattacatacggaaacacccaaacaaggtcacattcagagcttccaggtgggtggggccacaagaagacgtgtctctatctagcgaatcagagtccagcaccccgtcataggatgcgttgcacctgcacacccagtacagctgcctgcagctcgcaaggcccctgcataccgaaacatggctagcaccacgcagaacagagttttagattttatttaattttaattcaaccaggggacctgctggttaccagatgtactcccaggctctaaaacacgaatgcactaaacctccagtgaccttgcacagcaggtctccttgccctggctctaaggcaggaaagcgatgaagtcattgtctagcccaaggccactgccgtggattgaatgtggtgtcccctccccagactcacatgctgatatcctaaaccccagtgtgacaggatttggaggcgggacctttgggaggaattaggtcttgcaggtggagccctcatcatgggatgagtgcccttgtaagaagaggccagaggctgcctcgctctttctaccacatgagggtgcgaggaaaaggcggctgtctgcagctcagaagagggcccacccagagcccgaccatgctggcactctgatcttggacttccagcctccagaactgagaaaaataaatgtctattattcagaagccaccagtctatgaggcttcgttgagctgcaccgagaccacacatcctacctggctgcccccagctttcccccaactgggctgccagcacccccataggttgtgcccatccaggaacctgaggctgggggcagaggccctggaagaccacacatggtgggcttgtctaggcactaggggcaggaaatgtttccttttaacatttccccaagcttttgacatttataatttgacatcagaggaaacactctcaatgccatctttaagggaaaaggaataaaaagcagaaatacgtatgccccgccccctctgtgactcactcaaatcccctgcacaagtgaatcagaggccagcaccccatcgtaggatgcatcccacctgcacacccagctcagctgcctccagcttgcgcggcccctgcgcgcccgaaacacggccagcaccatgcgaaacagagttttagcttttatttgattttaattcattttaatttaaataaacacatgtggccagtagctaccatattgtttcatgcaataagactaagacacgctgtaagacaggtgtttaaagatggtgtttctaagattcagggagaaatccggggcacagaacctgaaaacttgacaccccatcccaaagcccaccacactgtgctgtcatcatgactgtgtttgcaagacaagtatatgcacagatgagtcccctgcggacacacctttcagcagcagccagtggggctgggagcagagacaggtatgctccctctctctctctctctctgtggctctggggccctgggagggctggcgttgagaagtgtcagggctagaagaggccataatgatcaccggccaccccctccccgccattgtacggatgggagtgcaggggcagtctggagagttctgtacctaatcctgagaggagacctcttccatgctcagagacactggggagccaactgcaccagcccaggacgtgggccagggaggctgctggagccaggcttctgctagtcagcacagctggtgccctgcgggctcccagcactcagcactgcctggggttcccacggagaaggagcctcagattcccctggcctccagcctgctgttcacccctaagcatctagtttattcaaaggcagcccccaagaaaggccctggtggtctcagcctggaaggggaacactcaagtcttgaaggaactcagccagcaggtactgatggctcacagggccagggatggagacgcagggtggccagggtggtgctggatggctgaggcccggccgcatctgtcaccagttccgggatggcccatgctgggaaacatcacgttgctttgaggccatcatcttaaggggattctctgtaatgttcaggagagggccatgtggagaggttggccttctgagtcctgcctgggccctcagggtcctcttggctcaagaccaacaactgcaggggctatggcagggagagtggacgccggcgccgggcactgatctgggcctttccacagctttttagaatatcaagttgtctaagcttccccgagacactgtgaggtggcgccacgcttggccccgcattactgggacttgaagggaggcagcctggcccgagtccagggtgtgcttgacggcacccaggggagcacagggtgatctgacctggcctggagggagcagaggggcttcctggaggagggggtatcaaagtccagctgtgagatggaggaggaattagccaggcccagggaggggagagacggtctgggcagagagcagtacaacaaggacaggaatacaaaatcggtatcactgggctgatgtcaaggcagccccaaggccgagctccccgaaggctctagggcaggctgtccttgccttgcctggctgctggggcggcctgcatttcctgacttgtggacggcaaggtggccccagggctgagctcccccaaaggctctaggggaggctgccgttacctcgccctgctcttggggcagcctgcatttcctggtgatggcagcatcactccagcctctggctctgtggtcaccccactctgcctctctcttagaataactgtgatggcactgagggcccactcagatcatccaggatcagctccccatctcagcatcctggtgtaagcccatctgtaaagaccctttttccacataaggcaatattcacaggtcacagggatcaggacctgatatgctgaggtggggcacaatttctcagccaaccacatgcagcagcagcttaactgatactatatgtaaatggcgaacaaaaaattcacagaaaacaccttcattccttgtgatgtgctctactattttctactcaactcaccttcttatataacgcacactgctgcgacccactaaactgatttcctgccagggactgggtcgccacctgcagtgcagaaaattatatcctaacctctgcagctgcatcctgccagggtggggaccgggacgagaactatgatgactttagtaaaagagggggatgagctgtttctgcatgcggagggcagatgggactgacaagggcctgggaggacccccgacccctccctgactctctcacatgctctcagccaccctctgctggcctgggcacagaagcctgcatccctgagcacagcagcccgcatccccagcacagcatcccgcatccctgagcacagcagcccgcatccccagcacagcagcccgcatccctgagcacagcagcccgcatccccagcacagcagcccgcatccctgagcacagcagcccgcatcccctgcacagcagcccgcatccctgagcacagcagcccgcatccccagcacagcagcccgcatccctgagcacagcagcccgcatcccctgcacagcagcccgcatcccctgcacagcagcccgcatctccagcacagcagccagcatccccagaacatcagcctgcatccctgagcacagcagcccgcatcccctgcacggcagcccgcatcccctgcacagcagcccgcatcccctgcacggcagcctgcatccccgagcacagctgtgccggccgagctcaggcctcggggtgcctggacatccctccgtggggtgtggtgtactagcgggatggctcaagtggcacaggaacgacctggttggaaaggaaacagcgtacatggtcccacgaggctgcaatcacccccctgctcactcatgctcaccccctcccctgcacagaacccctcactccctgacagcccagcgctgtggctgccacccatcacgggggcatggatggggtataattactcacatcttcatttctgaatgctgcttaaaagctgagaagtaatgagatcaggccctgacacatgggacaggtgagagagattttcactgagacttaaagcgaggaagacaccagtgctttttcaggattgtaaaacttaggtttagagggatctgagaccatccagtccctggagaaggacgcccagccctggcctttcctgagcactgggcccccagctccctctgagtgctggatgcctccgtggggatgctccaggcacctcacggtcagaaaacagaatgcggaaggcctgctcactgccaccctccctcaccgccactcctgctccccagcaatgctgcacatcatgaagcacggcccctaccccgctgtcttccctcgggtgactcagtcctgggcctgcaacaggccccaacactccagagccctgggacctgggcccagcgactgaacctcttagagcctcagtttcctcatctgtaaatggggataccacggactgggctgcagggagactaaatgagatgatgcctctgaaagtgtccagcccctacccgggcacgtggtgggcactcggtaattggcatctttgttccccagttcctgactcgatgggtgtcccgtggctgctgtgacacagtgccacagacggcagcttaacaacaggcatttactctccccggttctggagaccagaagtcccagatcaggggttgtgaggacaacgcaggctctggggctctgggaaggaccttcctggcctcttcccgcttctgctggcagccggcaatcctcccgagcctcagcctgcagccgcgtcactccaatctctgcctccgatgtcacgtggcctcctccctgcgtgagttcacatcaccttccctcttctcccttcccaaatccagcatgacctcatctggacgagttccatcccgcaatgaccctaccaccaagtaaggtcacatgcagaggggtcagggcttcacttagcgggaatgcaattcaacccacagcggcggctttcctcttttcatcaggggacctacaccccgggtgccctggcacaacatgtccccattaagggagttttctccccgtcccctgcggggtatctcttctcctgctccctcctgcctgccggtccatatctctcctggtagagacgggaggtccccaccccaccctcatgggccctccactccttggcaaactagcctcccagtctccagcacacagtgtcctctttggggcgcactaggcctcccaggttgagagcaaacccctggtttcggatctgaagatcccagcccggctggagctcctccccgggtcccgctctcctcgcccctcacccctctgtgctctgcacacacctaggctgcccagctccacctgggtccatgccccggccctccgacagcatctctgcaggacaatgagcattgcaaatgccccttgagacagcgattcccagagccccctgaggtgtcaacagggagctggccaccatggaaacaacccaggcagccaatggctgggctagttaggcagtgtccctgcccacaccacagtcctgagtgccactaacaccagtgcattcgtccatggggggagcacctgtcaggcaccagagcaaggcacgtggggacatgggggtctcgtcatgcatgaagctggcaggttgcaggggggggtgacgaacagtgaacagcgaggtgagtgccctctgcagctgctacggctgccatgggcacaggcgggcggatgggcctcatgaggacaggacatctgcaccaagcactgaaggacacagctgaagaggggatggaggtacagaggctccgaggccaggcggaaacaaaggcaagcggaggatgttgagcggccatgagggaagcctcgaaggccaggactaagcatgccaactcccttcctgagctctcaggcagccccagggcagggtgagcacagagatgcagtgagaaaatccaccagggcggatcggaggggatggtgctgcgtctccctgttgggaggtgccgctcctccaccactccctgccttctgtccccaaggaggcactcgcccaggccggaaactgggccgtctcctgctgcccctccctctccacacccacagcccctccacacacagctcggcccagcccccgtcggcaagaagaacgcatgctaaaaccaatagcgatccatctccctgcctgcaaaatgcagaccacatgccccgtctgcctcctgaatcaataaagacaaataatccaacagaaaaataagcaaagaaagggacaggaaattcacagagacacaaatgtgccggaaatgtatgaaaacgctctcaggctccacagtgccaggaaggcccccttttcccatggtctggcaaatatttaaaagactgacagtgtcctgagctgggctcggagggaccagggacgagggacttgtgcccttttggtacaggtacaaatcaggacagccactggggagggtggcttggcagaaggcatttctatccaacaattcctcttccaggaatatcccttacatgtctatttgcatgtgggtgcaaagacatacgtgtgagaattttcatctccactaggtgcacacaaggtgtgctaaaatctgaaagtacttgggagccagtgcgtcccatgcgcttctgatgggcacagtggcaaggacccagcgtcaccgaggcaggcccttgtccaaaatgctcagccaaacccagacatgaagaaacagaccagtcctgatggtgggacatgccacaaggccacaggtctggacttttcaagtgtgtccgtggcacaaaagaaagatagaaaaggaaaaaaggtagggagaacattccagaataaaagctactaaggacaacgacacatgataaccaactgcaatgcatgattctgggtcggatcctggaggagaaaaggtaagcaaatacccgcaacagacaactaggggtaaccggggcagccagaaagtggacattgcacaggcgatgttttgctatcgataggtactaatgtattgctatgtctgaatgcctgcgttccccaaattcatgtgtcgaagtccttgcccccagtgtgagggtgttaggacgtgaggccttcggaaggtgattagttcatgagtgtggaagcttcatgaatgggattagtgccctttcaaaagagacctcagagagctccctcgccccttctgagtgtgaggacacagtgagaagacgtcattgatgaaccaggaagcagtcctttccagacactgcatctgctggtgccttcatctgggacctccagcctccaggactgtgagaaatcaatgtctgctgtttataagccgccgggctgtgatatcctgtgagagtggccccagtggatgaagacagatgctctcaaggagcgcagatgacgcgggttccgaaggactcggcacccagcccggaggccggcaacatgggcaaggggcctctcacggctgacctgtttcctcatcagcacatcaggacaataagagctcccacttcacaggtggtgaagagccaacgtggtgaagaatgaataaagcagctcgtggaaagtgctgtgcatgaggcctggcaaccggtccctgctctgaggtcacctgccacggagctgctgacaggaccattaaaaacacaattgtgcaagtgctcacccacattcacagcagcagaatctccaccagccaagcattggagacgatccttgcatccatagacatgaacagatgagcaaaacgtggtctatacggacgatgaaatagcactcagccctaagaagaaataaaatcccgacagaggctacagcatggatggctcttgaggacaccatgcccagtcccagaaggacaaatatcacaggatgccacttatatgaggtcccaagagtcgtcaacttcatagagatggaaagtagaagggtgggtggcaggggccggggagttagtgttgaagggggacacggcttctgtttgggaagatgagagggtcctgtggatggatggcattgctggttgcacagcaccgtgtaagtgtatgtgtttagtgccacaggatggcacacttaagaatggtctagatggaaatataatgtatacatagtaccactgttttaaaaaatgatgccaatagatgctctctgtacccagggcagcaaaaatccaaaactagacatgggggaagggctctgcagtaccaggtgggggcctcgccttctgcaccccacgtggctgactttgtttgtcagtggcctgttgcccacctgagtacccgggacccaccagacaactcgtggtctgcagggcatctgccaacagcaccactgtctgagtcatgccgacaaggccgagggaagcggaggaaggaaggtgcatgacattttcccactcagtgtggctaaatgtacacctcactgcctagtgccatgtcctgccacgtggcctcgggtccagctgcaaccttccagagcacacagcggggcctccccgctcaggcctcaggaaaccaagtcctgtcactcgctactatggtctgaatgtttgtggctccccctccaaatttgtgtgagaaaatcctaactcacaaggcaatgtattaggagctgggcccttgggaggtgattaggtcatgagggtggggcccaaagagctcattgtccccttccataggaggacacagtgagaaggccccatctatgaggaggcggcccccaacagagcccactctccgtgcctccctctgggacttccagcctccagaagtgtgagagttcaacgtctgtctttgtaagccgcccaggctgtggtatttgtcacggcagccgggctgactcatacactgacctgggcactcctcaggcccttagtccccagcaggcgctaggacccccccactctgctttaggggctcactggctcaagggatcctgagctgggtgagacagtccctgctctgggagtccctggtcaaggaagacagacagaaagggcatgaaccccggacaagtggacaagcccatgcctcacagggacaaagacagtgggggcggccaagggcctggggagtggccacagacatcgtgccccatggggcaggcctctggtggatttgggtgaaggggcaggggagcgggggcgtcccatgaggggaaccgcctgtgcaaagacacagggctggggaagggcctggccctcatgggagcccctaagagctcagcctggccgggcacaggcggtggtgaagaagggatgggaggtgcagttggcgagaggcagccacgtcgcagcccctcagccaagctgtggagtcgctccctgagcacagggctcacaggccagcctgacagggtcctgccctcaaaatgcccccaccaagtgtcaaatggtgcagccactgtggaaaagtagggtgggccctcgaaaacttagagatagaatggccatttgatccggcagtcccactttctgggtatttaccccaaagaacagaaagcaggctccctaggagatacctacacacccacgttcacagcagccttagtcacatcagccaagaggcagaagccgcccaggtgccctccggcaaatgaactgataaacaaaatgtggcccagccattcagtggaatattattcagccttaaaaaggagaggaattctgacacaggctatgacatggatgacccttgaagacattacgctgagtgagatcccagtcacagagggcaaatagtgcaggattccactgataggaggcccctagagttgttgaatccacagagacagaaggaatgggagtgacaggggctgggtgtgggagaatggggagtgagtgtttaagggggacagaacctcagttgagggagatgaaaaaggttctatggatagacagtgatgatggctacatcatcattcaaccgtgtgaatggacttaatgtcactgaatggtatgcttaaaaatggttaaaatggtaaattttagggtgagtgtatttaatcacaataaaaaataaaatttaaaaatacaaaacaatcatatggaaccaaaaaagagctcatatagccaagacaaacctgagcaaaaagaccaaagctggaggcatcatgctacctgacttcaaactatactatgaggctacagtaaccaaaacagcatggtactggtacaaaaacagactcacagaccaatggaacagaatagagatctcagaaattagaccacacatacacaaccatctgatcttcaacaaacttgagaaaacaagcaatgggaaaaggatttaatgaatggttttggaaaaactggctagccatatgcagaaaattgaaactggaccccttccttataccttatacaaaaattaactcaagatggattaaagacttaaacgtaaaacccaaaacaataaaaaccctagaagaaaatctaggcaataccattcaggacacaggtatgggcaaagatttcatgacaaaaacatcaaaagcaattgcaacagaagcagaaattgacaaatgggacctaattaaactaaagagcttctgcacagcaaaagaaactatcatcagagactgggtgcagtggctcacgcctgtaatcccagcactttgggaggcctaggtgggtggatcacctgaggtcaggagttcaagaccagcctggccaacatggcgaaacgccgtctctaataaaaatacaaaaattgccggacatggtggcagacacttgtaatcccagctccttgggaggctgagggcaggagaattgcttgaacccaggaggcggaggttgcagggagccgagattgcaccattacgctccagcctgggcaacaacagtgaaactctgtcttgaaaagagaaaacggaaaagggaaaagggaaaagggaagggaggggaggggaggggaatggaagggaagggaagggaagggagaaaaaaagaaaagaaactattatcagagtgaacagacaacctatgaaatgggagaaaatttttgcaatctatccttctgacaaagatctaatatccagaatctacaaggaacttaaacatatttacaagaaaaaaacaaccccatcaaaaagtgggcaaaagccatgaagagacacttcacaaaagaagacatttacacagccaacaaacatatgaaaaaagctcaacgtcaatgatcattagagaagtgcagatcaaaaccacgatgagataccatctcacaccagtcagaatggcgattattaaaaagtcaagaaacgacaaatgcttgcgaggctgtggagaaacaggaatgcttttactctgttggtgggaatatacattagttccaccattgtgaaagatagtgtgctgattcttcaaagatccagaaccagaaataccatttgaaccggcaatcccattagtgggtatatacccaaaggaatataaatcattctattataaagatacatgcatgtgtatattcattgcagcactatacacaatagcaaaggcatgaaatcaacccaaatgcccatcactgatagaatggataaagaaaatgtagcacatatacaccgtggaatactatgcagccataaaaaaggaaagagatcgtgtcctttgcaaggacatggatagaactggaagccattatccttagcaaactaacacaggaacagaaaaccaaacactacatgttctcacttacaagtgggagctgaacagtgagaacacatggaaacggggagacgaacaacacacactagggcctgtcagaggggtggggggagggagagcatcaggataaatagctaatgcacgcagggctcaataccttggtgtgggttaacaggtgcggcaaaccaccatggcacacgtttacctgtgtaacaaacctgcatgtcctgcacatgtatcccagaacttaaagtaaaataaaattaagaaaaaaatacaaaacaaaagcaatgctccccatctggtgaaggaaacagagaatgtggtcaaacacaccacagggagccatgcagtgggatcctacacggcagctaaggaatcagccatggcaggggatttcatgccaggcaggaacttcgtgaaacagtgccagaggaggaccgcatcgtgcaccacctggaggcttggaaacctggcggggagcatgggggaaagggggcagtgacacgggggccttgcctgcatgtgggagccacacgtggcctctctttaaccggcttcaatgccccttcaaaaacaaacgcgcattctgtctgtgataccgttactcccatggccactgctactgatgatggaagcaatgatgataaaatcgaccccagagaatacacaagagggcagtgacccaggggagctggggcctcctgaaggtcccacggaggccagcagagagtagcacccagacacatgtggaaggagggaaagggctgacgatattcagaaaagagtgcatttaccccagctcctgagtcagggtggggttcagggcagggaggtggctgccaagaagagctatgaagaattagaagctggaccaatgcagaggaggcctgggtggtgtgaacggtgtttttctagaactccttactcattaaaatccacggtaaagcctgcagctgtgggctggtctccaaggccactgaacctgacctcaggctcaggtggaccctgcccctgtctccaggcccctgagctgcccttgccttagcctcacctgtatagatattctcgccatcctgcaagtcatctccaggtagcgggaagggactgggactgggaacagacagccctgagctcaaatcatagccttgtctcttcccggccatgtgaccttggccaccccctctccccaccccccggagccctaagtatttctaagaattctggaatcactctaaagagatcacaaacatcgaagtgcctggccctaagcaaacaaaagctataatcttatggattataagacccacaagtccaagccccagacatgacctgcagttaattaccagcccctcttcctcctcggcaaatcacagccacacatgcctccttcacagctttccccgcagctagcttccgttggcctgaagctcacaggcacccagggaatgatctttgccaaacacatgcaccaacatttgaataattcaacttccataaaaggggaagggaggttatgcttaatattaagcagactatgcttttttattttttattttgtagagatggagtatcgctatgttgcctaggctagtctcaaattcctgacctcaaatgatcctcctgctttggtctcccaaagtgctgggattacaggaatgagcacacagttctgctcctagtatcagccagttatgcttgatattaggagcaggttcacgtgcagatctatccacaggagacctatttgggagggcgcctgtgagttctaagtaaaggagaatttgcaaccagtgctacttgccacactgtatctagggtcccatcttaaatttcatatgtccacctgggtggggccaaatgctccgcctgcactttgagtagagagcgaatacatgcaccctggatctgagaagagggggagggcccccccagctccatgcaggagcccaccagaaaacctaaccatgggtgcacaggggaacaagctgcttggccatgtcatcctggggccagcggggcgccgtgaccagcccacctccctccagctgcaagcccagcctctagtggcgcagctgttcgagttgtcctgagtcaggtggcaccatgggagatagagggttctattcctggcataactaaccctctttcctggatctgggacagcaagggccaggacactgtccaggtctccacatcggctcgagcccctcccagagtgtctgggtctcacagtctctatggcactgacccccactgctgtaactgcctgctcccagctggtctctcctgctgcccgcactgcccgagggcatggactctgcctcacctcactgccccaacatcacccctggggccagcaccgaggtgcagcccagggggtgcactggcagactgcattacgatgactctccaccttcgggcacagagggcacatgtcctggtcacccggcttccccattgccctccctggcccaggagttaaagagccactagcttgaacaagatgctgctaagcctcaaaacaagtgcccaccccagccctctgctgctcttgagtgaaattatgacaagggctgtgggtgtgctgcatgggctcactggggtcagctgctgaatggtgcatggtgggcgctggcatccttgatgtgtgctcgcagccacgaggtgggcacagagggggaccagggctcctgaatcagcggccttgcccttgatggccctcactcttcccctgcacggttggacaaaggtgccacttcctgcaattgtgcagcaccaattgtcccctctctggaccctgccctccccaaggacaacaccatccctttctggtcaacgagccctcaatgagaacatcagcctggcccggcccttgaggaacctcaggtctggggaaggtgggagggcgaggaagatagctcagtgaatgagagaggaggcacagggacgtggccttgggacctgttccctgaacactctcagccagcttccctcccctctgcaggccccctcttcccatctgcaaaggccccagtcctcccttgaccctggcaataccggctcttgtccttcttctccccttccttcatggctaaacgtcttgaaaagggtgtcagtgtcaacagtgcccatactgggagcgggggcgagagtggggggggggggcgtctgcaaatgcatctcctggggcctgcccagctctatcacagcgtcccaggctgaggcccaggcatctgcctgttgtactgtcagcggtctccacccctctaaggaaggagcttccttcagacactgactcccaggcccccaaggctgggttccctacactgtcactgagcacgtactaccagccaggtgctatgggaggtaccggaggaccacggtgcacaaaaggcagatagcactgtggagccctgcaccctgcaccctacccagggcctaaggtcagggcacggatgaaattcctcaaacacatactctccctcccatctcgggggctctgcactagctgtccctgctgtcaggtgcccttctcccactgctttgtctggctaactcctacttggttggatgtcacctccttcaggaagcctgccaggatttctctctcaggccaggttcactttctctctggccccacagcctgcctccctgagaagtgctttctcatggagtgtcatcgcttactgcatgccttctttgttggctgggtgctcctggagggaagaactgcctccagtgcccagcaagaggatcgacatgctccagggaacataccacctctagcctccctgccaagcctgtggatgctgcttggctgcatgttagaggacacggctgcctgtcagccctggggtggggccaggcctttgcagcaggctggggggtcttctgtgaggggcatccttcctggtgttggtctcctcggggagcggcaggtcctcaccgaggaaactggcgctcggaggggaggacttaggtcctgggagaaaccaccagcccccaccctgaaagctgccccttggggacttcccaggtcaatgccaaggaggggccggctgtagcctgatggtcctcttcctcccaagtccagagcaaagtcctgctggcatctcctgctgggccacaggggtgcctggcagagttggggaaagggaagggatcaaagcacccagcagagcctcagcggggaagcagcccctggtgctcggccagaaattcctggtaaaatcccaatttccagcaaaatactctttctaagttgtcaacctcctaggaggctgtgggtcacattttaaggaagaagagagagagacagtttctaagtcccttccagaatccgcatccaccccctatggcagtgatgacactgccccttatgccccagggccgccgctgggggacttgttctatttgaaaggcaaggcgtggaggagaatcacaaatacgcagacagcacataaaatgactcccgcgctgagctgcgagaaggcttgtgaaagcctcgcaggaagctgacccacatttaatgcagattatggagggagggagggagggcgccattcagctgagcacagggtctggaaggacacagcctgagctccagtgccagcccagcgggtgacgcggggcaggcttctccatgtcactttgcctctatgtccccgcctgtaaaatggggagtcacagctccccaccccaccacctggtgtgaagaggactcacagaggtgacgcggcccacactcagccagtgttatgacccccgctatgctgctgttctctaccagccaccgggcacccttttatcaagaagcgtgagctctttggaaagcataaaaatgcaccatccgcaaaagggatgttttttatcaggcgcagaactctttgttccctattggcctgagaatttgaaagaacccgtggggagacacgctctggggaggcggcagcactgagtgggtgttctgagaggcaggcatgccagtgggaagcccacctcccatctttaccagccgtgtgacctggggcgggtcgtgcctcctgtcttatccaagcaccctcatctgccaactgggagcagtgacatcaccccacagggctttgtggtgtcggagatcaatctacagcctcgctcctgtgcccagtgttgctaggtgctctgtaaatggcaggtattgattttttttttttttccagacagagtctcgctctgtcgcccaggctggagtgcagtggcatgatctcagctcactgcaatcttcgcctcccagattcaagcaattctcctgcttcagcctcctgagtagctgggattacaggcacacaccaccacgcccagctaatttttgtatttttagtagaggcggggtttctccatgttggccaggctgatcttgaactcctgacctcaggtgatctgcccacctcggcttcccaaagtgctgggattacaggcatgagctaccgcgcccggccaggtattgattttcattagacaaatcaatcactccctttggatcccactctggtgagcgccgggggttcctgaggttgccagcacacccaggatatatttagctctctgctggagccctgctgggtgctagcattccagctgaggacatgaaatctcaggccagctcctaatttctcattggcaaccatggattttgctccagagcagaactccctctcttttataaccgtagactaaattatccccagactacacactcatacacacacacacacacacacacacacacacacacacacacacacgagatccctgtgcttgtaacatgtcaataccgctcacagccctagctcaacagtgaaagtccacctctcaaaatagagtatctcagagcaagaggacctggccagccgccggggaggctgacagctgcttcctaatggagtgtccttgagaactagaattgagcaaacccgccactagcatgtccttaaaatggatcagcagtgaaaacatagaacagcaaagcattaggaacaaaggaaaattgcccatgatcctagcacattttttttctgagatgtttttctgcatcttttgcagactgtaagaaatgatgcgtcctgtattcttcgtctaccaccagccttcacatagactttattcatgcttcataatatttttaatgcacaatattccatcttttatcagcagctgtcaaagtatggtctagggcagtcctcaggacctcacacagggtttggtggtcaaaatcctttcaataacaacacgaagatatggtttcccttttcactctcagtctgtcctgagtgtacaatggagttttgcagaggccgcatgacatgtgacgtcacaactgatttaacacagggcagacgtcagaatccagccgtcacctacaaagtcagatattaatgagatttgcaaagctgtaaagcagtgcctcggctcgctaaaaatgctcttatgttagcgtgcagagcagtcattgtccttttgcggtttaacacattttttatttttcaattttcatttatttatatatatttttggagacagggtctcaccgtgccacccaggctggagtgcagtggtgcaatcatggctcactgcagcctcaacctcccaggctcaagcgatcctcctgcctcagcctccagagtagctgggactaggcacatgcccagctaatttttttattttttgtagaggcgggatctcactatgttgcccaggctggccttgaactcctgagctgaagtgatctgtccaccttggcctcccaaagcgctgggattacaggtgtgagccaccatgcccagtcaacaaatgtttttttaaattgttttaatttcgaatacaataaatatcaagaaatataatgcacataagcaaaagctctctggggtcctcagtaattgaaccctgaggccctagaagtttgataaatgctgccatagatggacaggaatttccttagccagtgttctgcggttggacatttacgttgcagagcatgtaacccctgcaatcaacggctttttatttctgaaattcatgtctgtgtttcagaggctttcttcagaagagattcccagaagtcgcattattccatcaaaaggcatgaatgtatttaagtctccatacatttcacctaactgctcctcaaaagattagaccaattcatattcttatccacagtctgtgacaggatctaactcccgggacgtttaaatttagcgagtaacattttttttatcctatgagaagtcattctcactctctcatccatcctagagactccacagggagaagaaaaggtattgacccggtaaacaggatgcaccaagagactacctgtgcccggctgagtaatgcctcccccagaagatatccccatctaatcgctaaaacctgtgacatatatggttaaaaggggaggggtctttgcagatgtgatttacataaagcgtctagagactgggagatgattctggatgctatgggcgggctctgagtgcaatctcaagagtccttatggggaggagggagcgggagacgacacacacaggggagaagtagcatgaagatggagctgagggaggtttgaagactctgccttgaagattggagcaacgtggccacaaacctcagaatctggcagccaccaaagctgcaggggtgaggactgagcctcccctgagcccccgagggagctgccagcgccgtttagcctcggacactgacattgaactgctggcctccagagctgggaggaaatgccttctcttgctttaagcctcccagcttgtggtcactggtgaccgcagcccctagacactcacaggtggcctttgcccagcactctggttgtgccatcttccctgagcgaggcacggacctgcacaaaaccctttctttaatgggtgaatcgccctttaatcacgaagtcagccctaggcccaatatcccagaagaaggggcacgagtcagggcccagctgcagaccaaccccaaactctggtgtggttccctgaggcccaggtgggcaggcaacaagggatagtggcccgaccttgctgggggagaaacccctcaccaaagcccaccatgcgcaccttccccggcagagaaggggtttggagtggcaggaggcaggggcagagggagaaaaggaagacgtggcggcggtgcagcagaagctctcctgtgggggccctgggccaggcaggttctgaagggcccagtgtgtctggaggggagaggatgagctggtggatgagagggctgcagctgcaggtgacctaagcagcactgtgggcctgcggaggcctccccactggattccagagggggctctgggcctacagtgaagcagggcccacaggaggtgagggagccgctcaggacgcgggggggccatggcgcaccacagttaggagtgcgggttctgcagctggcacggtgcttctcagccgaatcacctcgggagagttacctaattccctgggcctccgtttgctcacctgtgaagtgggaatactggtagtcccgagcaaggagctctgatgtaaggattatagggtgaaagcacatcgcggtgctgggtccacactggggaagcgcgtaagccgttcccccgtgggcatgcacagcagagtcctgcttgcctggaagcaaatgctacatcccaaggtgtccattgccccaaaccacacaggaactcagagtcggaaagatcctctaggacaagcccaaccccaacagagatgaggaggccaaggctcagggggtacatggcctgggctggttcctggacccccacctctccatgagaccacccctatctcctcccagagctgctgatgtaccaagaaacctgggctccgcaggcacccgggagatcaggccacgccaggacccgggatctggaggcaccagggagagtccagctgtgccaaggcccagggtccccagacactacggagagtcaggccacgctgagatctggggtccccagataccagggcagatccagccagagtgtgaaggggtctgtagggctggggccatctggaggctccgggggagatccacttccgtgcctcttccagcttctaggggcacccgagtttcttggtgtggggcccctcccttcatcctcagagccaggcgtggagacttctctctcctctctgctgcctcctgcctcccgttagcgagaagcctcaggccccctgaaatccagagcagtctccctgtggcaaaatccttcacatagtcgcatatgaacagtcattttgccgcatgaggtcacatagtcacagggcctgggattaggacatgggcacctttgagtccactgttcagccccccaacaccatccaagaggaggtatttcagagagggcaggtcccagctccaggctgcagagcaggcaggagcaggcacaaatctccacaggaaaccccagcttggtctgtgtccacaggttcagaggaaggagggaagcagagggcctagagatgggaagaaagcttcacagaggccctggagtccggcagagccttgaaagggagaggaggagggactccaggggagcgggggcaggcagaaggcggcaggaagaatgcaaggctgttgggggatcagggcaaagacagcacatagtaggtgcttaataaatagtcgtggagggacagaagggacattctggaagagctctgagcccttgggaggctgttgactgctggacacagagaaggcccggacctaggctgagacttccccagcacctcacactcaggactggccctgcgcccagacaggacggggcctatggagtaagaccccacacagccggtccctctgtgggacgattcagaggctcccagtgggactgagtccccacttgccagagtggtggcccccatccaaatgccccctcctggcttcccctcccttccccccttaccctcctcacacctccctcgtgcttcctggggtcacctcctaggtaaaccacctgcacccaagttcccactgcacctactcagggagcctaaatggagagagttgtggggcaaaggggttggaacatcatgagggcatttgaaactaggctgccaggttgaaggtctggatgctccttggaattcttccttctgggcacttcgtgtccagctgcagcatcaactgatgtcattttccatgtgcgatcccggggacactgaggtctgcagaagcagagggtcagagagacaggccaggctgtcttatggaatgacggcagacagatgaggaggccatgctgaactggggacggagttccacccatcacacatcctccactccttgggtgttcacgaaatgcctcctctcattctacctgagtggctttcaggggagccagtacaaggccccatcgtgccctgaggacagacgccagcgaggacagaggcagcatgctagccgcagtgacactgagcacttttcttggtgcgctggctggactcacatttccagatcgtctctctaactcgtctctctaagcacagagaaaccaaagtcccaaacttccagcacagggtgcgagctccgtgccggaggcgggaggagccactgctgctgcctgggatgggggctgctcagtagaatgcagctaaaatgaagcttcgagctgagaccgatgactcaagacaccacgcctcctgaggatgctgtgccgagaaaaccgggagctgggtggctctctggagacggtgcttctcctggcactgggctgcagccttgtaaccaggactgagatggggctggcaggggagacagcaggaccagagaaggggaggggaagctatgaacccagcctagggtgtggctgatgatgccaaagcggctcccacggggcacgacgtcaggtttgtccctgagctgtgaagggtatttacagctgtgacaaaggccattctgcccgttccctggtgcctgccgtgcccaggcccttgactctcactcagcatctctgagtctacagtaacccctcaaaagcagctgtcatcacctgtactttttatgtggggaaactaaggcaaagggcatttaaacaatccgcttggagaaacacacaactagcaagtgacgattggggctggagcccaggtgtgcccagccccaaagccagtgcatcttctgaggcacccagactggccccctcacatttggaaatgttcagccaagggaagtgacatgaagccacccagctcgttatccgcagcagacctgtttgttgtaggcctggaagctgctgatggcgagaagccccagagccagccctggcacccacaaggaccagtgagcgtcccagaatccaaagccccctcctccgccccagtccttcccacagacgcgagggacccagctgccctcctagctcgagctccaggcagacatccacagaagctgctaatccacaggcggcaaggcacctccctccacgccagagaccctcagcgtgaggcccaagtactgctcacccagctgggagcatctcgagagccagatgagaaaggtgggcgcagcagggtccctaaaatggcagccaggcctcacacccaaacagtgggcggggtggggcggtggtgtcagaagaaagcagggttgtaccccgaggatggcagtggccctgtttttacagatgggtacactgaggcacagagggacgatgacttgtccaaggtcacagaggtccaggcgaggggctggagacgctgctgggctgggctgtgtaagcagggggagaggcactgccttcagtggaacagatgggccctggggggattgcaggacttggggtgggggtgggggagtcggagcagagggtcagggttccaggggggcacatgggctcaatgtggtgaaagtccttctcaggcccaggctatctgagggtgagtcacagaggccatgcaatgacgctaggcaggaacccccataggaggcgggtttgggtcttgtcctgcctcctggctctgtgctggcaggtcccgcagctggaaaatgggaataacacaccacggcccaggcgagaagatgggctgtgtgagaccctcaccaagaagcgccatcatgatgcccccaaacgggccaggctttatccacaccaacactcagccacgcgttatgaggcagcaaccaatcccccacagccaccggctaaagcacgcaggcaggggataggcagacagcgcccgcctagccagggatacgcgtgttgcggctgagtcgggcacactggggttcaaatcccagcgctgccatttacaaatcacgtgacaccaggcaccagacgggactcgcaggcatttcttcctccgtaggtagagatgccaccggccgctccgagcagcgctgcgaggaccccgggaggaaacctatacgagcatctggcccagggccccagggcggcacttgatgagccgcagtctctgcgacatttaagcctgtcccacctgggtgctgcccgacaccctagacaccctgagcagccctggcgatggaaaaattccttgagtaaattaagactgctcgactcgggttgctctgtgctgggtgcgagcctcggaggtctgctctttcggggcttccccgggactgggacagccgcgtccatcatgcggggatgactgcaggacccatgtgatcagcctcaagcactaggagctatcccaggacatgacccatgttttcctattgcaactattttaacaacctctgtgagcctctaccacgtgccaggcagagactggtcagctcatgagaccctcaatccctaccaagactctggggaggggcagcaatggaaagaaggacacagaggtcttatctttgatcatgctagcaagtggcagggctgggtgtgagcctgagaccccacttcaaggtaggttttacggagccctacccaggcagaggcacagccaaggggtgcagcaaggaagggccctaagtatctttgcagggaagggactatggaatctaggctctggggttggttgatggcatcaggccagcagcctgatctggcttcaaggataggcagtgcccgcttaaagggccagcgacaagacaggccccttcatctcccagtcttgccaatttcctctcgagctcagaggtctcccgtgacccagatgatgctctggaagcccagggtgcgggccaggcagcttttccatgagtcagggacacacacctttttctgggacagtaagattgaactttccaagagttcatcaaactcaagacttgattctacaaaatatcctatctacccccaaaccatctcattgacagaaaccataaagagtcaaaggatcttgagtggccaggttaggaaggaaccctgcacatcacggaagaacagggcagagcttgggggtgaccaggttaagcggagactgccaatgcctgggcaacggcagtcctctccagatacaatctcagatgaatttctgggtcaggggggtctggcttctgctgcacctcattcagagtggagtcaggcagggaaaatctgcagcagtgcagctgcctgtgctaagctccctcgatgctgggagacacccccatcccacgcagcagatagtggccctgcagaacggaatcgccgggcttctcccggagtgatgggtttctaccagcgctggaggcagagtgtgctctcttctttccatttgatctttcagtacaaaagaaaagggcacacaatgaagaaaacttggaaaacacatggaaagtaaaaaggtgcagaagacggaaaactttgttccttctcccacatcttacagatgggcaccgacggcacttcccgacattgcctccctcactgtttctgtagagttgacatcctatatgaaatacaattttgtcctgagctgttttctaaattaaacttcttttctttttttttttttttttgagatacagtctcactctgtcgcccaggctggagtgcagtggcgtgatctcggctcactgcaagctctgcctcccaggttcacgccattctcctgcctcagcctcccgagtagctgggtctacaggcacctgccaccacgcccagctaattttttgtatttttagtagagatggggtttcactgtgttagccaggatggtctccatctcctgaccttgtgatccacccgcctcggcctcccaaagtgctgggattacaggcgtgagccaccgcacccagccacttattttcttttcttttcttttttttttttttttttggagacagagtcttgctctgtcaccaggctggagtatagtggcacgatctcagctcactgcaacctctgactccctggttcaagcgattctcctgcctcagcctcctgagtagtggggattacaggcacccaccaccacacccagctaatttttgtatttttagtagagatggggtttcaccatgttggccaggatggtctcaatctcctgaccttgtgatccacccgcctcggcctcccaaagtgctgggattacaggcgtaagccaccgcacccggccaattaaacctgttttcttaagcattttctcctaacattagaaattctttacatatgtagttaattcttcatgtgggtagtaacttcatatacatcttccccaccgcccaattagaatgtaagttcaagagaacatagattttgggttgttctcgtctgttgctgaatcccagggcctggagcagcgtgggctcacgtattagtctgttctcatgctgccaataaagacatacccaggactgggtaatttgtaaaggaaataggtttcatggacttacagctccacatggctagggaggcctcgcaatcatggcggaagacgaaggaggggcaaagggacgtctcacatggcagcaggcaagagagcgtgtgcaggggaactgccctttataaaaccaccagctatcgccagccttaatcaccaccatgagaacagtatgggggaaaccacccctgtgattcaattatctccacctggccctgcccttgacacgtggggattattacaactcaaggtaagatgtgggtggggacacagccagaccgtatcagctcatagtaggcattttgtgcatctttgctgaataacgagtgagtgagatggaacagatggctcatattccatcactggcttccacggtttggtggtttctaacattttgttgttactagtaagtctgagatgaatgtttctgtggctacatcattgcccattcttggattaggtgaagaaatgtgtctctgttccaaatactaggatctgcaccgtccacagtctggggactagggctcaggttcgggctctgccacatcctctccttggccctggacagctgcttttccttccctaaaccttggtttccccctttgtgcaggtgggtgggtttgggctggaacattcctcatgtcccttccagttccatgatcctaagagcagcatggaaacagaaggctgagccagccacaaggccgcccttggccccgcacccctgttatggactgaattgtctaaattcatatgctgaagtcctaacccccagtactccaggatgtgactatgcatggagacaggacctttaaggagaccactaaggtgaaacgaggtcatgagggtaggctctaaccaagtctggctggggttttcataagaacagattaggacacagacacacacaaagggaagacgggacgaggacacagacacacacaaagggaagacggggcgaggacacagacacacacaaagggaagacggggcgaggacacagacacacacaaagggaagacggggcgaggacacagggagagggcggccgtccacaagccaaggagaggggctttggaaggaagtaacccagctgacaccttgatctcagacttctggcctctagaatcagcaaaaaaataagtgtcttctctttaagccacctggtctttagtactttgttatggagcaaattaacacaacccctcaggagcctctgtccacctgggggaatctgatctgccaggccagcagctgcccaggaggatatttaggctcagaaggagcacaggccttgctcaaggatctggtgcccactggtggcagacctggcactggaatccccccaccccaccccctgccccagctcaggtaccttcctcaaccccaccccctactggtccccttgtgaccacatgggctgcagtgagatgaagctacaccacactgattgtcacttgctgggctcaccatgtgtggactggccggccatactactggggaaactgaggcagggggcgccccacagctaggacattggattcggatccaggcctgtctggtatgggatgccatctccttccaccttgccatgtgctatataaacaatcgctctggccacctgaaatcaacaggcaacaaaagtaaggcaactgcatggcctcgatccacacctgggtcatcctggaggtgccctgtgtcaggaactgaagacatggacacagcccaaaggaacagggagcctgcagcacacgagggttagacaggctgccctgggctctaagccttcggcccatttgggcagctggagactggaccagatgatgctcagccactcctaccagtgctgagctctggaataatgccagcgggtgtggggagggccacaggggacctgcccttgttgcccttgttgatgatggaagctcctgtcctgccagacatacacagtggccggacgttagagcccacatgccaggaacaagggaccatgctgtctgctctcccccactgtgtgggtggaatgcctgctgtgcgcatcatcggctggggacagggctgggcaggggcgacaggtggcccggagagcacacattgccagttccaaagggctggattgattcagagggtctgagctgagctggccacccagcaatgaccatcccaaactaccgagggcctcccaggtgtggggctcttcatgttgtaccttgtcccctccaggcaaccaatgctactgctcttacaggtcaggaagccaagctctggaaggtgccacctatgcctaagaccaccaggcagtcaccatggttcaaaccccagtctctgcccccaactgccccagtgcccccacaccccttctcgtcagatgcagaggagagatgccagcactgcttctgaggctctccctgatgacaggggggaccacaggtatcaattatggccacaagaagcataaaattactctgtgtgcacccagccattatccccacctgccattagataaatgtgtctggaggttctgccaagtctcagggtgccctgctccccagccactcccagataactaggttggccatttcagaaatcctcttccaaagggttctgcctctgacctccccaaccgcctgccattgctctcagctactcccaaaggctcccggcaacgccgtccctccttccttggattggagggggagggagacaatctccccagggaggggagtccctggcccttagcccccgcccccttctaggcctacagcccacaggaagctcttactaaattcacattctctccccagtccgatctccctcaggggaagcggctgtccccattggtttctgcaccatggccaagggccatactgcagtccctggcgcgacaggcttagaggaaagagcacaagagtcagtgagcccggggttcgaatccccgcccccccttcctgagccaagcaagtgactcaagcctggtgcgcctcgggtcacaccctgaaaaatggggtgacagcccttccctgccgggaatgcaacgacaagccctcagcccggtgcgggccccaggaggctctcagatccgggcatcctcaggccgcctccagggctcaccgccaagggctccagttctaggtctcagtttccccaacagcacaaggcgcggctgggctccagcgctgtgggatttttccagccccgcacagaggctgtcagatcccggagggtgggtgcggcgggaaaggcaggggtgcgacgcgcaggggcgaggggctggagacgcgcagagatcgggtcggggccgggtctgacacatgcgggctccgggtccccagatctgctgcggagagtcctgggcgccgagggtcggcctgacgcccccaacccaggcgctgccagagcggcgcaagggcggcgcccccagctgcaaagccccgcctatcatctcacctctgcgtgcctaggtctgctggggccccggcccttcgcccggaccccaggcccccgcgcggaccctgaccgctttctgcagcctggaacaacccggacccccgtgagaagcaaagaaggggcgccttccagacatcctggcgcagccacgccggccggcgcgctgggaaaggatccccggcccgcgccactgagctacgcgctccgggcgcagggcagagggctgcgctctggcccctcggggctgcaaaatcctggagcaaaagttgggtggagccgctgggtgattttccccggcgttgcaggtgcagcctccgaatgccacccagcccttgcggcgccgcgagccagcgcggggacccgttggtccctcggtccccagcacccacctgcactcatctcagcagccgctcggagtcggggcggcccggcgctgcgacagccagaccctcgggcccgcaggtgccgcgcccgcgctatcctccgcccgcccgccggctccgcgcccgctccttgcgcacacgccaggcagcgccgccgcagccccacggcgcgcaggccacgcccgtgccacgcccactctcacgcccctcctggcggccccgccccgcgcccccgctgccgcccgggagcaccctgggaagtgtaggcacctcgacgccaccgctccgcctggctccccagctgcggggcgatcggactacaagtcccagcacgcttcgcggccagcgcaggcgcagacgggcgacggcggctgaggcctttcgcaatcgttcttagatctctgcagagctgtcgccacggcctgaggggcgacgtggggactgccgctcacggaatccgggagtcgctaggagagcggcgcagggaaaagcgagcttggtgcagctcttcttgagtagtcgagctacaaggcgcctgaagaccttctgggccaactcttctttaccagtttacagagagggaaactgaggcgggggcggtgctcgggcaggattagcccgcatccgtcggcgaggcttgcactggtggggattcgtgcgcaggtttcctgcctccgggcttgggctgtccgcgcctcgccacccaccccaggctcccgtcgctcctcgccggctggcgcccagctggggggtgcaccgggagaggtggcgcggctcacttcggcgcagtccccggccccagcctccacggtgaccggctaccctgtgacatcaggcgcccagcacagggcctggacgcgggtgcaggagagggagtcagggaacggggaggagcaggggtccccactgtgtgcctggtgcgacaaaaggcgagctgcagagaggtcgggaggagccggcaaacacaaggatgcccaccaggcgcggagggcctgggctggaggagcatttaggatgcagaatcgcgggaacctggcatggagagagaggccaaggacttttggcttgggccagggctgtttggagatgctttcaacaagtggaagaagattgggcacagaaaatgtagactgaatggaacactgaggcaggagcaggtactcctccccctccctcagcagcagccatctcccccaagaggggccaggatgggaggccaggagtacagtggctcagtgggggagctgaagtcctggggaaccagccaagccccacacaccctagaaatccaggaggcccagctaggtgattctgcccgcagccgcagggttcccatgccagtccactgggatcttgtgccatgtaattgagggggcgccagatctaaggatcagtgaactaatgtgtgccatgacccagtgtgagttgagatcaataaatgtctttgctttgctattattattctctgtggctaacatagggcctggcacagagcaggcagtctgcaaatatctgttgaataaacggagagaaggatagaggggaggggagagtgctggcacctggcactcctggatcatagcctgagaggtaggccaggcacccacctgccgtaggtacaccctgctgccacttgccctctaaggagctctcggtcag

SEQ ID NO: 3 - DNA, 186858 bp, Homo sapiens
  source 1..186858: mol_type = genomic DNA
gatcagacgtcgctgaggggctgttcaccaccatcctcgttctccagggtcaaggaagtgttttaacatgtcgtgttttcgacttgaccttgtggtatttttcttggcctagttgtgtgccatggatattaaaaaaaaaaaaaaaaaaatccgtctacagttgggcttcagcactggtgctgctttaccctggtgctctgtggggggatgacactgctggagtcaggcctttgctcttgggtggggcacaggcaggtcgcttggtgggggccacacagtgctgggcaccttcagccagtggtgatgagtctcctttttcctataatacggtaattcctctatcctttccttttttgccttcttcctcatctgccctgtcttctggcccacacactcttaaccagcgttcacactcagtgtacatggcctggaggcccgagtgtttgtacatgagtgatgatgtcaaacccagctggtaacaccttccttgggtcatgtttgccattttcttggaatgaatgtgagttcctgctcagggctcatgtccttttacagtgaattctatataacgcccctcccagtctcacagctaggaggcttcatcactgctaggccagttggagcgttccctagagctcagaacaaattgtttcctctgctgtccctaaatataggacacctacaagcactctgaagcaagggcagacattcccacctggtacctgtcaaagtcctaggatgcctgggatcttccatctttcagtctagcacgtgggaccaaatacaagagatgctgccctcacaacagccttggaaaagatgagcgccagggctgtcagtacccatcggttcagtaagcgaggcattgtccacgctgcctattcactcgagagatgaatagtttcctgttttcgatggctggggagccagtatgagctcataaaccaaacagcaattttcagagacatctgttcctgatcttcagaataaactcagtgtccagttgcttcggctggtgggagccaatattcacgccactgactctctcaaagggagggtgggccctcggagacccagcttctctgacaagcagattagaccaaaaggctgcctcaaagatatgccactttgaaggaaagcgtagagaagcgtttacataaaagaagacgcttcctgttcagtggacaacttcatgccactttcaaggcacaccgatggccaggtgggacatttgtactgtagcagcacatggcaaaggtgagccagaagcagcctggatgctggctgatccggaggcctttgtgaagagcaaggagagggctccagcccacctccccgcagctctgccccagcccccgtgggccacagggaggctcaaggggagtgaactaggtaaacagattcctggaaactcacatctggatgcagctggaagagttaaatatttacattggtggcttccctggaccaccgcgaacacaaacatccacaccacagggctgagttttgtgcaaatgatggggctttgcattttttattaacattttcctctcacgtggtttacatcaatttataataatctacataagttgaaacagaacatagacaaaaaaatatatccttaccaacttattaaagtcagatattcatgaagggtcccatcctacctgtgtatcagcagaaactggcagccatcagccattgcccagcaagaacaggcagacctggcgtttcttagcctgactcctgctgggcacagcccaccctgctgggcacagtgactggaggttccaggctgcacagtccctggctcctgactcctgccgggcgcagtgactggaggtttcgggctgcatggtccccggctcacaggagaccctgctgggtgtttccttggtgcagtttagtccaggtctggcacctgaccctccccactctgggggtgggatttataaatatgagcctttgcatttctcagcctttgcagccttcccatagcctgttctcacgttgcctcagcgagcttggggctgtggggctccctgaggctgagacgcgaaggtgcccagtctgggccgtgactcactctgccccttcctgtccatcactttggaagcaagcaggagccttctgtgccacacaccgacactcggatgccaggcagggaccttaggaagggccaggcactgcatctttagactcaagttcaccgcctttcccagggagcaagggctccttgctaagctgctcacaggcagccgatggtcagtacttccttcctcttgggcatgtctttcctccgtgcacagagtatttactgttctgcccaaggccacaggagtaaacaggctcaaaaagggcctctcaccgcgcacgcgctgcagcgttagggccggcaaacccttctttaagactcagccctgagcacaagcaatgggaactgagctccccagccctgagggcccggaaacgacgctctgccacacagaagagccggggagctgtaactggctataagtcgagcccctggagctgcatctgctctcctaggctgatggcccgaggctggcagccgcagctcgtgtgggaagtgtacggtgggaacacacctcactccttcctagtaccgggcaatgcgtctgcaagtcgggtccctgctccctggcgggtgcctacagcaccaacaaggaggccccagcagaacccagcccctagaggcggctgtctgattccccactctccccacaacttctggagttcccagtgtttacccaaaaggctgtatccagaagctggggcggcaccacaatggctggccaccgtgggcctgtgcctttgcttcccaggtcctggaggaccgtggcagtgcttggctgtggagtgtgtgtaaaatctaaggcaagagtaccacgaggtcctgcggtgccagggagctcctggctgcagcctacctgcctggacacctgcttcggccacatcagtcaccctccaggaagcctggcccctcttgaaaagcccccacaacttgctcctaagagctgagctgcctccccgcgacccgggacacccagcgtggcatgtgcattcctcccccgttcagcctgtggtgtttcctcagcagcctgaccgcctcctcccccattctctcctgaccctctggctatctcgatagcaggtcacctgtgagtctttacactcaaaggaaatagaacagcagggaagggaactgaaaagcagtagaagaaacagtcagagatgcctcactgatagacaggaggccgaacaggtaaaccccagaagtggagattcccaaacggaaaattccagaaatgggcgctccagctctgtgctaagctggggacgagtgtgagtgtgtctgcttgtccaacatttgcacaggcagcaaggcaaagcaggtgtgctcccaaaggcggagtctgaggaggggccggcagcggcaaacggcagcatcaaacagaccactgctgccgcggcaacccagggcctcttcagagctttcaaggcgatggagcgaagaccaagggtgcacatgcatgcaggcaggctgggaaggaagagcgggtggaggaagactgaggggaggctgccaggagaccgccatctgggagcagggccaagagagaagctggcagcagttacacagcgcaaaataaaaggccttgggctggactcaggcggaaagaaagtgctggaggaaatgaaagaacaaagcgggctgtctgtgtgcccacgccgggccggtcactaccttttctgcctgacaagtgtacataaaacaattcccgaacagcacggagcatcagacacaactagaggtatggagggcaggaggtgggatgcggtggtgaggctggggctgggcagccggctttgtacaaggtggcacaaaagacgtacgcattccagttcttggaagctggcttccctcgagtctggagtgctgggtttgggagttttctattgcagtctttcaagtctgagttggaccccaggctggaggggctggttccaccacccgcccgcagccaccctgcctcgggctacacgtcggtggagaagtacagtgtgttccgcttgagttctgcgaaggaaatgggggggtgctgcaggtagtagaggaggacctggacctgtggggagacaggaaggcggaggctgggctccctgtcctaggcctcgtccttgctgactccagcctgtgttgcccctcccactccctagactggctccggccaccgccccttcctggggagcccaggtgtgtttgcctttctgcagccgtggaaggtgctacggggcagagggtcgggggcctagggccacttccccaacctggccataagcttctgctctgtcctgaggcggccacagtccggcccctgctctgggtcttgcaggaatcccagggaagcctcccgcccttggaagcaacctcagagcttccacccatgaggacaagggcccagcatctccccacccctgggcttgctttctgagactgaggccctcctgagaatgcagccagcatctctgggccctggtctaggctcacatgtttgttttggcctgggaggggcagaagtgtctacagtcctgcctccctggtgacaccccatagcccatcaacccagcttcccacgagggaagaggtgtggggactctgagctgttctctctcctcctaaggggctggtctcaccctccgccagccacgggcccgggcggtgccagggtacctgcgccatgacgtcatgggaccgtcaccctccgccagccacgggcccgggcggtgccagggtacctgcgccatgacgtcatgggaccgtcaccctccgccagccacgggcccgggcggtgccagggtacctgcgccatgacgtcatgggaccgtcaccctccgccagccacgggcccgggcggtgccagggtacctacgccatgacgtcatgggaccgtcaccctccgccagccacgggcccgggcggtgccagggtacctgcgccatgacgtcatgggaccgtcaccctccgccagccacgggcccgggcggtgccagggtacctgcgccatgacgtcatgggaccgtcaccctccgccagccacgggcccgggcggtgccagggtacctgcgccatgacgtcatgggaccagatgtccgcagccgaggtgaggtgtgctttgctctccacttctgagggtctcagtaacgtgggtccaaacacggtagccaggttgtgaagtgacattttgttgatgggctccttctcggcaaccctaagaaggagaagatggggaggaaagaagcccttcctcagcagccactcggagctccaggacccttggccttcgctgtgggaactcctgaaggactcctggaaggggtcacctcgtctctgtctcctaggagtggggacctcccccgggggaaggggactcatccaggagagcagggccccagccatgtgccagtgttctgtgctaacatctccagctgctgggtccccctgaactgatggtgaactgccagagccagggagcccacagatgccaactccagctcccttgcctgagagcagatactgttctgaaaactccctggaacaactcacactcgccgcagtcctttgaggtaaatatgattatcgtcacccccatcgtgtagatgaagaaaccgaagtacagaggggttaagtgacttgcccaaggtcacacagccagcaactggtagagctgggatttgaaccccggtagctgcctccaggacctaccgctctgttgctttctcatgtgctaagtggcccaaaagaagagttaaggtgggtggggcaggggagaaaggcaggcagggcctggagcccagcaggagtcactagctagacccggggctctgccagctgtgctggggcaggagcagccctacttccagatgagcccggggactgtccccccgtgcctgtccggaaaggtcggcctcgtgggacccagggcttcctcttgtgcctctccggaagggtctgcctcatgggacccagggctgcctcctatgcctctccgtctgcctcgtgggacccaggattgtcctccctctggatcctctcctgcttctcttactcaacaggccagatgctctgcgatgcttccctggggtaacagcaggagctgccatcagggctggtgtccaggcaggcccagggtcagcaaacatatcagagggcctctggttctccttcagtctcaaaaaatgtttctgggctgagacccacccaccctaagcagcgcctctcaccctcaataccatcattcccaccctccaggcaggagctgtggctgcgcctgctttggaaacaggcaaacaaacactgtgatgccaacaggcagctgtgcagcggggccagcccctcaccacacgcgcgcacacggtccagccaggggcccagatgtgggaacagactgtgcccagttcccagggtggaagccgaatgaattttcccttcccactcctccccacaaggcttgccaaatgctttcggaattggttggggctctagtcctggccaaaccagaggaaaaatgtttcatgatgggaaaaacaagacaccagccccgggcgcgtccaggtctccactggctctcccgagcctggcgtggctgagctgcagcggggggcctggccctgagctggggctgagctcagggaagaattgttccgcagagcagtctgagggggctccccggtcctggcgtgcaggtgggtttaagggacgcccagggaccacctccccacgcaagcctgaggacctctgaactttgctacaagtacaaccaactttagccactcttggttggacctgactagaaagggtggtgggaaggcaagaagggtctgaatttaggatctggaagttgagggctctaaggacaggtctgctactaacccaagcaagtctccgcctggtgtggggactcagtttccctatgtctagtgaggtgtgggccaagaccagtgggtttcaccttttttgactgtggcccacaatacaacccatgctgtaacacagtccacacgtctctatgtaactgaaaagcagcacctgcatcaaggcttacaatgtatcctcctgctgtctgtcccccactgctgtccatccccactgctgtccattcccccactgctgtccatccccactactgtccattccccactgctgtccaccccccactgctgtccaccccccactgctgtccaccccccactgcatctagaaatggctacattcgttgaatgaaccaccagtaggttgggacccactgattataaaacctgcctgtagtcctgggctctcaccctgccattctgagcattctatggtcaatatttgaggttactactggttacgggacccaaatatttctcaaaacagaaaaacatgagtgcaagaacttggaaagcaaactctcactccccacagacagcccgatggaggccagcgcccacgaggagggactgaggaggtggggttggggccactccccgttaccttttcacgaggagggactgaggaggtggggttggggcccctccccgttaccttttcatgaggagggactgaggaggtggggttggggccgctccccgttaccttttcaagtgttccagcaggaagaggaaggtgatgaggttggggtcgggcagggagcggagcaggtgcatcatgcagttttccttggcagcagggtctgacagggctgtgggagagaagggccagtgtggcgtttggctcctggggctccccgccagggcccctgtggtcgtgaggctgtgggcccctgcgggagagagcccaggcttccaggcctttggggagcagaccccacaggggagggcctggtgtctgggtgggctgtcagcagctgcttcctccaggaggccccaccacgactggtaactcagccaggaggccggctggtgggagcagacccccttcctgcagctgactgcataggccttgggtgctggggcatcccctgtctcgtaacaggacaccccctggtctgtgtggctaaggttaagccagtagggacatatcctgccagcggtggattctctttctccaccccttctgctgctggagcgtgggtgcaagcagccttccgtgggggctgaagctccagtctgccccaggagcagagaaggctgaagggattccttggggctgggtttggcccaggtgggtggaggcggaaggcctgctggccggggccctccgcagaggtgacgggacggtgtgtggtcccgctggaaggctcagcacaacccatctcgagtgccctatggcttaagccagcctcctccttggttctgggatgctggcttctggccactcacctcagggcagtcttccctggatgctcgagcttccaagcaagaggccaacgtccaaataggaagcagaaggggctgcccatggggacatcaggggcaagaggcaggcgagaaagggcccagtgtctgcaccaggtcccagcaggccacacctcaccctcggacccctcagccacaggccccagtgcactgggaaggtcagccagcaaaggaagccacagatatttctcctgctggttacttctccgggcagggagtcctggctcagtctggcccagcccagtcctaggagccctcagggcctcaccgatgccctccatgaaggctgggtagagtcggtccgtgaggagcggctcgggcagttcccggaagtacagcttgagcgtcccggcgatggcgttgatgtccatgtcactcagcatcagcaggatgtccttgttatctgcaggggtggggccgaggtcaggcagccttagctgggccagcagccccgttccacccccgacccatcctgacacagcccccacccactccagctctggttctggtctcccctggaagagcaggatgtagagagggcccacaggtgtctgtgactcggctctgtgggtcggggttgggggaacagggagagatagcctgggggccatctgctgtggctgcttgggaaagggtgtttggggagtgaaatccatcacccagagttcagagccacattcataccatgtggcctgcagcttccttccgactggaacctctccatcgctaagcccctctctggaaggcattgcacacttttcacacgtaaaagcatgttccgacaaagcctcagcttctaggctgcacagaggcaccaacgccggccagttcccaggccccaccccgtcctccactccaggctccccacggattcatccctgcctggccagtgcaggtttcttgacagtggggtatgtggctgctgcacctgaaccagcaggagcagggaggagaaaccagaaaggtcaggcctcaccatggtgggcttcacgcagaggcagcactgccccagaggggacctggggccctggagacagcaggtgcaggctcaaagctctttccctgcggctcaccaggcacccaggaactagcaagaaagacactggagtcagatctgagttttaagtccagaaccaaaacctacaagttgggtcatcctgggcaagtgagtcggcccttgtgagtttctgcagttgcttacctgcagcaagggacaagagattggaggggaggggattacaagagaaagcacttgccacggggactctgaagcagagcaagcctcctctccagggaggctcctggttcccccgagctctcctgtccatcccaccagcctgctcagacacagccacacctgccccggctgggcctcccagactcactggcatcgaagacggccttgagcgcctggatgtccgtggccacgcccgatatcctgtagatgccaacctcctcgatacccctcttctccacctcctccacacactgccggacgatgtagggcaccttggagcgctcccgcctggggtggagcgtgaggatgggtggagggcagcccccacgacagctctcccgtagcaacccccacccagcacacacacaccctggagagcttctagcatttgggatggagagctggggcgggggcaggggcagggcagagaaagaggccaccgcaccccaccccagccagcccacccgaggcctgccgaaggggcatcgacggacgtgggcaggagaagccttgggaacttgggaaggtaaggccgagactctagggaaagaacgtcccccagattcagatgcttgtaggaggcccagcaggcagcccacatgaggaggtgggtcaggcctgagacaaggggccagggtggtggtgaaccgggggacacgtgccctttcccgaggggccgccagtccccgttggtgccgagcccaaacgtaggcccccggctgacagagcttcccgcttgttacgaggagcagacgatctgggatctcacaagagaccttccagcgtttaggtgctggctcgcgtgcttctgaagtgtcctgtgagcgcctctgcggccactctagatccacaccggccatctgccaccgccgagcggggggtaactgattaggtgccaggatgggcaccggcggggagggctggggggcccgggctgggggggacccggggcaccgacgccaggactgggagacccgaggcagcacctacttcgtcaccacgctgatcttcacaccgaagacgccggtctgctttttggacggggtcctcttcaggctcatatctcggctggtgaatttcatggaaaattccactttgatctggttggggggtgaggcaggtaaagattccccagggtgtgagtgcccgaggaatgcccccaaaacacaggggtcccctccccaagactgcaaatgagggctagctcacacccaggtctccctcaacacaacacctgcaggacagcagcgggcagggtgtgggcaggaggggagagggggctgggctgcggggaggtcgaggcggcacagcggccccaggagcagccacagggccgggctgcccacctgctgcacagacgttccacctcccggctcacgccactgatcattcccatccccggctcaccccgttcatctcaatcacgtccgtgtgccagttcttggtctccacggtttgtgggtccagctgcagagagagaatgtgggtgagagaggtgccagctcggaggccaagccagagatctccccgtgggtcagcactgctcagagccagctacacagtcaggaaggcggaagtgagcagctgggataagctgatgtttacctggaaatcaaccctttggggggaccctagcccccaggcccctgtggccgccgtgggggaggcagggcacaccctgttacccgccgtgggggaggcagggcacaccctgttacccgccgtgggggaggcagggcacactctgttacccaccgtgggggaggcagggcacaccctgttaggcactcctggctgccagcccgggacatgggtattattaccccatttcacagatgcagaaactgaggctcacaaaaggtaagcacctgattaggaggcgctcaagtccatcaggagggaaccagcccatccacgtggaggtgttgaagagtcaggagcccgcgcacaggaggctgcctgggtttgaatcctggcaagttttaaactcactaagcctcagttattccatctgcaacagaacctgcctccctgggattgctgggaagattcagggagaaaacttgggtcaagccattggctcccaaataagcaaatcctccacaggggaagtccccaggctcgggctggagcccagggaggtgcggaccccaggggaggtcagaggcaaccctcacacaggactgttccacgttctgtttctgtaactcgggggccttcgcgcccgtctgcctgtgcacctgcgaactaattctgagcaactgtgcgctccctggcactttctgaagtcaaaatctgaacatttccaagtttaaatagttgcaaagagtatgatttccaaaatcatgtcaatattgccatcctaaaataaaagtgtgacatcattccttctcatggattcagtgggatctaaataccccagcgacgtgatacccacactcatccatttaaaaactacacgaggccaggcgtggcggctcacgcctgtaatcccagcactttgagaggccaaggcaggcagatcacgagctcaggagatcgagaccatcctggctaacacggtgaaaccccgtctctactaaaaatacaaaaaattagccgggcgtggtggcgggcgcctgtagtcccagctacttgggaggctgaggcaggagaatagcgtgaacccgggaggcagagcttgcagtgagccgagatcgcgccactgcactccagcctgggcgacagagcgagactccgtctcaaaaaaaaagaaaaaacatctaaacaatgttgaaaaagaacacagctatagggctaatattacccaatttcagggcttattatataaaactctcaaaattcaatattaagaaaacaggccaggcacggtggctcatgcctgtaatcccagcactttgggaggccgagggaggcggatcacgaggtcaggagatcgagaccatcctggctaacacggtgaaaccccgtctctactaaaaaaaaaaaaatacaaaaaattagccgggcgcggtggtgggcgcctgtagtcccagctgctggggaggctgaggcaggagaatggcatgaacccagtaggtggaggttgcagtgagcggagatcacaccactgcactccagcctgggcgacagagtgagactccgtctcaaaaaaaacaacaacaacaaaaaactacacaaacaagctcttctttccctcacagagctcctggatcttctctccttgaatttgtttctattccatttctcctaaagaatgttgtcctagtttatatttttatattttcaagtcctttattcaccattacattttgcttccacaaaaaaaatctgtatacattgaaaacaaaaatttccagagaccacaaggctccaaatattcaaaatatattcaggattagttagtaccatgattggcagtacataattaaaaagacagccaggcacggtggctcacgcctgtaatcccagcactttgggaggctgaggctggtggatcacctgaggtcaggaattcgagaccagcctggccaacatgacaaaaccctgtctctactaaaaatacaaaagtgagccgggtgtggtggcgggcactgtagtccaagctactacttgggaggctgagatggaagaatcgcttgaacccaggaggtggaggttgcattgagccaagatcacaccactgcactccagcctggcgacagagtgagaccctgtctcaagaaaaaaaaaaaaaaagtaagccgacacattatatacattttatttatttttttgagacagagtttcgctcttattgtccaggccggagtgcaatggtgcgatcttggctcacagcaacctccgcctcctgggttcaagcgattctcctgcctcagcctcccgagtagctggaattacagacacacacaaccacacccggctaattttttgtatttttagtagagatggggtttctccatgttggtcaggctgatctcgaactcccgacctcaggtgatccacccgcctcggtctcccaaagtgctgggattacaggcgtgagccaccgcgcctggcctcattatacattttaataaatattaagtagcagagtaactttttggtggaatgctctctcaatgagatgggcggaacattttttgctttagttcgcgtatctatagggtattattttttgctagagtgaaacgaggctcagcatcaatttggttcatgtttctggttttgttgtaaagatgtgcaggtgctgtggctcccagccacaggaccacttgagcccaggagttcgagaccagcctgggcaatgtaggaccatgtctctaaaatgaacaagaaatatgtgaacaatgaaacattttgttcacataaagaagtagatgaggtcgaaaagagttttatcacagccgcgttacaccattctttaacctctctccatgctatccgccttaaatcgcatatatacctattactgaaaattacttgaaatgatctctcagttgaaaattgagtcctccatcagttttgtggaaggcaaagaactggataccacctgacttttgaaaggttctaagtggccactagagtcttttactttctgaacactgaccccaacgtttctttttttttttttttttgagacggagtctcgctctgtcgcccaggctggagtgcagtggtgcagtctcggctcactgcaagctccacctcccgggttcaagtgattctcctgcctcagcctcccgagtagctgggattacaggtgcctgccaccacgcccagctaattttttatttgtagtggagatggggtttcaccatgttggccaggctggtctcgagctcctgacctcaggcgatccacctgcctcggcctcccaaagtgctgggattacaggtgtgacccaccatgcctggcccctaccccaacatttctaaaagcccctctgttccccacccaggaggtctgcgcaccccgggccaagccccgacagccagcctcaggcctctcctctgcagaggacaggatggcgagatgctggctctcaggcagatggctttctggcaatagcacctatggcagctgagaatctgcaaactgatttcctgaaaactctcctgcccacgtcgccctcagaacgtctctgtgcactctgaggtgtgcgtgccacggtttgaacgcagttgctataacaggccactgtcatcacggaagggaaactggatctgggtcagccttgggcttcctgcagctcgatgtaggtccttcccacatctatcacccacacaccggctgggggcaggtggtacccaagcctccgacggggtctgggtctgcactgggttcgccctgcccagagaagggatggaacccagaacaggagacagaagttgggtgtgtgcagagaaccaagtgcccctcagggagaaccactgctccgggcacctcttcacacacgggaagcgtgaggccatcaccagcccggctggaggcaggggtcctacagggtctcaaaggaagccccagctctggccttactttcccgaaacctctctcccctctaagctgcttctgttctttgcaaaccctcctggatcacacaggctgtccctcgtagttccttcatctcgtctggacacggagccgggcctgggtctgtccccagctctgtcccccagcagtagccacacagggtggaggaatcaaatgctctttgtcaactgagatgctacccttggaagaaacattctggagcggccatgccctcttttttttttttttttttttttgagacagagtttcactcttgttgcccaggctggagtgcagtggtgtgatctcggctgactgcaacccgtctcccaggttcaaccgattcttctgcctcagcctcccaattagctgggactacaggtgcgcaccatcacacccggctaatttttgtatttttagtagagacagggtttcaccatgttggccaggctggtctcgaactcctgacctcaaatgacccacccaccttggcctcccaaagtgctgggattacaagtgtgagccaccatgcctggccaatttttttatttttagtagagatggggtttcaccatgttgcccaggctggtcttgaactccagacctcaggtggtccgcccaccttggcctcccaaagtgctgggatgacaggcgtgagccaccgcactcggcctgtatttatttttctagagacagggtctcactgtgccgtccaggctgctatgttgccctgggcttcagtgatcctcctgcctcagcctcctgaagagctggcattacaggcatgtaccactgtgtgggcccttattttttatttatttatttatttttgagacggagtcttgctctgtcgcccaggctggagtgctgtggcgcgatcctggctcactgcaagctccgcctcccgggttcacgccattctcctgcctcagcctcctgagtagctgggactacaggcgcccgccaccacccccggctaattttttgtatttttagtagagacggggtttcaccgtgttagccaggatggtcttgatctcctgacctcgtgattcgcccacctcggcctcccaaagtgctgggattacgggcgtgagccaccacgcctggcccgggcccttattttttaattgacacattgcagttgtatgtatttatggggcgcagttcgatgttttgagaccaccccttcttgaggcaggtctctccacacatcagcataagcctcaggccaattccatggcccctggtccgattcacccacagcccctcctccgccccagcttcccacgactgggtgcctcctggcagcttctgcaggaagctgagccaatggtcccttcccaagtctcagggggacctggacacaacctggtcggggggagtgtgcaggatttggaggcaggctgatctgagtctcccattcaaccgtgcgcactcgggcaaggcctttcacctccgtgaacttcaatttcctcatggaggcatccacacctgactcacagggctgttatggaagagtgagagcaacggacttatctcgagctcttcctgcaagtctgacactgatgaatcctctacacacagcatctgcgttcatgatcatgatagcagacatatgcggtttaagctctcatagccgctcccatctcacagatgaggatgctgcagcttaacgagagtgaggaatttacccagtgcacacctaggaagtcagagctggggttcaaaatcaaggcccccagcaccctctctgctgaaactgcagaatgtgtgaagtccatgacccgcagctgctgtaactgctgcttcctcagaaaggcaacatcgggcctcctggtgtgtgtcccgacccggtgggcagacctggtgctgggaggccacccccagtacagccctcccgctgcctcgtgcccatcacttccgctccagctgccaggttcaacctgggcacatctgacccaggactgcacctcctgatgctaaggcccagttctcgccccgcctcctccagagagccttctcggagagccccaggtcacagtgggaaactttgggtcctctctgccttcctgctccactaagatctaccctctgcagcctcccaggcgacacttgctgctgtctcacacactccagccccttctgaggccaggcctgggccaggggcactttcctaagctgtaagcccctcaagccctgacatcttcctggtgcctgctgcaggtgtggccctggtatctgctgcaggtgtggccctggtgcctgctgcaggtgtggccctggtatccgctcagagaggcctgcctggccccacggtgccctgacaacgacgctctgtttcccaggaggctatcagcctccagaaaccaagtctatttcaggatatcatttaaacacagaggagggagggagaggcacagcgtacattttccagagaaacgctgctgcccgcaactgcgctggctatttataactcctgggaaatgtggactgtgctatttcctgatgagattagcaccggggtggaggggctggcccctgggacgttggtggatgggacacctgactgctcaccctctggtcccagcagacaggtgccttccatgggcccaggggagcaggtacttgggggatgtctgatcacctgaagcagggagacagagggagctcgtgaagggtcaggctgggaagaccaccaggggcacacgagcactggggcctccccaaggtgggccacaggcaggagacagaaacaggctgcaaaacatcgtggagccaaaaggcggacgaacgactgggccaggggtcgacgactgggccgtacatggtcactgagagcagctcaactatttccttcttttttttttttgagacggagtcgcactctgtcgcccaggctggagtgcagtggcgcgatctcagctcactgcaacctccaccttcgggttcgagcgattctcctgcctcagcctcccgagtagctggggctacaggcacgagccaccacgcccggctaatttttgtatttttagtagagacggggtttcaccgtgttggccaggctggtctccaactcctgacctcaggtgatccacccgcctcggcctcccaaagtgctgggattccaggcgtgagcccctgcatccggccgactgttttctctttgtctgggcacttcgcctggtcaaatcatgactgcgcattcaggcctctcccaaagagaaacgctggcgctgggggctcatgtccaggagacgaccaggtcccctgcggcgaaaacccagcaggcaggggcaccgggttgaaatggggctccgtcacctccgagggagcaggagtgaagacccgaaggtgagcgtggattctctgccaagaatcccgtaggtggctggtggaggtcgcctcgcctttctggaccgaagtgacctcatgtttggggcaggaatcagcaaagtggccccgcagcggggagaggatttgaggctccagggcagagggtgctccacgcacacctgagcgtcctccagggctgagtttcaggaacatcctggggatgcccctgagggtctcagcccttcctctcggctcacctctcaccccctggggcaggtgaccccatttctcctgcctctgcccggagggctgctcccggccagctccccgtgctcggattcaggggcacgctccctccggtctccactcctgctccctcggaggtggcagagcccccattccaacccagtgctcctgcctgctgggccacactctccactccagcacgcagctcgccccaaggtcttcggagatggtttccaccacctcccctcccacaagccctcacccagggccctttaatccacagtaaggggcctgtggtggccctgcccaaggcaggtgggacttagaactggccactgggggtctcagtggaggggggagcagaggtcccaagcagccttcagtggacgccactcaggacgtgatccaggggctcactggacgacgggaatctgaagaccacatttgccagggccccaagagctcccaggcctccgcctccttcctgaaagccgcttccctcaggagcccactcggtcactcccaccgcccaggagctgaccccccgaggagccctgcctccaggcacagccctgccctcgggggccgccccatcctgcctctcacggctggcgctcttctaccctccaccctctgagccccggcatcccagaatgcgggagggtttccctcagagggggttgcagaggttcataaaaaaaagtgcttcttcagccaggtgcggtggctcacgcctgtcatcccagcactttgggaggccgaggcgggcggatcacaaggtcaggagatcgagaccaacctgaccaacgtggcgaaaccccgtctctactaaaaatacaaaaattagccaggcgtggtggcgggtgcctgtaatcccagctactggggaggctgaggcaggagaatcgcttgaacccgggaggcggaggttgcagtgagccggagttgagattgtgccactgcactccagcctggcggcagaaaaaaaaaaaaaatgcttcttcacaacaaaggtggtaaatctgttcctgagaggtgggacaggaacgctagaaaatgactcccagccgggcgcggtggctcatgcctgtaatcccagcactctgggaggcagaggcgggcggatcactcgagctcaggagttcgagaccagcctggccaacctgacgaaaccccatctctactaaaaatacaaaattagccggaaatcacttgaacccgggaggcaggggttgcagtgagccaagatagcaccactgcactccagcctgggcaacagagcaagactctgtctcaaaaaaaaaaaaaaaaaaacagaaaatgactccagaaggacctcagtgcaagtggcccccggacagggaaccacgtggaaggtggagctgtgtgggcacatttcacgcctgccctggaggggccgcggagcccaggccctgagccaggcatcgggtctgagggtgggcacgtttcctggggctcccaggccagcggccacggtggcagcccgggctggctttcccctgccctcccccaagggcagccccacgctcagggctgggtccccttgggacaccgaagccggcctgtcattggggcagaccacaggcgtgagaggcacggcggggctggcaagctggcaacgggggagacgggagttgccaagaccctgcctctcctccctcgaggaggcgccggaggattccgtcaacgtgactgctccgagcgactccgagagaggcagggcagagagggaggggctgccaggacctacccctggcttccagctcagcagctgggttggggacaccgggccaggctccataaactctccacacatcttcccatggcttggcatccacactgctaggccaggcaggctccgcctctccagccctcaccctgcagggtcagccaggctcccttgtagccaaggtgtcctgcagccaaggtgtgcccacctgccatacccaggccagccacagataggctcgggctgatgccgtgtcccagggcctcggctggcttcccctccaacaccagagaacttcgaagttccccaagcctcatgggaggaaggggattagcagctctgaacgacgcttttgtccaaggcaggctagcctcttagcacccgcagcaacctgccttccccagcgtccattctagcacctctgcctgccccacgtccgctccagagcctctgccggccccacgtccactgcagagcctctgcctgccccacgtccgctccagcgcctctgccggccccacgtccactgcagagcctctgccggccccacgtccactacagcgcctctgccggccccacgtccactccagcgcctctgccggccccacgtccactccagcgcctctgccggccccacgtccactccagagcctctgcctgccctggcacccactttgcttttagcccccgggctgggcatggctgaccttgaggagaagcagacaaaatccaaacctgggctgctcttggaggccccacagccaggcacatctcccccagcggcctagggctccgtcttcctcagggccagcccaccccaccactgcctccctgtgcaggcagcctggaggcttcagcttcagctcagaactgggctacaaataccagccaggaagccggccctgccccagcccagggcaggtcgaggatgccagagtggcaagggcaggggcagtggggccctcttgagaaaaggaacaggccagggccaaagcaacacggaggccctgtcctgaaaggaaaggggcgccctcagaggtcaaagtccaagatgagaggccttctgtggtcctgaccaggaagcttcacgctggaggccacgggaaggccaaggacctgtcagacctccatgggctctgaagcctcgagctggacctggagtggttaagaaacattaacagggctgggcgcggtggttcacacctgtaatcccagcactgtgggaggcctaggtgggaggatcacctgaggtcaggagttcgagaccagcctggccaacatggagaaaccctgtctctactaaaaatacaaaaattaccccggcgtggtggcacatgcctgtaaacccagctactcagggggctgaggcaggagaaccgcttgaacccaggaggcggaggttgcggtgagccgagattgtgccattgtactccagcctgggcgacagagcgagactccatctcaaaaaaaaaaaaaaaaaaaaaaaaagcagcatcaacagccttctctgataccagcttcaccctccctgcccgggcccagaacactttctgggcatggagcttgctgccggggacgtgaggggctccagcaattccagggcccaggtcagctctgagcggcccctcccaggccttgccttgctccgagtctcacgttcagtggcgtcgtcgagaagaaccgtcttgcctgttgctatgcacagcgtgccaggacgggcaccacactgatgcctgacgggcaggagcccggcgtctccagacgctcccatctggggcacgcagcccaaccccaaccggccacggaaggcaggacaccgcgggtgagagcctgcgctgaggctgagtggccggggtctgaacgtcgcccctcggctaagccactcacgtgacttcatctgagtcactctctgagcctcattcctcatatataaaaacagtctgggccaggcacgggggctcccgcctgtaatccagcactgtgggaggcggaggcaggtggatccactgaagccagaagttcaacatcagcctgcgcaacataacgaaacctcgtctttacaaaaaatacaaaaattagccaggcatgttggtacatgcctgtagacccagctacttgggaggctgaggtgggaggattgcttgagcctgggagatggaggctgcagtgagccgagatggtgccactgcactccagcctgggcgagagagtgagactcccacaaaaaaaaaaaaaaaaaaaattaaaaatgtaaaacaaaattcaaaacacatttaggcctggcgcagtgactcacgcctgtaatctcagcactttgggaagctgaggcgggtggatcacctgaggtcaggagttcaagaccagcctggctaacacggtgaaaccccgtctctactaaaaatacaaaaaattagctgggcgaggtggcgggcgcctgtagtcccagctactcgggaggctgaggcaggagaatggcgtgaaccccagggggcggagcctgcagtgagccaagattgcgccactgcactccagcctgggcgacagcgagactccgtctcaaaaaaaaaaaaaaaaaaatacaaaacttggccgggcgtggtggcgggcacctgtaatcccagctactcaggaggctgaggcaggagaatcgcttgaacccgggaggcggaggctgcagcgagccgagatcgcgccattgcactccagcctgggcgacacagcaagactctgtctcaaaacaacaacagcaaacaaaaacaaaagaacccaaacaaataaataaataaacagtgtgaataacagcaccttgtaagtgtcacctcagttgcgtcacaggctaagaatgatgcctcgtacagtacgtgttcaaaacatatcgtcacagaactgtgcttgaacaccccgcggcttcccactgcattcggattaaaggccctgtcctgaaccgcagggccccacgtcgcctggccgccgtcccctgaccccacgtaacgccccacactgtccccctctgcctctgagcacacctgcctcggggtgtggaccttgccggttctttggcctggaatgcactgcccccaggttttttatggctgaattcttcttgtcatttaaatcttcgttcaaaagtgatcctctcaagccaggcatccccccgtcactctctactgcgttacccagttgtgtttatttttttcacagcactcatctgaccggcaaggatctcatttgttgacggactcctcctgcagacagggtctcgtctgtctcgggcgcctctgtgtccctagttcctgcaggcctggcacgtggaaggtgctccggcaatactcacaggccagaggaaccaactggggcatgggggaaggaggtgacaatggctccccgccggggctgcttcaggacagggctcaagaagccctgtgttcccactaaaccccctgctcccgtgtccactgaatggctggcattggcccaggtgcagccctgtgacagactctcccagggtgctcagggtttaaggtttaggactaggaatcttgagacatggccaagatcatcacatgaactggattccaggagatcatcctgttcagctccttcattgagctgataccagagaaccagagaggcaaagggatgtactcgcgggcacacagcagttaagtagcagactgagacgagaaaaatgggaaaccttgactcccaccggcctggcgccctgtcttctctggcaccttgtgccacatgagcctgaggggctggggaccccggaggcctccccgagcacagccacggcatccaggcatcggatgggaagggcgctgtggatgtcacggctctggctgtgccggtcatcggtaccagccccggctggggtcacggtccagaaaggagatccctccagatttcggctcaggagctggttccgctgtcttgaagcgggactggggaagtctctgtggggatcctggggcctcctggcctctctacagaagcccaggaccagctccacgggcccctcccgcctctccagggcccatcctggagggccaagggtctacggctcactggacccaggactgacgctgcgtttctccccagggtggggcaggcaggtcacaggcgcaggggactgtctgttcctcgaaggtgctggggggccgtcaggacacaaacatcttcctgccccagcatgagttcacaggggaaacgaggtcaaagaacagcacctgctgaccagttcccaaccacctgggcagtgagcgaggccactcagcagagggccaggcctctccagcaccagcgccctgtggccaacacctggcagctcccccagactcacacctgcaggcttgggggcgcttccaaaatgcctggggcagctcccccagactcacacctgcaggcttgggggctccttccaaaatgcctggggcagctcccccagactcacacctgcaggcttgggggctccttccaaaatgcctggggcagctcccccagccacacctgcaggcttgggggctccttccaaaatgtctggggcctcattgcctctgggtactacagcaacactgggctcaggcagctttggcctttgaggaacccccttgattggcaggttctcctctccctggtccagagccatccaaaagctggggcaccgcgcccagcaccgctggctggccaagccgtctgtggcctgcagggaggccggggaggaccagcgcccttctaccctccctaggtaccaagaagcggcaccttgccaagttcactcagagcagggttcccgccttgatgtctgcagccccctctgaagtcgcacacagtgtgtgcatggggtggctctgtgtctgagtggcctccagaaccttcatcagattctcagagtccagggttcccgctctgcggactcaagcaagcctcttgggagctggcctggcagagagatcagagagtactcatgaggccccagcagtgaggtctgcccactcggcaggtgggtaagtgctgtggaaaagagggagggtcgcccgaccccactgccaacctgtcagccagcctggccgcagtcaggacccacacataggcccaggaagaggtgggctggtgtaggggcctccagctctcgggggaggcagcactgtagtcccctgtctgtggctgaggggtcgctatgggggtgtgtgtgaacagagaagacgcacgatgaagctttcttcccaccgggaaacaaggaagggcggtgggcagccgggccaggccagacttctattgcagaaggctgcgagatctttcctgacgcccagactggattataaaataaagtagacgagcccaagacatatctgtatcttgtacccagcacctgtgtaccctcgatggccaagtgagtggtagagtgaacctctggggtgtgcacgtggtctgcacacctggtaccatcaagaaggaataaacgacaggctctgtgaggggtggggttgtcctgcggtggcgatcaagctgacaaagaaagggaccctttcctccccccaccccaagaccgagtctcgctctgttgcccaggctggagtgcagtggcatgatctcggctcactgcaacctccacctcccaggttcaagcgatgctcctgcctcagcctccctagcagctgggattacaggtgcccgccaccatgcccggctattttttttttttttgtatttttagtagacacggggtttcaccatgttggccaggctggtctcgaacgcctgacctcaggtgatccacccgcctctgcctcccaaagtgctgggatgacaggcgtgagccaccacacttggctaatttttgcattgttagttgagacggggcttctccatgttggccaggctggtcttggactcctgacatcaggtgatccaagaaagggaccttcttctaagaccatcatgagcctgaagcttccccgaatggcccaagaggggctctccaccccgcccttcctcaggtaacacctctgatcctctctgaagcaaaggcagcagctcccatcacagaacacgggactcaccgtgggggtcagcagtgccggtgtccagcttaagaggagctctttggaagtaggggattctcagacccacatggctgtgcttcagggcagagacaaggtcacctgaagctgcactcaatctccttacaccctgccggctcagcctgagtccccaccgccggccagcatctggcctggtctgggtcaggagcgtcttggacttggttgctctataagggcctcaacttccccgacagacaaatgcttctggaccggcctcccttcaggccctcttagcctcctcacggctcccacaaggggatgctgcgggggcagggtgggggggttcctccttcagccccttcccctccaaagctcaagcgagaatctagaattcagccccttcccatccaaagctcaaccaagaatctagaagagggaaggatgggagggagaggaaggcaccgggcctggtctacttgagtgtgatttgaggcaaaaaaaaaaaaaaacaaacagggaaaaggaaagaaaagtagaaacgcgaagttcaataccgagagccctggctgaacccacaaacccagatgccacgtgtctcccagctaaacactcgcacaaaaagctgactgccaagtcaggggctggaatgaggctttggcccctgaactctcctccggtgacaagaacagcccaaccacagggacccccgctggtacccaaaggatcctccgtgagtgtccctgcctcctctcccccagaaaccagaggccctgcactatttaaaggctcagttctgatcatgagacctttccatctgaacagattgtttaatcccagccctggatgagtcacgccccgcctccagcctttaatgaaccttcaggtcagtggaagcaggagggccaccggtgtttctcgcacccacagcatcactcagggcaaagttaacgaggagttaatgaggcaatccctcctgccagtctgggcagtaccaggcacccttcccttaccccaccgaaacgaaactgcctagtcccagcccctcggcccaactgtgaagctcctgcaggaaaatgccaggttaatgtggctgaggatagaaagcaagaggcctggccctttgactctgctgctcacccgctggcctgcgcacagtgaggtgggaagcacagggcagacgtccctccgtccaccacagcgctgacccgtgtccacgacacggacacactgtggcagacgtccctccgtccaccacagcgctgacccctgcgtccacgacacggacacactgtggcagacgtccctccgtccgccacagcgctgacccctgcgtccacgacacggacacactgtggcacacagcacacgttaggggatggaatcgctcgtcacacagagcagcccagggccggggccaccctgagctgcactgacgccaactgctcagcagctcaatagcccggcgtctgcctggccaccacccctgcccagagatccccatcagacacggagccaccaggcactgccagaggcaaacccagctaaggaattcttgaaggggcttctcagttctgccggccacaaatgcatagggaaagaactgaaagtctgggacctcaggtttaaaagttgccccctgcccaccaggcacctcctcaaaggggcaggtaaactggaagcgccctgtttggctggcgctggacccggaacctgccaggtcagtttcttgccaaccctgacgtttggggatggatggtgagctctgggctggtgcctgctggcctcagcaggggctggggaggggatgagtccacgctgccgggcacagacagctgcctcagcacagaggggctctggcagcagctggggccagcagggctctgctagcccagtccccagggaggctgaaggtgacacaggggccagtgcagtacagctcaagttgctgccctgcccagcactttccagggctgatgtcacctctgggaggtcaagtatgccccatggcaggagctgaaacaaaacgaggggccagtgagcccaagatcacttcgtcctggctgatgccaggagcctcaatgccggctggcagtaagagcctgcagagaggtcctgtgagcctcaggaggagctgcagatccccaccacggactggccaaggcctcccttgttgctctcttgatggatgggcccagccctggccagccggactggcactctgagacagctaactcggacagttgatttgatctgcagagttatcgagcacttcctgtgcgctgggcgctgggtctggctcttcctcacgtgcctgatgccagggccccaagccagccccgaggcagcctgcccagctgcaggacagtcggcttctatctcagattttaatcccaactcaggtctggggctgcaggggcaccggcggtctgccctggcacatggacggaacgcctggtgcccggcgggcactgggcccacagtcagatgggtggtccctgaagggaagcctcgagcccccagacccggcagcatctcccctccccacaatcctgcacagagaaacctcacacggcagacggtgctgcggtcggcgcccctcagcaaaggggcagccagcaaggcccgctggatgcagggatcaggtagaggctgaacagggcggcaagacatagacccagaggcaggcgtctccccgtgcgctgtttgcactcccggagtggaaagcagggtccacctgccgagaagaaacctcccttctcccgaggcaggggcagatgcccgagcgccagggtccgggtgggggcggccccagcgttcgccatcaagttcaagccacttagagggacgcgcacagaccccagctctgtcccgggactccacggagggggcgggagcgggaccccatcagcccccgcagcccccgcagccccccgagccccgcagcgcccccgagcccccaccccccggaacctccagcccccgcgggcaccttgtttcggagcagcttgttgcgcacgcggccccagagccgggcgccggtgttgggggggcgcttgctccccgactcctccagcgccaggggttcgcgccccgccttcgggctgcagtcgggctggggcaggacgtcggtcatgccgggggggacgggacgcggcgctggagagaaggcgcctgtggagcgctcagtcccggctgccagtcccgctagttccctagtcccgccggctttccccgcgctcgcctccctccctccctccctccccgcgctcccctccctccctccctccgtccgcgtccctcctccctcctccctcctccgcatccctccttccccgccctccgcgaggctgcagcccaggctgagcgccgcctcccaggcccagggccgcccctccaagccccaaccccgggtttcatccctggcaagggcgctgctcctccccgaccccgccgccctccctcgcaataaagtttacaccagccccacaccccagtccctccctgctgggtccccgtgttgcccaccgggctgctccaggggccaagcggaggggccgggggccaggcgggggctgcattttggccacaaacagctgccctcctccccgggcaaaagactctgactgccctggggtcgcacttccccacccccaacttctgccccaggcaccttcctcagagccagcttggtgacccggccagacccttgtggaccggcactcagaagcctcctcaggtgagaaatgtaaggataaaggagacccctagtgtgggaatcccagtgggaatcgggtcactgatctgctcagggacaggagcaaaagcccgaaacgacgcgggtcacacgtccagccagagatgcctcttgaggggtcactttgaaccatggccctttgcacctcaccaaaaaaggtttccgctgccaggggcagaggacgccacgggcaaccacccgcgtccgtgctgggcgcagaggacgccacgggcaaccacccgcgtccgtgctgggcgcagaggacgccacgggcaaccacccgtgtccgtgctgggcgccttgagagagagaagaacttgttcttgaccttcaatttatttagtgaactttctaaccgcagagactaggacacaaattacgtctcaaggtaacagtgcaagttagagtacggtattcagagaaaagagaaaggctgaatcccaaatgtttaactatgcaaaacccaggggtgtctggggcctcggacctctgcagaccccagcacggcacagaaaggaaaccagtatttgcaccgtggcaaccgcgaaccaggtctttcaaacgcccgactgcatgtgagcctcacattcttgtcatgttggtgttactgccctgttctagagaggtgaggacagggggtcaggaggtccagttcttgccagggttacacagtgccaagtgaggatggggaggtccctccaaagcccttggtgctcacaagcactgtgccttactcaaacatggatgatgctttggattcaggaaaaagagctgggtcaggacatttcttggttgaccccaaggcaggtgggtcggggcccagagacgagccctcggcatccggcgtcaccagccaggcaggtgtcgggatttctcctcagaggccttggtgtttttgaggaataggtggcttccctgcagagacagccgtagtcagagctgtccttcgtggaaggctggcagggaccaggcatcatggattaagtcacttacccctcccaactgtatgaagtcagtaccagcatccccgctttacctctgaggaaacgaagggctctgacaagctgagctacgtgtccaaggccaggacaagctggaacacaaacggaggtctggctaactccaaagcccacacccctgtcactcactgtgatgccctagtgtggcaggatctggccctggactatcttccacctggctggtggaggggggccttggggcgtcctgcctgggctagaaccgggcctcagtcttcactgtccctgcaggggcggccagaccagctccacttcttcctggctcacacgtcacacgcacccctggacggtgcacacggaacttcctcaaacctgagctgctaagtgggggctgagccacaacagcctcaccagcaccgcctgagggggaggtggagagacggacggaggtaggaacatgcctgtgtcccctaactgaggcctcagtcacccttctccacccctccttcgcctgccccttccagggctccaggaggacccagacagccccttcacacagccacaaagccatctcctccaggaaggctctgctcactcctcaggccccactgcttggtcccactcatgtcatttttttttttttttttttgaggcagtgtcttgctctgttgcccaggctggagtgcagtggtgcaatcttggctcactgcagcctccgcctccccagctcaagcaactctcctgcctcagccccttgagtagatgggactacacacacccaccaccacgcccggctaatttttgtatttttcgcagagacgaggtttcaccatgctggccaggctggtctcaaactcctgacctcagcctcccacagtgctgggtttacaggcatgaaccactgcacctggccccactcatgtcactctagaggtagtgactgagggcctggctgcgtgcccgaccctggggtgggggttaaggcatcacagagacgaatcaaaagtcagtgcttgacaaaggggcagccaagaaagcagagatgtccatcaacaggaggcagacaagcatttgtgcatttggcacgggtcacttgtgcacctactaggcaccacgcccagatggacaaaacccgcacaaaatcccatattacggcctcagaacaggacagacaaaatgccacgaacatcgagagatacaatttccagctggaggcaactggggaaggcttcctggaggagaggggtcagcgtggggccctcggggctgtagggaaaggccatccaccctcactgggtcccagctttactctacctccctccagcaaacgtgcaatggctgtcatgtaactggctggtaggatgccattataactgctctccacgtttgcgccacagtgctcctggtgccgtgacttaacttcagaatcggcccctcactggcctatggtccccttccctcgggctgggtcccaggccacagggtgcagactgcgagaatgcacgcccctccctgccgccgggtgtgggggagaagggggccgtgtgaatcccgttcccaaggcccggcactcatctgtcttaggtaccacaggctcaatacttgtctaggtaaagcaagctcggactggatgaacgatggccagctggtctccatggtgacataagtgccttcgcagatgggtagccgagttgggagtcttcccctgagacgctcatctttcccttcctccctatggactgggggcttcctctggggacagcgcagacttgccttctctcccccaagcccgactcattgcttcctggagtcaatggtcttgggtggaagaagatctgtgcaagacagatgtccccagcaaaagcagaagtctgaattctagtcgctgcagcccaccacggacccctcctcatctctgctgggttcagctcaggctatcccaaccacctgggaaggggccactctccttcctccctcactccttccatcccctaaacctgctcccccccaccccttccaccccctacacctgctcccccaccccttccatcccccacacctgctcccccaccccttccatcccctacacctgctccccccaccccttccatcccccacacctgttcccccaccccttccatcccccacacctgctccccccaccccttccatcccccacacctgctccccccaccctttctacccccacctgctccccccaccccttccatcccccacacctgctccccccaccccttccatcccccacacctgctccccccaccccttccatcccccacacctgccagagccctcctcagacgacctgcaagactcccccggctggataaacagagcctggtggtaaggcccccacgaacagatgtcactgcctttggaattaaaaacattcctagtggaccatcccatcctccctcagcccctccccaggctctctgcaaggggagtgagaggggctgtccccggggagacgtgggtgggaccccgcattacacctagggagggggtcatgccacccagcacagctgtgactgaggtaaaatcgggttaaggtgttcagtggcggcatcaacgaggaaaaaaggtcacatcctgccctgtgcgagcgggaggggcaaaggctgcagtggggctgcctcggtgacagctgggggtggggacggcttccaggcaaatcctccagcctgtgagcaccaggaggaaggttctgcctcagaacctagaaatgcagctgccgctttcctggagtgacctcctttttcccaccagaacgacgctcctctcccccagcccacacttgaaccccgattcctcgtcctatccgctagcgcaaatgactccaggagagggggtttctgagcagccagctagaccaaggccacaggcgccccagtggggatagcctgggagccagttggggcggggagagccccaagaggccgcccagagagtccagagcccaggaggagcctggcacccagctgaggatggggaccgaggggatgtggctcaggtctgccaagaacactccctctctcagcaccagaggatcagggcaccggctgggcatcagaggaccagagctgggggacaagaaggtgctggaggagagcagggcggacccgaggctggggggcaagaaggtgctggaggagagcagggcggacccgaggctttgggggctgcagagagcctgccagtggctcctgcccaaagacaggtgcaggctccaggatgagagagagacaagcaggccgagcatgggagcccggggtgcccagcgcccacacagggcgtgcgagttgggcgggaggatggcacgttccggggacagctgtgggggagtggggacgggagtgtcccccaactcggtggctctgtggtcactgcattcttactgtgtgttctgaccatttcctgtaccgaccctaaccaaaacctgcggactggaaggccaaatgtcttcccagaatgagacactgagactcactctaggtttttctccccacccatcggatacctctgggtatttgcaatgttcagagcctgcattcagcctggggacaggagtcacccagcagccaatggcagattagaccctaggagctatgtttgtttctttctttccttccttccatccttccttccttccatccttccttccttccatccatccacccatccatccatccatccacccatccatccacccacccacccatccttccatccatccatccatccatccacccacccacccatccatccaggtggggctgggagaggggtccagggtgggctcaaggttgaagatgggcacagtgtaaggaagaaggcagtcaggatgaaatcagttgctctacggcccagacctaggcctgcccaaggtaacctgctgtcctcccaactccccaaaggcctgtgccggctcatagggcagtcccgagtacgtgctgcttctcacacagctccagcctccctctgcctgacctccagcctctctctggccacgtcaggctggtgtcgccagggtgctcggtggttctaggtacggaggagaggctgaaacagcccaagagcttgtctgctgcaggagaagtgtcccgacagcccgtccctggcaaaccctagcgattctcacagcacatttggtcatggaaaagggtgaaaaatgcacttgagcctttgggaacatcttgcttatctagaacaaaactcacccagggacagagtgggcagggcgtggcccctcagtatgctgtccctaccgctggagcccccctgggctgcttgcctgctcctcctcccgggaaggagggggtgtggccgggtctcccagcacagccataaattgcagcctgaggcaggaggggctgaggcctgaaggtgggatggggtcgccgagcctccctgctctttcttcattctggattcccgaacacctcccttccacccaagctccgagctcatggtggccagaagcaaagccctgggagccagggacctgtggactcaacggctgtgtttttctctgggttcagtttccacagctgtcaaatcaggagctcggaacagacacatggtctccggtgagatttcttttctgctgaggacgcacccctgccgttttttccaaatgaaattttatgccgacgtctccctgcccacctcgtcggataaaagcagaagcagagagagcaggcgccctggctgaagaggggacgtggggcccactggctcacacctgcttttccaccacccctcgcctgccttggggctcacgtccctccccggaattcccacgccccacaggcagaatctgaggcacacctcagcgccccgccctcctttcaggcatctacagctcaaaccttaggttcccagcagctcctagaggcagttctcccgaaggcctcgctctccctcggggtgggggacgtgggggtctgagagattaggggctttgtaaggacacctctgggtcagacgctgaacctgcagctccagtcgtgtctctgcttctctccctcctttgggaaactcagggcttttgctcagtggctgtgggttcgccctggcagcctcgagaggggacagcacctgtctagtgggtcaggcgggtgtgtctgggtcatcttgcgtctccagccgcgctagggtctttcctgaagccagggcagctcagcacttgcctccgagggcgtgaacacggtgtgcccatccctccctgccccagcccaaagctacaggctacactggggcttagaccctcgcccagcaccaccaatgtccacgcccccaggccacggcaagggcggggctggccacgaggggctgctgtgagtctgcggtggccgcaggcttgagggaggccagcagagcccaccctaaaggtgacccccgctcagcattcatctgcagcctcagccctaactcaagaaattctctggcaacccttctgtggcatccttctcttgaagctttcagaaaacacggaaagtgggacaaccctggagctgatcctttggattcctaggaggaagcagcagcctccgccagcagggaggttagcggctcacggggaggaatctatgtctgcggctttcgcctcggcgagttcgctgaatgccacggacccgagaggacactctctgaagggtcacccgaggttggccggctaagatcaaacccaggtcccgtgcctctgagtctgggagcccggcacccagagctgagaacacctttttttggtctgtcgggaggctggatgttctcagggcctgactgcatcggctcctgaggtcctgtctggaccggcttctctgcatggtgcccacccttcagaggcgggtcagggggagcgggcgccaagcctgcctgctgaggcggcacttcccaggggtggaggggagcggggggagccgactcacacctccatctgcttcctgctggatgcttcctgcccagaatccactgggcagagtccaggctcccaaaatcaggaacacctgggcgatggaggcagctgagcagggctgacgagagaggttcgtgccccacgtttggaaaagctttcgacggcagggcaggcactctcgagggaccctcccccgacttcccccacccaggacagtctctgctgcccactctccaaggagaaccaggcgtctagacctgccttgaagagggacagcaggtgggagtctgggctggagaacaaatgtgcccgaaacagctggggtgggcagggccagagcaggacaatggctgcagtcacggggccctgggaggaagtggagagtcagcaggaagtagaaccaggcctggggctcagcctccacggtccctatgtgcctggggaactggcacaggggtgggggtggcggcagagggaagagccccacgtgggccagctgtgagggtggcaagcagcagggaggcggaactcctaagccaggagccgaggcggggcctgacatgcactcctggccttggcgggcgccgacgcgggctgatcttccagggagaggtcactccggtgtcccacgacagggagctatgggggctgtgagtgccagggcaggggttggggacgggagagatggaaccaaagggaaaggcctgtgttccttcccagttgaatcaaggcctccctcagggccaggggcccggctgtggtcagtgtggcccacgcgtgaggcctggaacggggaagcactgaggacccacgttaccggccgtcgatcatcttcctgggaggggtcccagtaccactatgaagaacgagagggggccggagctggaaggggctctgggctcacaacccagggcccccaggacgcacgcgcaggaccctcaggcagggtcgaatggggacaagacaccccttgggggtcagagggagggaagtggggcaggggagcccttgactcctgccctggcgggctccggccccacgttctctgcaagcttcctcgtgctctccagagtaattgaaaccagaagctgctccccagccgctgacaaaggccccttgtttccgaccacaccaggccaagctcagagctgccgtgctgggtcatggcagggaaacctcgggccagccggcattgagggccccagccttgacttccccgcccctgctatgaggttggttcagcaaagccagtctgaccccatcagcttaagaaaataatgctgcctcggccagccaaaggccccgacccaggggaccacttataggtgacagcctttaggagggggctgctggacaagtgacacccagaaccactggaagggggtgggggacagggtgcctgaacccgccagcttagggcaaaccacgtactgactccatgccaggccccgggtccagggtttcatggaccctcacattcagtcctcttacagcccatctgacaggtcaggaagctgaggctcagaggcaaagatactcgctctgttctcccaactaacgatggagaaagctagactcagccccgcaagatctgtctggcctcaaaaccccggcaacactggctaacgatccaagttctcgttttcctttttttgagacagagtctcgctctgtagcccaggctggagtgtaatggcgcaatctcggctcaccgcaacctccacctcctgggtcctggttcacaccattctcctgcctcagcctcccgagtagctgggattacaggagcgcaccatcacgcccggctgatttttctatttttagtagagacggcgtttcaccatgttggccaggctggtctcgaactcctgacctcatgatccgcccgcctcggcctcctaaagtgctgggattacaggcatgaaccaccgtgcctggcctaagttctcttgttttctttaccagacggtgaggtcctggtcattctttgtacccacagcccagggcctgccattcagaggatgtatcgtaaacagaaacaagtgagtgaacaggtgaaagcgtggacgcacacgtcacagcaccgactggctcttccaggtatgtgagatcctttaagccagtgctgaaggtggggtaggaatagttacccccactgaatcaataaagaaacttggccgggtgcggtggctcacgcctgtcatcccagcactttgggaggctgaggcgggtggatcacaaggtcaggagttcgagaccagcctggccaacatggcaaaaccccgtctctactaaaaatacgaaaattagctgggcatggtggcgggcgcctttaatcccagctaaccaggagactgagacaggagaatcacttgaacccgggagacggaggttgcagtgagccaagactgcgccattacactcagcctgggcgacagagagagactccatctcaaataaatataaataagtaaataaataaaagaagaaactgagatgccaagaagtcaagggaccagaggttgttcccgcggcctcagggtgactgcgtctgcattcgatgcacctaaaccactgaccaggggaggaaagagctgacccaggaagaagggtgaaggggtcaaggggcagggacacttggccgggagggggagagaaggccgaggcagggggcccaactgtgtgcttcaactacaggagactaatagtgaccagtcatgccctagggtcacgggtcctgctcatctattacagctgggaggcaggtgggggacagagcttgggtctggagagaaggaggctgtgctgtctccatcctcagggacaaggttctttttctcaacgaaaggcaagagcgttttgggtggaaacaacccaaatgtgcacggatggacggacggacagacggataaacagacatggcacctacatccacggacggacggataaacagacatggcacctacatccatgaatggatggataaacagacgtggcacctacatccgcggatggatggataaacagacgtggcagctacatccacaaacggatgaataaacagacgtggcacctacatccacgaacggatggataaacagacgtggcacctacatccacggacggatggataaatagacatggcagctacatccacagatggacaggcggataaacagacgtggcagctacatccacgggtgggtggacaaacagatatggcacctacatccacggacggatggataaacagatgtggcacctacatccatggacggatggatgggtaaacagacatggcacctacgtccacagacggatggatggacgaagagacgtggcacctacatccacggacagacagaaggacaaacagacgtggcacctacatccacagatggatggataaatagacgtggcacctacatccacggatggatggatggataaacagacatggcacctacattcacggacggatggatggataaacagatgtggcacctatatccacagacggataaacagacgtggcacctacatccacggacggacgggcagataaagagacgtggcatctacatccagggaaattgtatccagcctcagaaagggaggaaattcagacacacaacggcatatgggtgaagctcaaggacatgaggaggacaaatgctgtctgattccacctacgtaaggttcccagactggacaaattcgtacagacagaaagcaggcaggtggttactggaggctaagggtgcaggagtggggagttatgatttaatggggatggggtttcggctggggagggccaacaagttctggatatgcacactggcaacggctgcacagcaccaaatccacctatggccacggagctgtgcacccaaaaattattattttttgagatggagtctcactctattgcccaggctggagtgcagtggcatgatcttggctcactgcaacctctgcctcccaggttcaagcaattctccagcctcagtgtcccgaatagctgggactacaggcgtgcaccaccacgcccggctaattttttttaatctttgtagagatggggtctcaccatgttggccaggctggtcttgaactcctgacctcaggtgatccatctacctcggcctcccaaagtgctgggattacaggcgtgagccaccgcgcccggcccctaaaatttattaaaatggtaactttatgttatgtatatttcactacaatcttttattttttatttttttcagtggagatagactcttgctctgtcacccaggctggagtacagtagcgcaatccttagctcactctagcctccttagcctcccaagtagtccacagctacaccacgtgagctactatgcctggcttctaccactattttttctttaaaaagaataaaggccggacgcggtggctcacactcccttcctggcctggaacctgcccctcccaccacagggtcttcagcgctgctgtgcccagggaggggctgccctggcaggcacgtggggaagtggagctgcctcccaggcacagggagcagaggtggactgtggggtgggggctgtccccagcctgcggtgagcgagggaatgacgcagggccggggggcgggcagggggtgcagagggcccctcaggtttaagtagcttcttggtctcaggcccttctccagtctggggacgctggcagaaactgagctgtggggccccaagggaaagcgctctcctcaggcccagcccgccaagaagggccggaccctgggaatatgctaatcagctagcgggtaggttgcagctggagcggcaaggctggaaatagagtaggataaacacagtggagtcccctgggaccaggagccagggcagactacgccgggggcaggggcaagagccggtggagggggggctcccagctaagcggacctggatggggtccctgagtctggggcccttgttcacccactaacaagctctgtgaccgcggctgcctcgctcacccttgctggtgtccatttccttctctccggaaaacaggattggattaaacgccctctaagatttattccaggccgggtgccgtggctcaggcctgtaatcccagcactttgggaggctgaggtggacagatcacctgagctcaggagtttgagaccagcctggtcaacatggtgaaaccctgtctctactactactaataaaaatcagctgggcatggtggtgggcgcctgtaatcccagctactcgggaggctgggacaggagaatggcgtgaacctgggaggcagaggttgcagtgagccaagattgcgccattgcactccagcctgggcagcacagcaagaccccatctcaaaaaaaaaaaaaatacctcttccggccaaacccccaggaatcccctccttttattcattccttctactggccttgcttgcagctccccgccacccctgctgaggctcctgactttcctgggaccctcccttcacattcgtgcctccctgccaggcgggtctgtcctccagaactcccaccctactcccttctgcggaagcggagcctgcgcaccttgctggaataacacagagccttagcatagcaattgcgctggccgctctataccaagatttctacaaagaatataaagtacttttaacaaagtatccaaaaaggtgcttaagaagactccatacagctctagagaaaaggaggtttataataatccatgaaaacagaaaaacagacaaaacaggccctgattaaatctacataaaaatgtgtatacctcaagaagggaaaaggcacagaataaactggctgcttcggaggagccggaggaaggatggtttctgattaggtttcaagtctctttgcttctactgcaattttctttctcatacaaacattgcttttggaattaaaaaacccagggcttccaaatcgctctcgttccacctcctccttgaagcctccctaattccagcccatggtgacctttctgcctctgaattcctgcgggacaatcttccatcttcttatagcaggacaatcttccatcttcttacagcaggacaatcttccgtcttcttacagcaggacaatcttccgtcttcttacagcaggacaatcttccgtcttcttacagcaggacaatcttccgtcttcttacagcaggacaatcttccgtcttcttatagcaggaggcagcaggacatctagaaatgggctctgcagccagctgcccgccctggcccactcctgggcacatggccttgtccgggctccttagccccagcttcctcatctttctagctgtgatgatattcctctcccacagggtcctgggaagatctcctgagacagcagatggaagcatttagcaccgtgctgggctcgtcctgggctcgcttatgtgtgtacggctattgtggctgacatctagcattcttctcactggagaacatggaccaatatactcgtctttccaatctgacagtgggtccctggaggccaggaccccctcctgggctggggacctcacagacgcatgctaagtacccctcctgctgttttcttttcttttttttccccagacagaatctcattctgtcttgtccaggctggagtgcaatggagcaatctcagctcactacaacctccacctcccaggttcaagtgattctcctccctcagcctcccaagtagctgggattacaggtgcccgccatcacgcctggctaatttttgtttttttagtagacacagggtttcaccacgttgaccaggctggtttcgaactcctgacctcaggtgatccccccgccctggcctcccgaagtgctgggattacaggcacgcacgaccacccctggctaatttttatatttctagtagagacggggtttcgccatgttggccaggcgagtctcaaactcccgacctcctaatccgcccgcctcggcctcccaaagtgctgggattacaggcgtgggccccacacccagctaattcttgtatttttagtagaaacagggtttcgccatgttggccaggcgggtcttgaactcccgaccttgtaatccgcccgcctcggcctcccaaagtgctgggattatgggcgcgtgccaccacgcctggctaatttttgtatttttagtaggaaaggggttttgccatgttggccaggctggtctcgaactcctgacctcgtgatcagcccacctcggcctcctgctctttcccgcacgtgctcctctccttcctcccaggggcaccaggcacaagtgtcccctgcccagaggactccaagacaaaggacgctcaccttatgccataaagcagcacctcagctgcttctccaggccattagccatgccacggccctctgtccgggctgggggattcgttgacaaaggcctgagacgtggggacatggcacagaggagggaacatggcctttcccacataccatacgcagagatgccttggccaaggtacttaacctcagtaccccagtgtcctcatctgtaagatggggaggagggactgtcattctccctggaggatcacgacaaggatcacacgaggagatggcatttgggaagcggcctccaggagcacaagtgctggacacacattggtgacgcatgctgccgtctgtctgtcactaaatgcttcccccaccccaccccgccgctgagactcctgccccactgccccatcaggcgacccagagtgggggcctcatcacagcagcaaatgcctgcgcttaggccgtagggccccttgctttctctggatgggctgctgggagggggcttagagagaagtgggggcctcagagactgccctcctcctcctgcctttcctacaggccccctgaatatccccgagggctgggccctatctcaaagccacctccgactatgtcctcagcgcctgctggcgggcagaaagactgcattccagaggctagtgccagctcccttccttagatgtgtggccggagtgaaggcagagacaagctgtggggacagaccgttccgtggctccgtggggcccgggttcgtgggaacagctccgtgtggactcgtcacccagcctggccatccacggtggctctgagggcagtcacggggcgagactttctaagccacagcccgcccctggggcatgcctcccccaccaaaggcaggctggtgagatggttctgcagcggagggccagggccgggccttggcatgctgagtgctgggggacttcaaaggcctgcaggggactctggctctgaactgtccgctcacaggcccaggtcagctggcagcaggaaggtttatgtttcttttaatatcaactcccaggcatttaacattcctcgaagcttaaacacagaaacattttccttaccagactctgccttctgctttgccaaacataacctggcttcctccctcccccactgcctccatctgctcctgtctccaagaggcttgcagtgactgatggtgtgtttcccccggggcttgtgcagctgagtgagaaggagggaagcaatggggctgaagtccaggtgggggaatgtgccctcgggccttgggagctgagttctcgaggggctggggcccaccgtgcccacggggctggctgcccggcacatccttgtaactcttctattccacagccaccagtggcccagggagtgtggcgtggcgaccactcgtctcttgcctgggcgtctcctggggctgcacaggccagcccagaacccttccgtgcctgtccctctagcccagcccagggacagggagatggggctccctccccttatccccacagagagcaggtcccagggactgaatctctagagcccatttcctaaatcacgaaggactggctggcagttgcctggcagccctgtctccctagtgacgagtactgagaagcagggtgcagaccccacagcatcggaaagagacgtgtttaggaacacggggcgtatgcggcagaggccaggcccctccacgtggggcccctggttcaaacactggagcctgagatggggcagcgagtgggagacccacacagctccccaggggcaatgctaccaaggacctgcaggtaagagccagataccaaactcggtggccatgacaatgcatcagagaacaaatgcttcctgctaaaaagcatcgttcagctccctgttgtagacggagccatcgcagcctgcgcctggatcacctcttgggccacggtcaagaagctcggcgcccagctgcgcctggatcacgtccggggccacggtcaagaagctcggcgcccagctgcgcctggatcacgtccggggccacggtcaagaagctcggcgcccagctgccgcctggatcacctccggggccacggtcaagaagctcggcgcccagctgcgcctggatcacgtccggggccacggtcaagaagctcggcgcccagctgcgcctggatcacgtccggggccacggtcaagaagctcggcgcccagctgtgcctggatcacgtctgcggccactgtcaagaagctcagcacgcccaacgcccgaggctcaacctcagtacgggtcagttaccgtctcccttcatttcatggtcacagaatctacccccaaaccagaccacttgcggcacagcacgaggccacacgaggtaccagacgggagtgtgagcggctccaccacgtcacgccttttcccgctcccaagcctacttctcttaataggttggtgaatagcagccatcttcaaaattggcagaatgtttcagagacacaggctgcacacacagaggccttttccctatatatgtttatagggagccaaaagcacagttgaggcataaatgctgtttttatttatttttatttttttggagacacggtctgactccatcacccaggcgcgatctcagctcactgcaacctctacctcctgggttcaagcgattctcctgcctcagcctactgagtagctgggattacaggcgcccgccaccacgacctgctaatttttgtatttttagtagagatggggtttcgccatgttggccaggctggtctcgaactcctgacctcgtgatccacccacctcggcctcccaaggtgctgggattacaggcgtgagccaccgcacccagaagcataaatacccttaacccgaggtgcagcctctactaacacccagagtccccacccgaagccacagactcccaacgcagctgagtaaggtccggccaccctaacaacaagtcagagacccccctccccccaagccaaccagcaggaccctaagtctttcgggcagaagagcaaacgcctggtccgtgtgcctaactccggtcccccgtcaatggcagacacggctcctcacacacagcattcctccctcccgttcaccgacgcagcctctgagtccttctcaacatggcgttccgggaaacaaccacccatagactaaagctggcgtgtgaaaacaaagctggttgtttccatcttgcagaagcgcagatgacccacctgaggagccacgcacacgcctgggcttccggggccacaacaggcagccacctctagcagggaggggagaaccacctcctgggaactttcctccaaccagcttggaaccaaaatcacgaaagagcaggctccttgaccagaattccttttcaactggaaccacctcctggaggctccctcagcctcgccccggcgccctggcctcacctggatctgtcctttgcccatgatcttgtccacgatctcattgttgtccttgttgaccttggtcttgtcatagcacttctcatagcacaggatcctcagggactgggagccctccagctcgatctcaaactcctggggaaagatgggacaaagggccctgaacctccgaagctgggaggcctggctttccggcaggtgcgtgcctcagctttgcaaggaggagggagtaagcacggcccacgaaggacacgtcagattttctggagctcccagaggcctcccatcacccctggagtctgggggcctgagctgacaccacagggtctgacacccagacacacaccgcgatcagaagccagaggagcagggagcagaaaggggggtgcagacatagctggtccaaccaatgggctggccgtccccagcagacaagccacgagcacggggtggtggggtccccacagagatgccagcccctgccactcacctcatcccacttgggctccgctgtgtcccggaacaccctggttttggctttgctgacaaaatagccgaaggaatccacctccagggtacagtacaggtctgtgggggaaggacagacggagatactgagtgagtggggccagggtggggcagctggggcggcactcaggatggagggggacatcgcatctgtcctttccaacgtccccacggatggcatcttggctctctcctccctgaagcccgggaccatctggcttctcccctgcccccttcttaggggctcagccctccccacctcggctcaccccacactctgcccttcctacctcagccctccccacactctgcccttcccacctcggccctccccacactctgcccttcccacctcggccctccccacactctggcctcctcctccctctaaagggcccttgactgttccgtctccacatcttcctcaccatggagacgacaccacaaactcttcactgaccgccctggagccacctctccccgtaacatgggtgcccaggcctcaacagcggcatttggggtgggaggcgtttagcagccctgcctctgggtcctgaatgctcggagcatcccctgccgcggtgacgaccaacaacgcccacatccccaagcccagggtgctgtggtttcctccgctgcacttaacataaaccaaagggatcttctctactcgtgcgtccctagtctctctccccccacgacgtaaacaccatgtggagagaagcctgggttttcctgcctgccggtgtacccgcagtaccaagaacagggctgggaacccagctggcacacggtgaacgaggctcccaccaccaccaagcgctccaggtaacaaggcagtggagggctggggcgggagggcagggccgggggctttccccggcatttccatcttccaccctggccttcaggctgaaaatctaccttgggacccaactgctgaggccacagcaccggcacggaccccaggccctctgcaaacccacacccgccctgggctcggaccccagcagtcctcccacctccagggagatgccgaggttgttcccagggtaccagaggtggtgtgggaggtgcctttgggacactatggccaaccctctgcagcgtgaaacaacgtcagaggtcacagtgcgggcatacagtgcaggtggcttactccacttagcccctgcagctgcccagctgggccattctccatcagaacagctttcctggccgggcaaggtggctcacgcctgtaaatcccagcactttgggaggccaaggtgggcagatcacctgaggtcaggagtttgagaccagcctgaccaacatggtgaaaccccatctctactaaaaatacaaaagtgagcccggcgtggtggcacatgcctgtagtcccagctactcgggaggctgaggcaggacaatcgcttgaacctggggtgtggaagttgcagtgagctgagatggcaccactgcactccagcctgggcgaccaagtgactctttctcaaaaaaaaaaaaaccaaaaaaaccagctttcctgcagaaaggacagtgcagctaccccaagaagcctccagctggagcaacagaaagaagacccaggtgggcctcagaacacacagaacggggctggggatttgcaggtgaacaacacagaggccctgagcaccccagcctgggccagaccagggagtgggcctgtgtgtttgagacgggccatgaagtgctgtcatcatggattgatctcggtgtgagcccctcctcgaggggctggggagggctcacagggtcagagggagggttccggaaggggctgggggagggctcacagggtcagagggagggttccggaaggggctgggggagggttcacagggtcagagggagggttccggaaggggctgggggagggctcacagggtcagagggagggttccggaaggggctgggggagggttcacagggtcagagggagggtgccggaaggggctgggggaggggtcacagggtcagagggagggttccggaaggggctgggggaggggtcacagggtcagagggagggttccggaaggggctgggggaggggtcacagggtcagagggagggttccggaaggggctgggggagggttcacagggtcagagggagggttccggaaggggctgggggacggctcacagggtcagagggagggttccggaaggggctgggggagggttcacagggtcagagggagggttccggaaggggctgggggagggttcacagggtcagagggagggttccggaaggggctgggggaggggtcacagggtcagagggagggttcaggaaggggctgggggagggctcacagggtcagagggagggttccggaaggggctgggggaggggtcacagggtcagagcgagggttccggaaggggctgggggagggctcacagggtcagagggagggttccggaaggggctgggggagggttcacagggtcagagggagggttccggaaggggctgggggaggggtcacagggtcagagggagggttccggaaggggctgggggaggggtcacagggtcagagggagggttccggaaggggctgggggaggggtcacagggtcagagggagggttccggaaggggctgggggagggctcacagggtcagagggagggttccggaaggggctgggggagggttcacagggtcagagggagggttccggaaggggctgggggagggttcacagggtcagagggagggttcgagaaggggctgggggagggctcacagggtcagagggagggttccggaacgggctgggggagggttcacagggtcagagggagggttccggaaggagctggggacggctcacagggtcagagcgagggttccggagtcagaccatctgggtccacaccccagctctgcacagatcacctcccttctctccccaggttcctgtctgcacagcaggaaaagtcatggtgcctacaccctgggcctgcctgtccagaggtcctgagtttaccacggctgaagacacagggcctcacctctgagtgagaacagacatatgagtgggtcaggggtggcggcggcgaagggagtgaggataatctgggggtaaagagagattttggagcagctcagccggctctgacacccgcccaggctgggaggccacgggtcggctccctgaggcgaggacctcccggccaacgggaagcaggagagggaggggcggcatctggggacatggagtggtggcgcctggtccagacatgggtgggacagtgcttcagagctcactagccagaagctcctcagcggcagcccccaagaagggaggtctgtgggtctggagagagttcaggaagcttccacggtaacaagcagcctgagggaccgtgtggtgttcccggccagacatcgagaagtgcccaaaaggttagagctccggctctggtgccggaagacgtggattctgctgcaccacctgctactgtgtgactccaggaaggaaccttgagcccctccgagcctcggcgtcctcgtgtgtaaaacagggatggtttccgtgacctcggcgggatgccggaggctcagagcggaccgtgagactgagaggctctgaacacgccacaggctttgcacatgtgagtacgtccacacgccagccatgttctcaccttctccaggtgcacggtaggtgctgtgtaaattaacgacttcattccacatttctgagctcccatgcatcccagggtaaaggagacctggttcccgccctcagagaactcacagtgggagacgcaaattgttaagtgacaaaacagcatgacaggtgccataaccagcttgccctgagcaggatgggggcacaaggaacctcaggggatgggggcacaaggaacctcaaagggatggggatacaaggaacctcaggggatgggggcacaaagaacctgaggggacgggggcacaaagaacctgaggggatgggggcacaaggaacctgaggggatgggggcacaaggaacctcaggggatgtgggcacaaggaacctcaggggatgggggcacaaggaacctgaggggatgggggcacaaggaacctcaggggatgggggcacaaggaacctgaggggatgggggcacaaggaacctgaggggatgtgggcacaaagaagggacaaagaagggaggccagtttgcccccaggaactcagggaggcttcctgggaaaggctgctctaacggcccggggagtcacctctgtgtggggcgctgcagggaggggtgagggcagaccccacctgccagtgaagagcagggagtgggaggggcaggtggagagggagagagtcagggtttctgatcctctgtgatgttaagtcttttctcctctctgtgactcggttacctcctctggcaaatgggtagaaactattagctgtctaactgactcacagattcccgtgtggataacaggtagataaaaagcgcaaccaggccgggcgcagcagctcacgcctgtaatctcagcactttgggaggctgaggtgggaggatggcttgagcccaggagttcaagaccagcctggccaacatggggagaacctgtctctaaaaaaaaattttttaaaaattaaaaagtgcaatcctactttgtgagacactaaaaacagatttagtatgaggaacccacaagggggaaggggagaaaaagcgatgagcgtggcagcacaccagcgttgcacacacacgatcatatcccagcctgctctcgggtcaaaattcacaagcgtgactgccttttagtggaggcccagagaggttaagaaacttgcccaaggtcacacagcttgtcatgggcagatatgaagttggagtccacgtgtttgtcgccctcagatatgaagttggagtccacgtgtttgtcgcactcggtttcttttttttttttttgagacggattctcgctctgtcgcccagggtggagtgcaatgccatgatctcagctcacagcaacctccgcctcccgggttcaagggattctctggcctcagcctcccaagtagctgggactacaggcgtccaccgccatgcccacgctaattttagtatttttagtagagacggggtttcaccatgttggcccggatggtctcgaactcctgacctcgtgatccgcccgcctgggcctcccaaagtgctgggattacaggggtgagccaccgcgcccggcccctaggtttcagacagcttcagggagggcttgagaaagaggactttggagacaaaggccaggggtgacctccctgccaagaggagctggtttctggcctccaggggaatgccccatgtctaaaggcgtgctggcagggccccatcctgggcagagcagtgcagaatccacaatggcccacccaacctcgtcctggccagggcacttactggctgattgcttaaatcccttggcagagtggacgatgacatgaaggaagccatagagtcctggagactcatcgtctgcaagagagaaaagcccccagggcagagggtggtcagcggatcccctcagcctccaccccaggccggcgggaggcagacggggtatgagactcagctgagtcttggtccaacatcaccacctggtggccagatgaaaaagtttccgaaggccacggcggccttatatgtgagctgcccggggtagggctagggggtccttctctcctccactcagcctgggggggtccagcacacccaccatcctggcccagggacttagtaccattccccatgggtactgtctctccctccaaatcctgcctatcctggcactgaaaactgaccaatatgataaatcattctgctaatgatttatgtcgaggaaagcttgccttcaggaccccgttcacaaagtggaccctttcccagcacacaggcagctagaatacacccactccggtcagttcccagccctgatcacagctccccactgctcaaaacccccccagactcccgggcttacagcatgaattccaaactcccttgcttgggattcaaggcctttcaagagctggtccctggaaacttccagcctcatttcccatacaccattttatctaccgggtctgctctctcatgaatatattaacagcacaatctcagtgcaccagggtgccagttctcccaagccagacagaggggcccaaggaaaagctggggtcatctgggaactcagtagacagtcacccctacccaagctgtgtcctggccactcaacagtctcagcacagccgagcagggatcagccatttacagccacatgtctgtctgagtccttacgggaagccggccacgctctgagggctgggacctgccggttgggccacctctggttcccgagcttaccgtctttattgctggtgacaggaatgttgtgtacagtcctaagcttgaaacaggatcctgtgagcacctggagctccactgagctcaggacaaaggcctggagatctggagggagagccgagagagaagggagcgtgggcactggtccaccaggaccggctgctcttccctgggggctgctgcaggaagacggcttaatccctggggcagacttggtccttgcgagggagggggaaggatttgtggacacagcaggactggtgtagatgctgcgagaggggtcagagtaggagaatctaactgaagaggtttgtgtgtgtgtgtgtgtgtgtgtgtgtgtgtgtgtgtgtgtgtgtgtgtgtgtgtgtggtgtatgcgttttgttttcgttttttttttaaacggagtctcactctgtcgcccaggctggagtgcagtgctgtgatctcagctcactgcaacctccgcctctcaggttcaagggattctcctgcttcagcctcctgagtagctgggattacaggtgcccaccaccacacctggctaatttttgtgtttttagtagagacggggtttcaccacgttgcccaggctgatctcaaactcctgactgggattacaggcgtaagccaccgtacccagcctctgtgtatgtgtgtatgtgtgtgtgtgtgtgtgtgtgtgtgtctctgtgtgtgtgtgtgtgagagagagagagaggtagagagagagagaaagcccaggctgggctctgggtccagtcccaggactaaatcatcatgtctttcagccaatcagttagattctttgggtctcaattaatccgtaacatccttaaacgctcaccctggcacctctgagggtgactgcgagggccaaagacgtgatactggacatgaaacgcttagaaatacaaaaggcccatcaatgccacggacatcattggggagcgtggaagaggcaggaatttacccttcttctgtagtttctgaattgcttctctccactctgacctctcgtagtccgaggacagtaggaacaggtaactctgaagagaggagataagcataaagtgggtgaccacagtcaggcaaagcgtactcccagatcctggggaccccaacaaagctccttttatcttttttttttttttttttttgagacagagtctcgctcttgttgcccaggctctagtgcaatggcaaaatctcggctcactgcaacctccacctcccgggttcacgccaatctcctgcctcagcctcctgagtagctgggattacaggtgcccaccaccacgcccggctaatttttgtgtttttagtagagacagagttttgccatgttggccaggctggtctcaaactcttgacctcaggtgattcgcctgcctcagcctcccaaagtgctgggatgacaggcatgagccactgtgcccggcccaaagctcctccttatccaggcacagctgaccttgcaggaggaggcagctgggggtgggtgggtgaagggggagctccttcctgggaagccaaggtgacaggagcggctgtgccagggacggccagcagagggcactcattccacacgagaggggagagcgagtcaacagctggagccatggcagcctcctcaggaagagggggcctgagtttccggttcgtacaggtcagggccaggagccacagagtgggctgctctggactaaggaaggggctgtcttggtcccacccccacccatcctgacctttccattccgattgtggatcctgaacgggattgtgggggagttgagcagcagcaggaactcattctcaaacatcttcttcttcaggcgctcgatggcccggctctggcctttgttggctttctgcaggagatggggacacagagggttcccctcacactcgggcctttctcacgagcagcactaagcacgacactccactgtgtgttaacatgctctttacattttccgtatttcgtgatgttttgacatcttgtggcaggagaggcgggtagctgggtgagaaactgctcccccacagggctcactaattcctaagcctgtcagtgatgccctatgagcacagctttcatacacacacccactgatccagagcccatgtccccaaccaccttctctacctgacgctcactcgccaagccagcatctcctctgccccacgtcacccagggccagggaccaggtcaccagagaccactcctctagcccagggctgccgacataacggaagccagctggtgccaagccctttccctgccctgtttctccacagaaaagctgtggccacactttctttccattcctgcctcctgttcaaagctggcacctctccacgtggccctgggcggggtgctatgcctccttctcttgagaaccctaaataatacaaatattacagtagtattaacctctctgtactgtcactctgctgcctctacacattaaatcctgggtacaacagagacacctgcttaaagaaacctcagacacctttcagcctgaagccccacctgctagcctggcaccaaggcccccatggcagggttccagcctccctgcccggcagacaacccaccaggtcccgtcggctcagcctccccctctcaccagacattcatcctctgcgggcagagcctgctccctcaatgttccaagtttctgtctgtttcgtaaaggaccccctcccttttattaaccaccattatgcttcaagtctcagctcccaaggccatcctcaagctcctcagttagaattcacctctatggtgttttgttctttttaacccactggactggcaaaattgtaaagaatgttcacagccagtgttgtgacactgtgggggacagtcaccctcacacaccgcagggggaatgccaccagtcacagctttttcagaggtaaaagcctgtcaattaagcgcacactcaccctgccctgcccatcccacctggagggaacctactgcagaggcacctgcgcagtgatgtttactgttgacttgcctgctaagagcgaagaatcagagacaatccaaacacccaaaaacatttgtatgcagccaagcgacagagcaggaggcagttgttaaaaagaatctgatactgccaggcgcggtggctcacgcctgtaatcccagcactttgggaggccgaggtgggcggatcgtttgaggtcaggagttcgagaccaccctggccaacgtggtgaaactccgtctctactaaaaatgcaaaaactaccgggcgtggtggcgggcgcctgtaatcccagctactcgggaggctgaggcacgagaatcgcttgaacccgggaggtggaagttccagtgagcccaaatctcaccagtgcactccagcctgggtgacagagcgagactctacctcaaaaagaaagaaaaagaatctgatacatccaaagggctcaaagacccactgtggagtaaaatgctgaagttgcaaaacagcacgtgtagtctagtctcattggacacgcgggcgcacaccagcataagcaaagaagagttcagaagaatacacctcaaactgtcagcagtgggaggtgagtggcgaccagctttaccctgtacatgctggtactacgagcatttctcattaaaaccagccagtattatattggggattagaaaaaacatgaaaatttaaaaaattattatcaagagaacaaggctgagcacggtggctcacacctgtcatcccagcactttgggaggccggggcgggtggatcatgaggtcaggagtttgagaccagcctggctaacacggtgaaaccccgtctctactaaaaatacaaaaaattagccaggcgtggtggcggacgcctttattcccagctactcaggaggctgaggtagaagaattgcttgaacccgggaggtggaggttgcagtgagccgagattgtgccactgcactccagcctgggcgacagtgacaaagtgagactccatctcaaaaaaaaacaaaaaacaaaaaacaaatcactgcttcttctgtgactcagaggacggcacctgtgcctctccagtgactcacatgtaccacactctgtggtcagcaaggggcgtgtctgcttcctccactggacagggatatacatgaggcacccggcacaccccaggcagcacagccagtggggctcactgagtgttgactgttgactcgactgggcacaaggccacgtctgcacagctggggcaacggggaggcagcaagcctcccaggggcgggtgggaaacaggcacgcaggatgctcctgggcgggcactgtgggcagggcccagccgttcaggagggggacagctgtgctggcgaggaagccctctgggcagatgtaccaccagttggaccctctgtcctaggacatcccccagccctgaacactcctggggctgtaatggtgatcttgctttcccctgttcaaagggagatgcttgagttgaaaggatcctcagagaggccatctggttatgttttcttcaataattgtttgtttactaagtgcctttttttttttgagatggagtcccactcactctgttgcccaggctggagtgcagtggcgtgatctcggctcactgcaacctccacctcccgggttcacacaattcttttgcctcagcctcccatgtggctgggattacaggcacccaccaccacacccggctaacttttgtatttttcatagagacggggcttcatgatgttggccaggctggtcttgaactcctggcctcaagtgacccacccgtctcagcctcccaaagtactgggattaccggtgtaaaccaccatgctgggccctaaccacctgttttctacgtgtcgaatatgaggaacatggaacagaagaaaatagcgctgtccctggagttcaaattccagtggggaagagaggagtctgacaatgcaattacaattcagtaccatttaagcaaagccacaggtgaacaaaaagccacaggatctggggacagggcacccaaccaagactgtggtgggcgtgggtgtcagagaagcttcccaggggtggtgaggcctaagctgaacctgagaggtgaggaaaacagaccaagctgaccaaaccgctccaggcccttcctccactcacagggatgctcctcccgtggtgccttcctctagacactgttgttacgtgaactgagggctatgcatgttcctctagacgctgctgttatgtgaactgagggctatgcatgttcctctagacactgttgttatgtgaactgagggctatgcatgttcctccagacactgttgttatgtgaactgagggctatgcatgttcctctagacgctgctgttatgtgaactgagggctatgcatgttcctctagacactgttgttacgtgaactgagggctatgcatgttcctctagcactgctgttacgtgaactgagggctatgcatgttcctccagacactgttgttatgtgaactgagggatatgcatgttcctctagacactgttgttatgtgaactgagggctatgcatgttcctctagacactgttatgtgaactgagggttatgcatgttcctctagacactgttgttatgtgaactgagggctatgcatgttcctctagacactgttgttatgtgaactgagggctatacatgttcctctagacactgctattatgtgaactgagggctatgcatgttcctctagacactgttgttacgtgaactgagggctatgcatgttcctctagacgctgttgttatgtgaactgagggctatgcatgttcctctagacactgttgttatgtgaactgagggctatgcatgttcctctagacactgttatgtgaactgagggctatgcatgttcctctagatgctgttgttacgtgaactgagggctatgcatgttcctctagatgctgctgttatgtgaactgagggctatgcatgttcctctagacactgttgttatgtgaactgagggctatgcatgttcctctagacgctgttgttatgtgaactgagggctatgcatgttcctctagacactgctgttatgtgaactgagggctatgcatgttcctctagacactgttgttatgtgaactgagggctatgcatgttcctctagcactgctgttacgtgaactgagggctatgcatgttcctctagacactgttgttacgtgaactgagggctatacatgttcctctagacactgctgttacgtgaactgagggctatgcatgttcctctagacactgctgttacgtgaactgagggctatgcatgttcctctagacactgttgttacgtgaactgagggctatacatgttcctctagacactgctgttacgtgaactgagggctatgcatgttcctctagacactgttgttacgtgaactgagggctatgcatgttcctctagacgctgttgttatgtgaactgagggctatgcatgttcctctagacactgttgttatgtgaactgagggctatgcatgttcctctagacactgttatgtgaactgagggctatgcatgttgctctagacactgttgttacgtgaactgagggctatgcatgttcctctagacgctgctgttatgtgaactgagggctatgcatgttcctctagacactgttgttatgtgaactgagggctatgcatgttcctccagacactgttgttatgtgaactgagggctatgcatgttcctctagacactgctgttatgtgaactgagggctatgcatgttcctctagacactgttgttacgtgaactgagggctatgcatgttcctctagcactgctgttacgtgaactgagggctatgcatgttcctccagacactgttgttatgtgaactgagggctatgcatgttcctctagacactgttgttatgtgaactgagggctatgcatgttcctctagacactgttatgtgaactgagggttatgcatgttcctctagacactgttgttatgtgaactgagggctatgcatgttcctctagacactgttgttacgtgaactgagggctatacatgttcctctagacactgttgttatgtgaactgagggctatgcatgttcctctagacactgttatgtgaactgagggctatgcatgttcctctagacactgttgttacgtgaactgagggctatgcatgttcctctagacgctgctgttatgtaaactgagggctatgcatgttcctccagacactgttgttatgtgaactgagggctatgcatgttcctccagacgctgttgttatgtgaactgagggctatgcatgttcctctagacactgctgttatgtgaactgagggctatgcatgttcctctagacactgttgttatgtgaactgagggctatgcatgttcctctagcactgctgttacgtgaactgagggctatgcatgttcctctagacactgttgttatgtgaactgagggctatgcatgttcctctagacactgttgttatgtgaactgagggctatgcatgttcctctagacactgctgttatgtgaactgagggctatgtatgttcctctagacactgttgttatgtgaactgagggctatgcatgttcctctagacactgttgttacgtgaactgagggctatacatgttcctctagacactgctgttacgtgaactgagggctatgcatgttcctctagacactgttgttatgtgaactgagggctatgcatgttcctctagacactgttgttatgtgaactgagggctatgcatgttcctctagacactgttgttacatgaactgagggctatgcatgttcctctagacactgttgttatgtgaactgagggctatgcatgttcctctagacactgctgttatgtgaactgagggctatgcatgttcctctagacactgctgttacgtgaactgagggctatgcatgttcctctagacactgctgttacgtgaactgagggctatgcatgttcctctagacactgttgttacgtgaactgagggctatgcatgttcctctagacgctgctgttacgtgaactgagggctatgcatgttcctctagacgctgctgttacgtgaactgagggctatgcatgttcctctagacgctgttgttatgtgaactgagggctatgcatgttcctctagacactgctgttacgtgaactgagggctatgcatgttcctctagacactgctgttacgtgaactgagggctatgcatgttcctctagacactgttgttacgtgaactgagggctatgcatgttcctctagatgctgctgttacgtgaactgagggctatgcatgttcctctagacgctgctgttacgtgaactgagggctatgcatgttcctctagacgctgttgttatgtgaactgagggctatgcatgttcctctagacgctgttgttatgtgaactgagggctatgcatgttcctctagacgctgttgttatgtgaactgagggctatgcatgttcctctagacactgttgttatgtgaactgagggctattcatgttcctctaaacagcactttggctgcatccatgggtactggtatgtagtacactcatttccagacagcactaaacagtttgcagttctcattttgaattttgatttcctctttaccttgtcagtttgaactttccaaaccaatgctttttttttttttttttttttttgagacagtctcactctgttgctcaggctggagtgcagcagcggaatctcagctcaatgcaacctctgcctcccaggttcaagcaattctcctgtctcagcctcctgagtagctgggattacaggcggaagccaccacgccaggctaattttgtattttcagtagaaatggggtttcaccatgttggccaggctggtctcaaactcctgacctcaggtgacctgcctgcctgggcctcctaaagtgctgggattacaggcatgatccaccacgcctggataattttgtatttttagtagagatggatttttaccatgttggccaggctgatcttgaattcctgacctcaggcgatccaccatcctcagcctcccaaagttctgggattaaaggtgtgagccactgcacccaggctgaccaatattcttgttcacttctaattttactccactgtggtctgtgaacatgacttgtatgctatcaacttgcagaaaaattttgagatttccttagtggcctattataggataaatgtgaaggtcccaaacgtgtgtgacaagaatctcagttttctgtcagggcacaagcttctctgcatttttaagtcaagcatgttaattgtggcattcaggtcctctctctccttatttatttgcctacttgatctgtcagtttctgagaggcctcccaggtccttttccttgcacaggtcctgcttttccttacaaaagcctgctttttcttctcttgcttccctctacctccactttttttttttgtttttgacagaatctcactctattgcctagactggagtgcattggcatgttcttggctcactgcaacctccacctcccgggttcaagccattctactgcctcagcctcccgagtagctgggattacaggtgcccaccaccacactctgctaatttttgtacttttagtagagacagggttttgccatgttggccaggctggtctcgaactcctggcctcaggtgatccacctgcctcggccttccaaagtgctgggattacaggtgtgagccactgcgcctggctacttgcttcccctttctatcgtgttcaacatgcactgctttccagggcacttcccatgttagccctatgaaatcctgagcactgaccccctcgatctgcttggagctactgtagtcggggtctttcccttagtaactacacactcaaggctccctctcaaagtctcaaaccttacaacttcctgcctccacctcccccaacacagctggctcaaagggccccaggctcagataccaagctctgctcacctccttctggatttcactcttgagggcagagatcttcatcttcatgtcctccagctcatggtctgggaaggggtgcacctgggggctggcctcagactcctcgggggatggaaacaccaggtcggccagggggatgtaccacttacagtcatactgctggtgcttcctgcaaacgagccagagggagccatgagccagagggagcctggctcttccagcctcaactcttgggtccagaaccacagaaccactgacaggggttgactgagaactcgccagaagcaagaacgatccctgctcctgaggagcctgattgggaaacacacactggagtgatgaaagctgggttctggggtccgccccgcccgcagggagcaactccgccccttcaccttaccaggcttctggcccagatgactcatgttgtcaaacatcccaaaccacttaggtatcaagaagagcgaagccttcctggctgggctcacattttcctattccccaccacaatcccctccctcccttctagactatccgtgttcaatatccttcaggctagcaatggaatacaggtgttattccaaatgccacctcttatcaagagtggtcacatgggtcaacactgggtggaggattacaaagccacatccaagtctagcaagaaagtgtgccctagttgattagtgatgtctgccatggcaaaggacagcaggcagaggcatatgtgattagtaatgtctgccatcgcaaaggacgacaggcagaagcatgtgtgcttattattgccatctctgcctcagaactatctcaaacatgatctagttccagggagtcatgtcctttattattattattttttaaattatttttattttgtgagatggagttttgctcttgttcccaggctggagtgcaatggcgcgatctccactcactccaacctctgcctccagggttcaagcgattctcccacctcattctcccaagtagctgggattataggtgcctgccatcacacccagctaatttttgtactttcagtagagacggagttttgccatgttggccaggctggtctcaaactcctgacctcaggtgatccacccgccttggcctcccaaagtgctgggattacaggcataagccaccgtgcccgcccagtcatccctttattgacgttcataatcatcgatccttcccctaggacttagatttgcacttctcattctgacccttgagtgttgaggtgggcgtggggcttgctccccctgagctatacttgggggcacagccagccagggagggctgaagggagaggtaggatagcctggtggtgtaacacactggctgtggagtcccctgtgctgtacttgggggcacagccaaccagggagggctgaagggagaggcaagatagcctgatggtaaacgagtcccacagacacgggtttgaatccagactgccgcttctcagccgtgagaaggggtgtgcttggcacactgcagttgatcactaagtgtgggtggaagaatgtgtgaatgaacgcagaatgagcctctgctcaaggcacagagcagacccacactcccgggtagagagaaggaggctcaaaggagcttgcacatcagcttggggttccagtcccaccctcccgggtagagagaaggaggctcaaaggagtttgcacgtcagcttggggttccagtcccacctgtgcctctagctgtgcgagcttgggctgcttatttaccttctccaagactcctctctcatctatgattagggaacaacagtcgctactttgtggaggtgttgggaggactagaaatcatgtattcaaagcatgtgtcacggcacctggcatggcataaaccctcaataaatagtagcaggagacgtggtgaatattcacagcactgcagttagcagaaattcagagatgtctaataaaaggagaatgcttaagtagacgatggcacatctacgggtaacatcgtgcaggaaagtaaaaggatgattatgaagatgaggcagcaacagggaaaatgcttatgacacgaaacagaaacagcagagccccaaattgggcattcacagtgattacgactgtgtgaagaaacatgagaacatttaaaaacagggaaggaagcagcgcggcaggagtcggacctcatgcttcagtgggggacggggtttcctccaatggccttatattatctttataattaaaaacatgacttactttcaggaaaaaaggctatgtagtgaaattaagttaattaatatagtttttaaaaggaaaaaaccggccaggcgcggtggctcatgcctgtaatcccagcactttgggaggccgaggcgggcagatcacctgaggttgggagtttgagatcagcctggccaacatggcaaaaccccgtctctactaaaaatacaaaaattagccagacatggtggcatggtggcgtgcacctgtaatcccagctactcaggaggctgaggcaggaaaatcgcttgaacccgggaggcagaggttgcagtgagccgagatcgcaccactgcactccagcctgggcaacagagcaagaccctgtctcaaaagaaaaaaaaccaacaaagttgctgaaggctccatgggtggcagggtccggcctccctcccccgccctgtgccactggactcacacactcaccccgcagaggtcaggaccccctcccccgcccctggactcacacactcacctcgcagaggtccggaccccctcccccgcccctggactcgcacactcaccccgcagaggtcaggaccccctcccccgccccggactcgcacactcaccccgcagaggtccggaccccctcccccgccccgtgcccctggactcacacactcaccctgcagaggtcttcttcagcttggcacacagtaggacatctgtaaagaggaagacgtgccgcagcttccgggagctctctgacacttccaccaggaagccgtccttcaccagctgtcgcgtctgagggagatggcagaccccccagcctgctcagaggggaatgcggccgagggcagagcctgcacacgggggcacggccagccagggaggactggaccgagaggcggcatagcctgtcatcccttaaccaaaggtggttcaagcactgcctttggagtcacatgggcatgggtttgaatgccaacaggcttctcagctgtgatctcagacaggctccctgacctctctgaatcccagattcaccttctgttaagtgcggacagtgaggtctgcctcataaggtgactcatcgagatggtgcatgtgaaacagcacagtgcctggcacattaagtgtgtgcaacgcacggggctctccgcggctaaccctggagccccctgcccgggacgacctggtttctccaccctggggcacgaacatccccgtttgcaatccctcccgaccgcggcggcgaacttcatctagccccggctcaaccgagacccgagacccgagacccactcaggcctgtctgtgctactcctccctggcttctccagccccctggggatgagacctgggccctccagcctgggactgcagcagtgcccagaggggacctgcagccaactctaacctgggctctgggtggtttctgctccacgtgggagttccagagtttccaacccccgctcagagccggggggtcgtccccatctgtgccagcctttcctgtatgatacacggtgtgacctacatctgctgtaatacgtaggtgagcgtattcaaagtatacaattaagatgaccgaggccgggcgcagtggttcacacctgtcatcccagcaatttgggaggctgaggcgggtggatcacctgaggtcaggagtttgagaccagcctggccaacgtggcgaaaccccgtctctactaaaaatacaaaaactagccagacatggtgacgcctgcctgtaatctcagctacttgggaggatgaggcaggagaattgcttgaacccagagggtggaggctgcagtggagctgaggtcacgccattgcactccagcctggacgatggaatgagattcagtctcaaaaaaaggatgactgaaaacggagggtacgctaagccctctggagatttttcagatatccccagagtaaaacagacgacgggatccccagacgctgcacatcagcaccaggagccgcacggaatcggctctctctgcccagtggacactgtccaggcctgtccctcaccactttctccccaggagaccctgggggctcgtaaacagaccacaggagcagacaccctgtcagcctcactcgtaacggccgcctaatggcctcccctggacaggaagcctttcacccgggcccggctgccaatccacgaaggcaactgtccctctcatgcttcctggtactccccttgctgggctgtccccacccttgcatcaagaagggcccccagggaacggctgtcccacatgcaggtgcccactggacattccggcaacctggacggcctccaccacctccaacgccagcctttcctgctgtgggctccccgcaagccactgcgtgtgcaggccgagctgaagcagctccaagctcctgctcccttcgcttcctaggagaccctgacggcatcacactggccagaggcaggtgtctgcattcaagaatgaggcacccggaggccacttccccggcgtgggcctccagacagtcccaggtgaggaatccagctctgacaccagtggctgaaagactgcgtggtggacctggagagactccccagcctcaggttcttctggctcactggattgttattattatttctgagatggagtctcactctgtcacccaggctggagtgcagtggtgcgatctcggctcactgtaacctccgcctcctgggttcaagcaattctcctgcctcagcctcctgagtagctggcactacaggcatccgccaccacgcccagctaatttttgtatttttagtaaagacggggcttcaccatgttggccaggctggtctcaaacttctaactcaagtgatccacctgcctcagcctcccaaagtgctgggattacaggtgtgagccaccgtgcccggcctccctagattattatgaggattaatgagacactggacttaaacttctcagcctagggcctggaaagctgcaggtcatcagggtgaccaagggctgaaaacctctccttggctgggaatgggggatcaggattggagaggcaggaggcacccggtgccgcccgtgtgtgagagaaggggacgagggacctgccgcccgtgtgtgagagaaggggacgagggacctgccgcccgtgtgtgagagaaggggacgagggacctgccgcccgtgtgtgagagaaggggacgagggacctgccgcccgtgtgtgagagaaggggacgagggacctgccgcccgtgtgtgagagaaggggacgagggacctgatacttctcagcctgggtgaggggccgtgccgggctctgagctcacctcccccttgggcgttgtcactgcagtccggcgggggtcgatgtcctcgttgatgctggacaggaagttctgggagatgcggagggcatcctgcagcagcgggtagtcggggtggtccacaggtgtgtgcttcagcaggtcctgggaagggtgaggcggtgagttgaggggagcggctctggggcctgatgtgtggccaccggggagtgctcagtccccatccaaagggtgggcactcagggacctgcctaattcccgcaaaatctgaactacaaatcagagtcaggccgggcacggcggctcatgcctgaaatcccagcactttgggaggccgaggcgggggatctcttgaggtcagaagttcgagaccagcctgggcaacgtggtgaaaccccatctctagtaaaaatataaaaattagctgggcgtggtggcgggcgcctgtagtcccagctactcgggaggctgaggcaggagaattgcttgaacccaggaggcagaggttgcagtgagccgagatcgcaccactgcactccagcctgggtgacagagtgagactccgcctcaaaaaaaaaaaaaaaaaaaaaaaatcagagccagcacagcaggggagagggccctggctgccccctcttctcctggccacagtcatactctctccccagtgtggagaccaggtggaggctcatccccccgagcagctgggagagaaaccctgtgtctgccctgcagctgctccaaggacactggagaccaggaggcagcgggtggggaagcaggaatgcctgcctccccgggagcacctggccacgtcaagcttagtagccaagctgtattcaggccctagcctggcggcatggataccgcgggccagacaggcatccttggagcctaggaacccctgattccccaggtggactgttctcggtgactccagcaccctctcacccaggctcagtcttccactgaactcctaagccctctctggccattcggaggcttgacactcacgtgtaggactagggtgctccgagtgacccggtcaatgggcttgtagagcagagctgtcgggggagacagggagaaggaggaagaggatgatggacgagggcaacccaacaccccagagaccagcttcgtccccccacccgcatgcttcccacgtgaacacccctcgagggacaccagagtgagcccacggcagcccccacctctgttctcactccccgggccgaccaaacagcagacacaggtgacacacagccctggcagcccctgctccctccgcagccctgcctcctctcccatcagacatggcttcatcgagagccgccccgcccccctccccaggcctgtcctggcctcacctggctcaaggcagatgctctcctggacccccagccctgaatcacacagctccacccagccacgccccgaagagtccagcacacctgccacacgcaggaccccagaatcacacagctccacccagccacgccccgaagagtccagcacacctgccacacgcaggaccccagaatcacacagctccacccagccacgccccgcagagtctagcacacctgccacacgcaggaccccagaatcacacagctccacccagccacgccccgtagagtccagcacacctgccacacgcagaaccccagaatcacacagctccacccagccatgccctgcagagtctagcacacctgccacatgcaggaccccagaatcacacagctccacccagccacgccccgcagagtccagcatacctgccacacgcagaaccccagaatcacacagctccacccagccatgccctgcagagtctagcacacctgccacatgcaggaccccagaatgggggaaggagacatgctgtgtttccaggaagggcagctctccagaccttatcattctcaggctcctggagctgaaggccaggcacagccagctgggattggcatgcctcactgtgatccacaggactggcctcatctctcagaggaaagacccctccccacatcctcaaaccccagatagcaaagcacaggaaggctggaggcagggaggctggaggccaggaggctggcctgatctccacagaaaggctctgctccccgaggccagcctggccaaccagtgaaaccccatctctattaaaaatacaaaaattagccaggcgtggtggcacatgcctgtaatcccagctatttgggaggctgaggcagggaaatcacttgaacccgggaggcggaagttgtagcgagccaagatcatgccactgcactccagcctgggtaacaagagcaaaactccatctcaaaaaaaaagaaaaaaggctgtgctctcaaacacgtggcagcctgaggggcaaaggtttcctgaagcaactcaggttaggcctcacatatgagagccccaaagaggctgggaggacgcaggcaaggccagcccaggcccccaagagccacaccctccacaacccggacaccaagtgaggatggctgggattcagcagggacaggtggaggtggcagctggtggatcaacacttcccaacacccttcctgtacgcggctgcgcccaccctcccaacaggaggctcagcttcagtcctgcacctggatgctctgtccctggggtcatgaccttgggcctcctgccgcaggggcagtgacagaggcaggttggtcatctgggaagaaggatcccagactgggtgtcccataagaccaggttgtgacaggtcccagcgtgaacacgcacgccctagccgggccccaaacctgatagttctccaaagcctgagatataaataccccgtgcgcggctaagcagacacttcagggagcaatctgctggctgtgaagaaaatgcagcctcagcagggccaccagccttacccgcagtccgagcttggctgcctgtcggaatcactgggggagcggttaaaagatacagatgctgctccccagccccgtcaactcaacccaaatctctgcaagaccacaagggccatcagcatttctataaagcttctttactgatttgaatgtataataatggttgaaaaccactgctttatgttttatttatgtatttattttaatttttttaaaaatatagagacgaggggccgggcagggtggctcacgcctgtaatcccagcactttgggaggccgaagcgggtggatcatttgaggtcaggagttcaagaacagcctggccaacatggtgaaaccccatctctactaaaaatacaaaaattagccaggtgtggtggcaggcgcctataatcccaactacttgggaggctgaggcaggggaatctcttgaatccaggaggcagaggttgcagtgagctgagattgcgccattgcactccagcctgggcgacacagtgagtcttcgtttaaataaaaataaatatagagacaaggtctcactatgttgctggtctcgaactcctggcctcaagccaaatacaagctggtctcgaactcctggcctcaagcaatcctcctgcctcagtctgccaaaagttgggattacaggcatgagtacccggccaaccactggtttacgtaaatacacttcatatgacatatctgtagccctttcttatctagcagtttccagagaccctccccatgggccatggaagcttgaaggaatgaggccagtcttggggtatcctcggcactgagggtgcagcccaggtcctagctcaggtgggatccatttctgaggctgtttaaggcacccacctgtggctcagcccatcttcagggggaaaaaatcacactggagaaccccagagacccaaaagaaagcacaagctcagcagacacctgccagggtgggctccggagtggcggctccacagaaagctgacactgcattatcggctccccgcagccctctcttgggtcccaagaggaagaggtttctgactaagctcagaggtctgaacacatggcaggttgggtttcagaggggttattaacatgtctgtggtcacctccagagtccacctgagtaaggctgtggaatgagccctggaagggcggccaggagggcaggtgcacggggggggtgggggtggggggggtggcggcactgggaccacatcagatacggagggaaccgggggaataagagcggccctgaagtttgtgctccccacggcccctgcacgctggggtcccctgagaactcagggtgaggcactcgctctggcccttcccctgtccctgggctcctgcaggctggcctgcttcctgcccggcctcacccactctccctctccactgacactgacttgggcagcaagctggtctctctctagtttgctgggtactcgctctgtgcccaagggtactgagttaactgctttgctctcattatttcctgtgattaaaacgggaagcaattctcactagccccattttacagacaaggcaactgaggccagagacttgtggctacaagtggtgggagctgggtagatccacccgcactccttgctttgagctgcaccttcttcagggaaaggcagcacctgtaaaacctcaatgaaccacaggagcgttcttggaaagagtgaccaggatggggtgagccccctcctcacgagctggccctttcactcctcattccccactttgaagccgacttcaacaacagtatcacggagaccgaagcaacgtgaactccaggtcccaggtccgtttcactgagtcgaagcttccttttggggaagggagaggaagccaagggtacgtttccttttcagggaggcagagtcaagacctgaccaactcctaggccagaccaaaaagaccatttctcctctgatcgctgaccaggccaatttcaagtgagaacagggttcctgcagccgccctgctgggccgcaggagagaggctgcctcagagcttgcttccatcaagagggtcctgagaaggtcagggggcactggccccacacagcccctccagcacagccgcccctgggaaggagcccaggaaacctgccatctctcttccggcaagccaccatccccctcaagtcagccttcgacaaggagctccaaggagctccaggttaccagggagataggaaagcaaagtgactgagaagggtgcagagccgaaacacctggtgggaaggaagaggaaggtcctaaaaccagccgcctgctgctcccacagactcaggcccagagcagccggcctgggagccacacgtgcccaccccactccctgccacaggcaggcagggcaccccttggcacgtcttgcctcttgaggcagggtccacgggcttctggacacctccctacctgggccggcttcatcctcctacgaccgacagtcgtgttgatgacatgcacctgtcccgggacttccccccagcccccagccagctgcgggagctgcaaggaggatggtccgggtcccttccaccgaaaggtggtgtgtgtgtgtgtgtgtgtgtgtgtgaccttcacagagtagcttgccacacccctctcccgctggccctgccgacctgccttccacagttgagggcccagacctcggctgggggtctctcacggctggaaacaaacctctccttcctgctcccacagcccctccgtgtcctccgcctactgctgcatgtgcgcggagcacacaataccgtgccgcccagcctccgcgcctctctccagaaacaaagaaactcccaacttctccctctggctcgcgctggcaccctctcggctggcaacgccgccgtccggaccatcgccacccatcgccacgctgtgcctggcccccgcagaccctctccctggcctcagggctactacgtctgcgggcacagctcgtcgccgtctctccctaacagcccctccaggaagttctctcacactagcccaccaattccccaccgatcctcggggccacctggacccctccagcctggtccttccatttgcaagcggccctgctctgagcagcccccaggtttcaactctaggctggatgccgccaaaacgaagggggaattcaggtccagccgctcgcccaccctccttccctgcggccctctaacctccccggccacatctaagcccactccagccggcccccagaggtgggagggtccgccacctcccacagcgagcacctgggttaccataggtgcagttacagcagaagcgaataatgaggagaatctccatggcagcctctgtccccgcggcgggagcgtgcagccatcgctccaggctccccggcgcccaccagcagcccggccactcagccaccttgctgatgctgccgcacggactccagcatcgggcagccgctccggagtgctcttccagcaagggggaggggagggaggcgcgtggcgaggagaggagggaaggggaaggggaggaggggtagggagggagggagccagcagcctgctggcatcctaaagaggagcacgtttgtagctggctggctgcctgggcacgaggctagagtcctcgcgtgcgcgcacacgcgcactcagctcacactcacacgcgctcacacacgctcacgctcacacgcgctcacacacacgcacacacaaggggaagggcgccgcgttcacgcagcctgttgcctgcacagccagacaaaggtaggtgcctgtaatccagcccgctccccgaggtaccttccatggtgacagacgtgtggctgtccttggagtccttgggacctttcactttgagttcctgccaaagggaggagaggagtcatggcctgttctgtccctcacctctcccagcccccactgtgagcctggcaagaaggggagttctgaaactcagggtgtacatatgagaacagaggccgggtgtggcggctcacgccagtcatcccagcactttgagaggccgtggtgggcggatcacctgaggtcggaagttcgagaccagcctggtcaacacggtgaaaccccatctctactaaaaatacaaaagttagccaggtgtggtgtcaggtgcctgtaatcccagctacttgggaggctggggcaggagaatcgcttgaacctgggaggcggaggttgcagtgagccaagatcacaccattgcactccagcctgggcaacagggcgagactctgtctcaaaaaaaaaaaaaaaaaaaaaaaaaaaaaaaaaaaaaaagaaagacaaaggagccccatggccatgggctgcctctgccaccccaatcccctgcaccacacctgtgaactcctggagcctcgtggagtccagtggctggggcgtgggcaagaaggaagggactccaggtcccagagatgagagaggctggcagggagccctgtgattacaggaaccccgactcaggaaccctacacgtcggccaagggcagacagggtttgagttgaccagcgccaggtactccagccaatctttagggcatgaggaacccatgaggtaggaaggaagggtcccacacgccagcagggaagtggtggaccttcggcagagatgctgagctccccaggacagtgagctgcatcctacccccatcagagagcacttactcagcccccagcacccccgacactccccacccaccactgcccatgctgggggtccgagaggaagcttcgagggaggaacagccaatgcccctcctggatcccaagccaggcagcaggtagtgagtactggaaagacccccgggatgactcatctgctccaagcctctttatcctcctttagagacgttccagccccagcttttgctaacaggacagtgcagcctgcaactggagctgtaataccatccccacttggcagacggagcacacggagcctcaaagaggggtgtgggagggaaggcaggaggcaaggtgaggccacggtcaggtgcccaggtgatgaggccagggtcaggtgcccaggtgatgaggccaaggtcagctgcccaggtgatgaggccaaggtcagctgccgaggtgatgccacctgcttggtctgcaggggaggaagcgctcagacagcaggaacttcctacttctgtctcaagctgtttctagacagagaaaactcctggagatggagcttgggtgtgtgtatattttggggggcgggggggtgggggatactcagcgtccccagcctgtgtctctggctggtgcctggactcccagatttcgggaatgtttcctcacgccccctccagtgaagtctagggtatgaaatcactcctgctgcagagaggagcctaattgcagtaattaagtggcagcctcagcaggaagcaagcacgtcatcgagtgagtcaggatgagaagccacctggcagaaagccaggggcctggctctgccctccagggtgggcaggctgtgaggggcttatggttgggtgtgggggtttctgcctaggcacagagaacaggcaatcagcccaggccaagagaagaccccacactctctgcaccatgtctgaccccgggatcttgggcggccttggcagggctgatctgaacacagaccaggggagtccaggtagttcctgggttgggctggaaaccgcagggaaagcaccatttctccagccccttttatttgtatttttaatagagacggggtttcaccatgtttcccaggccggtcttgaactcctgggctcaagccaatctcccgcctcggcctcccaaagtgctgggattacaggcgtgagccactgcacctggcctctccagccacttgactccatggagagggacttccccaccctgcacttcgtcctcccaggcagagggtgacacatctgctccatgggtctgggagaagaaactatggtcagccatcctctctctgcacactgggtaagaggcgtgggctctgtcctcattgtggagaggggcctgtgttttcctattcctgcaagggactcaatagatacttttttttttccagacagggtctcgctctgtcaccagactggagtgcagtggcgtgatcgcagctcactgcaacctccacctcccgggttcaagagattctcctgtctcagcctcccaaatagctgggattacaagtgtgcaccaccacgcccggctaatttttgtatctttagtagagacggcgtttcgccacgttggccaggctggtctcaaactcctgacctcaggtgatccgcccgcctcggcctcccaaagtgctgggatgacaggtgtgagccgccacgcccggcttctataggtacgtttcattccagaggcgaagtgtcagcaagcccactgtggctacagatccaaatccacattttccaagctgcatttttttaacagtaatgaaggtgacatgttcatctccaactgtcagcttctctgctgcctctcggtggattctaaacgtgggcatcgaccgtcacccctgaagtttcaggaaaactaccctgcgtttccccaactcttctagcgttagagctgagacgggaacacaaagggccaagaggggcctttacggcaggactcccaaaactgcagaagcttctccccttttctaggatggaggttctcttgccctgagctgggggctgttcctctcaggccagtgcttcaggggtgccactgaggtctttttggacaaagggatgaactgggctctgtcctgaaggatcctaagcaactgtccctccatgccacctcttaggtagaaatgttgatggcagataggactgcacctctgccctgtggaggagtgcgggaggaaggctgggcctcaggagcagaagcacgcgtgttcccagccaggaaggctgggcctcaggagcagaagcacgtgtgctcccggccaggtaggctgggcctcaggagcagaagcacgcgtgttcctggccaggaaggctgggcctcaggagcagaagcacgcgtgttcccggccagggattctaaggctccttctccacataagtggctcttaccctttttgtgtttatgggatggcagtcttagagttggcaagaaccttaaaagacgacctatagtccaaatttcctcaagacttccctgtcataaatattacccagaagcttgttcaaatatagaatcttgggccccacgcaaagccttctgaatcagaagctccggggaaggtgccaggaaatctgtgttttaaacaatgccccagtgattcttatcaagcaaggtcaggattagctggccaagctggactcagtggctcgcacctgtaatgtcagcactttgggaggctgagacgggcacatcacccgagttcgagaccagcctggccaacacggcaaaacctcatctctactaaaaatacaaaccttagccaggcgtggtggtgtgcgcctgtaatcccagctacttgggaggctgaggcaggagaatcacttgaacccagggggtagaggttgcagtgagccgagaccgcgccactgcactccagcctgggcgacagagcaagactctgtctcaaaaaaaaaaaaaaaaaaaaaaggattatctggccatttctaaacccctcattctaccggacaggacataaaagccaagaggggggacgtgacttgctcaaggtcaccatagtgtggtgtgggagaacactgccttggattttttttttttttttttttttttgcctcccctgttcctctctctaatctgaaagagaataataaaaaaataaataaaatagatcgttttctattaagagggaaaatgtcaggtgcaagaaagcaaatatcaggctaagtgttacccattagagtaaccacttcaccgactggcaagcgagggaggggagaccaagggctctgagcagcccccaaagctccttgtccctcagggtggctatgtggggagcggcctacctctgagatcttctggaactggttgttggactggctgcacttctcagctgtctccagagcgactttatagttatcgacaaacgctttgtacacaccgagctggctggcctgcagggaggagtcagggaacagagggagaggagggtgggaggggagaggattaatgaatggatgaaagcttcacggagcaccgggagctcccctgcactgaaaacctctcactcagctcgttgggaacttggggaaacgcagggatgaacatattacagtgtccctttgaactggacagtttccatggaaaccagctcagccaataaggttaatgagggggtctggggttggggagaccaggctagggcctttgttggcctgctagaaattcaactcttcacagcatccagctttcctcagcacggtgaaggtctcccagggtttgaaatcccttaatgtctcatacttccttcacatcctggaattagccggagcagggagagaggggggtgtgtgtgctggggggagctggcacgtgtggcctgctcaggcctccctccccacgtgcagcgtggggaacgacatttaaaggtgctgtcttggccgggcgtggcggctcacgcctgtaaccccagcactttgggaggcctgaggtcaggagttccagaccagcctggccaacatggcgaaaccccgtctctactaaaaatacaaaaattagctgggcatggtggcgcgtgcctgtaatcccaggtactcaggagaatgaggcaggagaatcgcttgaacccaagaggtggaggctgcagtgaaccaagatcgtgtcactgcactccagcctgggtgacagagtaagactccgtctcaaaaagaaaacaaaacaacaaatgaagatgctgtctttccatttcccttggccttgaggccccgtcctcacctcttccacctcctctacctccaaggagccaaagccccagcctcactacacgtttgcctgtcactcacacagtcacaacctgagtcacaaccacacagagcctcgcctcttctgagaggcagggcagaccccatcgcccctttctgcaaaaggggaaaccgaggctccataagtcaattccccaaatatttatggaaaggcttcgctgcgctgtatataagcacttcctcttaagggaccaaagggtagaaattcaaattaaagccatcacgagatattttatactcatcagaagggtcaaaatttaaaagtctaattgacagcaacggctggcaagcatatggggaaatttaaactccctgtttttgtttttgttttgagatggagtttcgctcttgttgcccaggctgcagtacagtggtgcgatctcggctcaccgcaacctcccggattcaagggattctcctgcctcagcctcccgagtagctggcgttacaggcgcccgccaccacgcctggctaatcttgtatttttagtagagacggcgtttctccatattggtcaggctggtctcaaactcccaacctcaggtgatccacctgcctcggcctcccaaagtgctgggattacaggtgtgagccactgcgcccggccaattaaaacttttttttttttttttttttgagatggagtctcgctctgtcacccaggctggaatgcagtgatgccatctcggctcactacaagctccacctcccaggttcgcgccattctcctgcctcagcctcctgagtggttgggactacaggcgcccgccaccacgccaggctaattttttgtatttttttttagtagagacggggtttcaccatgttagccaggatggtgtcgatctcctgacctcgtgatccacccgcctcggcctcccaaagtgctgggattacaggcgtgagccaccgcgcccggccaatttaaactcttagactactcggggaagtgtaaattagtacaattatttggagagcaatttgttaataactaataaagctgagaataggcatggcctattttcagttgaactaataacagtgtggataggcacagcccatcgattgcttagcaaatccacttttacatacaaactgcagagccgtatcgttcagtgcagtcgccaccagctacctgaggctaccaagcacctgagatacggccggttcaaactgagacgtgccggacatgtaaaatacacagtgggttccaaagccttagtatgtaaaagagaatgtaaattacctcgttaatttttaaatactgattacatgttcaaataatatttggatctgcgggaataaataaaagatattctcaaaattaatttcacctgcctatttttacttttaaaaatgtgggtattaggggccaggcgcggtggctcacaactgtaatcccagcactttgggaggccgaggcgggcagatcacctaaggttggcagttcgagaccagcctggccaaaatggtgaaaccctgtctccactaaagatacaaaattatccgggcgtggtggcacgcatctgtagtcccagctacttgggaggacaaggcaggagaatcgcttgaacccaggaggtggaggttgcagtgagcccagattgcatcactgcactccagcctgggtgacaagagcaagaccccgtctcaaaaaaacaaaaaaaaggtgggtattagaaaatgtgaaatgatgtacgtggctcataagctatttccattagacagcagtgctctggagcaaatggcctatgtgtgtgccccaggggactcaagggtgttcaccatctcacttttcctcctcatagtggagggactggtaacaaatgctcacaaacgggggaagccgcgcacacagccatgaacatggatgcacccgatttacacatagcattgctgacaagctccaaaacgaacatgggttgaactgtaaaatacgattgctgacaagctccaaaacgaacatgggttgaactgtaaaatatgatatatgtgtatacttatacacttttttttttttttttgagatggagtctcgctctgtcaaccaggccggagtgcactggcacgatcttggctcactgcaaactccgcctcctgggttcaagtgattctcctgcctcagcctcctgactaactgggactacaggcacgcaccaccacacccggctagtttttgtatttttagtagagacagggtttcgtcatattggtcaggctggtcttgaactcctgacctcaggtgatccacccgcctccgcctcccaaagtgctgggattacgggcgtgagccaccacgcctggcttagacacatttttaaagtacatgcagctgggagctgtggtacacacacctatagccctcgctacttgggagactgaggtgggaggatcacttgagcccgagttcaagtccagcctggacaacatagcaagacctttttttttttttaaagtacaggccaacccaaaatagatacagatatgtagtaaacacacaaactgcagtctggaaggctatccaccaaattcatgccagtagctgcttcaagagggaggagggaggggagactccaccttcatgtgtgacgctgtattttcttcattagaaggttctgctgttattctttggagtttctggtttaaatgtttttcaatacagcagcaagggggatacagctgctgcctggcttcctcaggggcctctgcttcccaccaaggtgctgggggaagtgggctgctgtggacccccaccccggaccactctgctttctgcaggatcctcatgctccccaaggacccagagaggctggggtgggggtaggggtgggggcaggctggccgcagcatcggctgagcctggagcctcccagtacagaggcagagccctttgaggaagctggtggggcaggggagcggggggcatctggaaaagccagaggggagcgcgagtggggacgcccggcgtgacgccaaggccagaggcattcaggtctcagctgcagaagggcaggactttaaaagggggcagggccggacttttaaaagagggcggggcctgagttttaaagggggtggggcctgaccttaaaagggggcggggccggacgggagggagtttatttccttttccagggagtactgaggcccggcccatcaatgcccacgctacacgaggcatactagacagtcgctgcctaagccaaagtcagatcaccgatattcttccaggaaaaggctcctcttgccccctttcccacaagaaggagaaagcctggaggcccgggttggcacaccaccctcccaggagccaggggcaggagccagccgtgcggaggcctgcgtccagggtcacggtaatctcagggactgccgctgccacagtcaccccaggcggtagggcccgaggcctggcttggcaggttcattaactgggaagtgcaggttgcctggaaacagcagcctggcactggagtgatctcataaaacaaacagcagagacgctaattcccttctctcagtaacgaataatcaaatacccagagtcttcggctgaaaataaaccacctccggatgccagacctgacccggctccccccgggccctcccaaatctgcagccccaggggcctcaggcatcggttcacgatgctggggagggaaagtggtgggtagcagattcacggccaggcctgtggagccaagaccagaaccggggacagccaggtccaagtgacaaagataaactgtgacagcgtttccagcaaccctaggtttgctctcctctaccctcctgagggatgaggagaggatgccccccaggccactcagctcaggtgagcaggcagtgatgacaggtgttcaccatccctgaaccggagggagcaggggggggtatgctagaaccagagtgtggcattcccttggaaggataccttccagggtgcctcttcccaatttaataataataataataataataataataataataataataatggcactgatgataatgaccagttattgagtacttattaatttatgatgttccaggccctgttccaagcactttttcttttactttattgtattctatttctttttttgagacagagtcttgctcttgtcgcccaggctggagtggagtggcacgatctcggctcactacaacctctgcctcccgagttcaagcgattctcccacctcagcctcccgagtagtagctgggatcacaggtgcgtgttatcatgcccggctaatttttgtatttttagtagaaacggggtttcaccatgttggccaagctggtcttgaactcctgacctcaggtgatccgcccaccttggcctcccaaagtgttgctgggattataagcgtgagccactgtgcccagccatttttttttttttttttttttgagacagagtctcagtctgtcatccaggctggagtgcaatggtgtggttttggctcactgcaacctctgcctcccaggttcaagcgattctcccgcctcagccccctgagtagctgggactacaggtgcattccaccacaccctgctaatttttttgtatttttagtagagatggggttccaccatgtaggccaggctggtctcgaactcctgacctcacgatccacccaccccggcctcccaaagtgctgggattacaggcgtgagccaccacgctcagtcaggcctattctatttctttgtagagatagggtcttgctatgttgcccaggctggtcttgaactctaagcctcaagtgatcttccagcctcagcctcccaaagtgctgggattacaggcgtcagccaccacactcagccccatgcagttttcagatattaactcctcaaaatcacccaatgaggtaaatactgttactatcctgttttttacagatgaggaagctgattcagagcggttgggtaagttgcccagttgcaggtttaatctggcagcgctgggattcaagcccactttgtgacacggctctagaagctgtgctggagaaacaggactctcaggacagaaatctcaggccctgcaacgtctccctccatgcccttccgagttctcccgaggcccagtggtcaaggtcacggtgcattcactcattcaagcagtgaccactgggctggttctgggagtctaagaagaaggaaatgcaggccgggcgcggtggctcacgcctgtaatcccagcacttcgggaggccgaggcgggcggatcacctgaggtcaggagttcgagaccagcctggccgacatggcgaaaccccgtctctactaaaaatacaaaaattagccgggtgtgatggtgggcgcctgtaatcccagctactcgggatgctgaggcaggagaatcacttgaacccgcgaggaggaggttgcagtgagccgagatcacgccactgcactccagcctgggcgacaggagtgagactccgtctcaacaaaaaaaggaaatgcagtccgtcctcctggaacttgtggtttgggggagtcaggcagttactagtgctcactacgaggactggcacaaggcctgcatttggcgacttggaaagccttcttggaggaggtcccttctaagctgggaactgaccaggggaggccagacgagagggggaaggacgtttcaggcacacggggcctcaagtaccaagagttaagaaagtgcctgccctgggaactgagaacagaaagtccagtgtcaggagcacagaggtgcggggaggaagctgccaaggctggggctggacacgggtcagtgtgcaaagggtctctcgagccattcctcggagcctgaccttcatccgagggccgtggggatccgctgaaggggccgtcgaggtttcagtgactctctcccctctaaggagaggtgggggtgggaggtgagtgggcctggaggcaggagccacacaggaggatacgcagctgtccaggtgagggccatgggtggccaagaagaggaaaaggcggctgtgagcaacggccaaaaagtggagtccacaggacaggtgggggagggggtgcagccagaaagagtctgaagcactcggtgaggtaaagacaggaagcggagcaggtgacgccggaggcagggagctcagctctgaacacactcagctagaggtcctaggagtgtccaggcaggagagggagagtcttctccagcgtgagaaaggcagagccctgtccattcagccagaacacggcaggggaggggaggaggcctccagcctctcacacccagagaacagggcaggaaggaggagaaggtcctctggccactcacacccagagaagaaccgcggcctggactcccagtctccctcttgcctgctgggcggtcagacgttacgtagcagaggtggggagggagctccatgagtctgacctgggggtcctccaggggacacagccagagatggggcagagctgggggagagggtgtcacagaagcacagggaaccagaagacttctgtgaacgtttcccaacacgaggtctgcatgttaacccacccactcctgccgctcccgaccctgcagtggtgagcagggctgggcttcagtgcttcctgctcttgggacctcaggagaggatcatcggccagtgtgcccaactgcttccttttacagacccgaggtctcaggggagcagtcctcatgcccctaacccggcatgtgcccctctgttcactgagggacaggagactgaagcccagcaagaagccttcattccagggctggttcctcagagcaccctccgggagagagagggagcaccgtccgggaaagacggagcaccctccgggagggagaaggagcaccctccgggagagagatggtgctcccacagaagtgcccatccacacagcccatctccaccacccctggaaggacctatccacacagcctgtctccaccaccccagaagctcccagggctgcaccaggggaggcctagagtcaaggccccggccccaggcaccccataacacacaggcccaggccttcctcccggactcggagaggtctcaggccttcaaggagtccgagagggctgcccggtcctctcctgaggctcctgcaacactatgggctccactgaggccctgcgtgaggaccctccatccctggcagactcaccagcttctggaagaggtggcccatggtgacctggctgtcccactgttgcaccttggggcacaggttgtcatagaactccttgtggatctcatagatgtcctggatcttgtagaagatggtctcgatctgctggatggtgagcacgggctgggaggtggtggcggtggccttcaggggtttcatgggctgggagaaacagaggaagaaagagcagaggtcgggggtaaacaaaccagagtgtcggcaggccccggggccgatcgttagcccttcccgctgcccaagtcctgcccagacaaggctgccaaaggcagggcactgaaacgagctttgtatcaaggagccactgccacaggccccaacaagccgcacactcgacagcaggaacctggcctggcagctgtgccaggcccgaggggtggtgcctgggctcactcccctaccacgcagctgagctcagcagcagcctgtactgggttaacaggatccgcgtctttcttccacgatagcctgtgccccgagtcataagctccttgtcacacttcagtggaagggagggttgacagggaactcaagcctatagctgtttccttccaagaaacagaatgtggttctaggactcagaaggtagggacccgaagttactcaagaccagtcttggcctcactgatgttccaagttcccgtcacttggcacagggagaggcatgggcgttcacgtgtcccccactgcagcccacccccgtggcagacattgctaagcgaccgtgatggtccttcccactgcgcatggcaggggtctccagtctcagactctttctcaatgcctgcctgtctataccaagatgctccagggcctgccagtgtagacggtgaggtggcagataacacagaccaacccccagcactggccgggagctgatgccatcaccttccagcctagcagtgggaccgtgggataacgggacgtgcaggcatttcctcagtgtggttctctgcattttataaatcacctacaatgaatgaatatgaataatcagaaaaaaaaaaaccaaagatgaccaggctgtactgcaaaggccctgcaggacacagggcctgataacctgccatacagggaaggtgtggcagggaagggcagggtggccagagggagagcagccacgtcgaattcttttttttttggagacggagtctcgctctgtcgcccaggctggagtgcagtggtgcgatctcggctccgcctcccgggttcacgccattctcctgcctcagcctcccaagtaacagggactacaggcgcccgccaccacgcctggctaattttttttgtatttttagtagagacggggtttcactgtgttagccaggatggtcttgatctcctgacctcgtgatccacccacctcggcctcccaaagtgctgggattacgggcgtgagccaccgcgcccggccagccatgtcggattctgttgatgttcttcacctacctgaaggccacgtggaaagaggcttagacttggctggtcacggtggctcacacctgtcatcctagcactttgggaggccgaggcaggtagatcacctgaggccaggagttcgagacaagtctgaccaacatggtgaaaccccgtctctactaaaactacaaaaattagctgggcgtggtggtgcacacctgtaatcccagctactcaggaggctgaggcaggagaatctcttgaactcaggaggcagaggttgcagtgagccaagattgcgccactgcactccagcctgggtgacagagccagactctgtctccaaaaacaaaaacgaggcttagacttaatctacgttgctctgcagacccaggaacagtggggaaaagttatggggtcagattcgggctcactagagctgtcccccataggattaagtagtgagctttccgacaagagaagcattctagcagagaatgggtgactccactgctgaaaatgctgcactgaagggaacaccaaagccagcgccagctccctctgaacgacgaccaccagctccagccaaccacggcaaactcccagcccagcctcactccagcctcacatcacctcattctgatgaagtctcatctactcagatatatcgcctcactctgatggagacagaacccatgttcactggaagaagtcgtctcatctactcagacacccagatggtgctctgccttctggctccttcatcctccgagctctaaaaagcccagatccaacaatccatgcaggacaaagcaggaccctccttctgaccctcgccgcgctagaaacaacggcccctcagtgtccagtcaggactctccttctgaccctcgctgtgctagaatcaatggcccctcggtgtccggtcaggcccctccttctgaccctcaccgtcctagaaccaacggcccctctgcgtccggtcaggcctctccttctgaccctcgccgtcctagaaccaacggcccctcggtgtctggtccttgctaggcaagcgcatggggttccacctggtgcaggccaggcagggtgggcttgagtcgcagctctgctgtgcgcacatcactcagcatccctgggcttcgtgtcaccagcagcctcatgtgtgaaactgggataatacagccatgcgctacctactggcattcccgtcagtgcgtacacgatcatggtcccagactgcaattttttttttttttttttgagacagagtctcactctgtcacccaggctggagtgcaatagtgcaatctcggctcactgcaacctccgcctcccaggttcaagcgattctcctgcctcagcctcctgagtagctggaattacaggtgtccaccaccccgcccagctagtttttgtagtttttgtagatatggggtttcaccatattggtcaggctggtctcaaactcctgacttcaagtgatccacgtgcctcggcctcttgaagtgctgggatgacaggtgttgagccaccatgcctggctgagacctttataatccagttgggcaaaatgggccaacacagatgaaatgactatggacgatgcgactgactgtaagcaccaaccacatggttccaaggttgtgctggagtagcctggagggctgcatggaggaggcacacataccaggtccttggagagctgagcaggtggaggagtgggggcgtagagaggcatgccagacagggaaacagaaggcaccgggaggcaggagcaagggaagagtgtccccccaagcccaggtgggtgagctgaaagctttggggactccccaccctccatgagggacatggaactagcttcaggattgacatcgtcgtaagagtttatccttttcacctcaacgcaggaccccacggaggagcccgcagagtcgccacagaatccccatacccaagaattcttgtccccgccttggcgcagtccccactgagggggaaataagggaagcaggaaggtcagcagtcccaggaaggccaaggagacgggatttctcagaagccgcgacgcgctcatctgccacccacacgaagacaaaacacaatggttatgcttcctcctcaacttcccaccccgtctgcaaaaggggaagaaatggacgctcacccacagccagtcacaaggacggggcctgcgcttggggcatcagatggttctcatgacacgatggggaccttggctgttactcctgatttcactcgcggggaggggacagggctgggtgtgtgcccttggctggccaggaccctcgaggccgttatttgtctctggtgaagtcctgcgtatgggctcaggggcaggagggtggactgaaaggcaaggtgacccacactgagcttcggcacggcacagccattctgccaaagcgctagcacaccactcaggcaccccctcctccccagtcctgctgcagggacaagggcaggccccggctctccatttcaccactcgagttctcggagaggacccgtgagtgacttcaaccctggctcccataccagctgcttctcaggaagacgggcctgggccggttctcacttgccagtgggacttcacatagccgtttgtcagctctgtcccccagcgaccggcctttcgaaataagggaaagaaatgtacccacttcctccacctcctgccccagaaggcctggcatgcttgctgccatgccacccgagtcactcgtcactggagcccagggaggaaggcctcattcacctgttttatagataaagagcctgcgatgcagcgtggccaggagtccaccccaggagggccagtcgtggccagcggtgggaggggctctggggagtggcctcaccctgtggccccagcgtagcaagacacagttcccaagctcagttcccagtgtcaaggagatccagaatttcaatgcagttggcttcatcttttttccttcaccccctacttcggcccaggctcccaggcttttcctgtaatcagagcccaccaggaagcaggagggccccagaagatgacccccacaagcaccccagaggccaggacggaggcttctgtgtggaggctcgtctgccccgtgtgtgcacatggttttaggtacacacacccagccctttgcatatcaggaagtgttcagatgaaagcaaacaggctggggcagagcggtgggaatggggtcaggagtgggaaagcgagcatggagggaacgaatttcttctccttcaagctggcacctttgcgaggccaccccgaagagcagaaggtttagcttcctcctagctgaggggtggggagggtgcaggggttcccagctcagggaggagaggaggaagggtgtgattctttcactctgaggttttcttctgaggctgtggctgtggagggtcctactcctcttcctgagccctcctaccacagacctggcctcccagcgagttcttcctttgctccctctggtctctgctcaagaaagagccaagcaggggcccaggaggagagagctgggggaaggtggggaacccgccccgggaggagagagctggggaagggggggaacctgccccgggaggagagagctggggaaggggggaacctgccccgggtggagagagctgggggaagtgggggaacctgccccgggaggagagagctggggaaggggggaaacctgccccaggagagagctggggaatgggggaacctgccccaggaggagacagctggggaaggggggaaacctgccccgggagagagctggggaaggggggaacctgcccggggaggagagagccggggaaggggggaacctgccccgggaggagacagctggggaaggggggaacctgcgccaggcatatcaggaagggggcccctgccccacagattctgcctttggggcatgagctgttagaaaggcagagcagggaggggctcttggtcttggcccagaggaagaggctcgtgggtggcaggtgggatctaagggctccgtgtctgatggggacaggcgccactccctccttcagggaacgggtgtgttgtggcagaaaccacgaagccctaacctgtctcctctcccagcaatagagaaattaacagtgtcaacgaacactcaggctgtgttctaagagctttatgtgccggacacagtggctcacatctgtaatcccagcactttgggaggccgaggcgggcggatcacttgaggtcaggagttcaagaccagcctggccaacatggtgaaatctcatctctactaaaaatacaaaaattagctgggcgtggtggtgggtgcctgtaatctcagctacttgggaagctgacacaggagaatggcttgaacccaggaggcggaggttataatgagccgagattgtgccactgcactccagcctgggcaacagagcaagactccgtctcaaaaaaaaaaaaaaaaaaagaactctgtgtataaattcctttaatcctcacaacgaccccatgaaaagcatactatttgtatacccagtttgcagatggaaaaactgaggcacgatagctcattcacctgctgaaagcctggagccagtacggccaggcagtctagatcctctgtctgaactcctttcaaatacacaccctgttagtaatgacaactatgttcctttttggacagcaattcacggtttggaagacgtgtttcacgaatgtctgacgggttgtctctttgcctgtcctcctttcttccactaacagttgagtgtcttaagtaactcaacgctgtatgaggtcccgaaagcatctcccgatcttctcaaccccatggaaagagagagaaagaatggcatccctctcatcttcagatccagaaatggaggctcaaggaatttatgtagggcttgcccaaagccagcagttttcttttctttttttttttttttgtgatggagtctcactgtgtcgcccaggctggagtgcagtggcgcaatctctgctcactgcaagctccgcctcccaggttgacgccattctcctgcctcagcctcccgagtggctgggactacaggtgctcgccaccacgcccggctaattttttttgtacttttttagtagagacggggtttcaccgtgttggccaaggatggtctggatctcctgaccttgtgatccgcccacctcagcctcccaaagtgctgggattacaggcttgagacacggcgcccggccaaagccagcagttttcaaacccacaacaggtgtaagacaccatgggcccggcaattacatatatatacaggcacacagacagacaacaaaccgaaagttccctcacttatctttcccgtgtatgatgcatgctgacattttttcattggtttaaaaatgctggttcaacccactgtactggtttcacaacccactgtactgatttcacaacccaaagcactgatgggctgagaggcacagtttgagaaacagtgcaatacgcctgctcttaatggcagggccaagtcttgccctagctctggccccagaccaggaccctcagctacctgccacactgcccctcacttggaaaacagctccgtacacacagataaactcctggagagatgggacgtactcagcctggcgtgtggcaaaacagctgcacattcagagtttcactcttgttgccccggctggagtgcaatggtgcaaactcggctcactgcaacctccacctcccgggttcaagcgattctcctgcctcagcctcctgagtagctgggattacaggggcccgccaccacgcccagctaattttttgtatttttagtagagatggggcttcaccatgttggccaggctggtctcgaactcctgacctcaggtgatccacccacctcggcctcccaaagtgctgggattacaggtgtcagccactgcacccagcctttttttttgaggaatttcacttccgtcgtccagtctggagtacagtggcgcactctcagctcactacgaccttcgcccccagattcaagcaattctcatgcctcagcctcctgagtaactgggattacaggtatgcaccaccacgcctggcttttttttgcatttctagcagagacaaggtttcaccacattggccaggctggtctcgaactcctgtcctcaagtgatctgcccacctggggctcccaaagtgctgggattacaggcactgagccacggcgcccggcctgcacctgcacatttacacagtcattcctgggtaacataaatgtcaagtcccctgggacactgacagcatctcagggttgacgtgtgacaacacctcacgtcatggcaagtacttaaatgtgcatcttagaattcttgttaagaatgagcttccacagatccacacttctgcgtctcccttttctgacaattaccttatgtctcaggctgcaaaatacccaaaagaaagattgacacgccacgatcactctgcataacatccagacacatctaaggagcactttcttccaaggcaaaaccacctcacatctgtgtagtacttttatcttccgaaaacattttcatattcccctcccaatcagactctcacaacgatgcctccatctgggaggggaactgaggcatgttaccgagggctgagcttggcctgatgcctcagagctgtgccgcttctcaaaagaacacagacaggccgggcgcagtggctcatgcctgtaatcccagcactttgggaggccaaggcgggcagatcacctgaggtcaggagttggaaaccagcctggccaacatgataaaatcctgtctctactaaatacaaaaattagccaggactggtggcgtgcacgtgcaattccagccactcgggaggctgaggcaggagaatcacttgaacccgggaggcagaggttgcagtgagccgagatcgcaccactgcactccagcctgggtgacaagagcaaagctccgtcttaaaaaaaaaaaaaaaaaaaaaaagaacacagcctcccacctcatatttcctgacacggggcctcaggatggcactaacggttccctcacccagggaggtagaaggacttggacacaagacggcagagacttcttaactggattgattgggaatgactgcccagagcacagcgtggagaaggcgctcggcccccgcccaggcaggcagagcaccatgatgggttcacgatgccctatgccagggtcgtgggtgacaggtgtgtttgccatctctaagccgggtgtgcttctcctgccttttgagagctggagctgagaggcacaggccctttctggcaatgacccgggctgcccgatgcccagccagaagcagaccagctgcagactctgtccacagggagggacgggtacggtcccctttcctctccaactccaaaagcagcttcagagcatgacatcacccaacacgggcggggggaccggaaggccccagagcagggactgtactcaccagcaacagggcttccagctggttaatgtagatctcttcgctggccaagaaccccgagagaaccagcttcctcatctccaggcctttccctgcttccacctgcacaaacgcaaagcacagccaacagctcatgagcaaggaggccaaaaccctgcgtggacggtctgcttccctgcccttcccccccgacctttattttttttttgagacgaagtctcgctctgtcacctaggctgaagtaaagtggcacaatctcggctcactgcaacctccgcctcccgggttccagtgattcccctgcctcagcctcccgagtagctgggattacaggcacctgccaccatgcccagataatttttgtatttttagtagagatggggtttcaccatgttggccaggctgatatagaactcctgacctcaggtgatccacccacctcagcctcccaaagtgctgggattacaggtgtgagccaccatgcccagccattatgccagactaattttttttgtatttttagtagagatggggtttcaccatgttggccaggctggtatagaactcctgacctcaggtgatccgtccgcctcagcctcccaaagtgctgggattacaggcgtgagccaccgcgcccggcccccctttcccctttccttttattttaagcgacactttcataggggataaaagtcagatattattataaaaaatatacaaaacatgcagaaatataaaaggaaaagacaatcacccatattcctcctgtaacatctcgttttgcttccctcaatctattttccacctgggttctcgaaccgacttttcctccctctcttcctctcctcctgcctgtcccacacaccagagctggattcaactcctaagagtgccaccttgcccgatgcttgccaaggaccgagtatgaataccgcaaaacgcgagtacttggggattccactgggctatgtgtccatttatttattcattcaataaatatttactgaatgtccaccaggccctatagataccatgggaaacagacagtggcccctgttctcaagtggcttagactctagtgggaaagacatttattttttcttttttttttttttttagagacggagtctcgctctgtcgcccaggctagagtgcagtggcgcgatctcggctcactgcaagctccgcctcccgggttcacgccattctcctgcctcagcctcccgagtagctgggactacaggctcccgccaccacgcccagctaactttttgtatttttagtagagccgggatttcaccgtgttagccaggatggtctcgatctcctgacctcgtgatccgcccgccttggcctcccaaagtgctgggattacaggtgtgagccaccgcaccctgccggaaagacatttaaaaaacaagtaaagattcggccctagactgggacatggggcccaccatatcctttatgagccacctgcagtggcccggatgcccgtccctacccttccagtctttcccacagccaggacatcgctcagtctcccccacacgcaggagaaccagcctcctcatcttcaaaggtctctagctttcggttcgttctttacctgctgcctaaaatgccatctttccctgaggcatcgtggccacagaaggggagtgagagggccggggagacagggtagtggtgagggactgcttggaagatgctacactggtaggtttgaagacagaggatggggccacgagctaaggaatgcagagagcctttggaagctggaaatggcaataaaatgaactcactcccctagagcaggggcttccgatcttttggctcccctgagccacactggaagaagacgactgtcttgggccacacataaaatacaataacactaacgacagcagatgaactaaaagaaaaatatataatgttttaagagtttacaaatttgtgtcgggccacattcaaagcagtcctgggccgtatggccgcaggctggaaaagcttgccctagagcttccagaagcaatgcagccctggagatcctttttattttaattaatctatttatttatgtatttacttattgagacaaagtctccctctgtcgcccagggctggagtgcaatggcatgatctcagctcactgcaacctctgcctcccaggttcaagcgattctcctgcctcagcctcccgagtacctgggattacaggcgtccaccatcacacccactaatttttgtatttttagtagagatggggtttcaccatgttggccaggctcgtctcaaactcctgacctcaggtgatgcgcccgcctcggcctcccaaagtgctgggattacaggtgtgagccatggagccgggccgagatcctttttagatttctgtataagagaataaatttgtgtggttttaagcccttaagtttgtggcgatttgtttcagcagcattagaaaagcaagacagaccccacgcttcaggcaagggcaatagttacttattggcggcttcacaaattccaggaactgagcttagctatctttgtggttcaattcaccggagtctcaaaacctggcaggtgttatcatcttcctgaggcaccgagagtcgggactgccagaggcctgcacagcctccagcacacgtagccccgggggacaagatcagagcctggaacagcccccagctccagcccctccaggtcagaccctcaggggtcttcctgctgcttcccagccttgacaaatgggaactcatcccctgtgctgggggctagcactccctcctgttccctgccaaccaaggttttgcctgagggtttagcaaatgccacaccgtgagctgtaactgtagagctggttggactaggatggggggaagaaagggatttgcagccccagccacaaacaagcttcatcccccctggcacgagcatagaccctggaagccctgtaatcgcccatttctgcaagatcctcccctcaagacttccattcatagtccactcttgaaaggctggttctgatgggaagacaactcaggaagaccctccctcaagaggcaacagtcagccccaagagtcctgctctgggccccgttcacgctgcagttttggctgagattggagcaaaggcgttggagagcgtacggatgggaaattagcctcggtgcacttggctaacaggagacccgttgctcagtcaccaccaaaggaaggcctgttccatctcccatcttttccagctttcctcagactccacaattcccagtttagagccatgaggaaattcacattgtttcttcagtctttgcagggcgtctcttgtctcatcaaaaaccaggctcaccactcactcacccattcccaccgggagccaggcactgggaatacgaaggtgaaggagaggtgcccacgtgcctagaatgctccggagcgagttctctaaagagttccaggtcccacagcctctgccacgctgcctacctgtctccagcaccgggaagctgcctgtcctcacttcctcccagccagaacttgtgaaatgcagtcctggtgggttcgtttatcctcagcatcctgcacaatctgctaggctgacagtgtggcagcttgaagccgccaaaccaaagacgtcaggtcactctggtaggaacaatgtctagagataaggcgtggccagctcaggcctggtcctccacagagttgagaggctaaataaagcctccaaacatctggttccaggccaagcaaagacacaatctctccagtagcactggcctccaagacaacaagcagggctggctctctggctgcgactcaaggctatagggcatgcagcgagggtctgaggcttcacagacggtagaagtcagttcacgggccacagctggctgccaggagtacccagcaggatctgctcagagtagatgccactgggcctgggggtgggggtggccgtgcctggggcttatacccacaccaagcatcaacctcaggacaactggcccatctcagtctcaggacagctgaggcagtgtagaggcatcgagagaccctctcctctcccagcgctaggcgctgaggaagtctctttcagctgcttccttggcagaatttagaacagagaagacgggtcaactgctgggggacaaagaccaaattccagtggcccctctctcctgaagggtggatccccgtattctgggctccctattgctgtctgaggtcttaggcaggcaccatagggcacaggcaatgttttgaaactttggttgttcatatcccacccttaaaattttgccatactcacataccaccacctgcactattctttactcaatattgttctttacagtaactttttttttttttttttttttttgagacagagtctcactgtgtcacccaggctggagtgcagtggcaggatcttggctcactgcaacctccatctcccgggttcaagtgattctcctgcttcagcctcctgagtagttgggattacaggtgcacgccaccacgcccagatactttttgtgtttttagtagagacagggtttcaccatgttggccaggctggtcttgaactcctgacctcatgatccaccgcgcccagtctcccaaagtgctgggattacaggcatgagccactgcgcccaagaactgacttgtaaaaagcagtcttaccctacacgtatttgaaatcgtaagaaaaatgtacaggtcatattttttctaatatatattaaaatatatacttaaccattaaaatgcaaaatatagatcgaggtgccaccgatcatttctcaaatcaccacgtggggcccgcacttagaaaaacatccaaatgggggatacaggcatgatgtgcaggcacaagagacctgggcaggtgaaacagaaatagagatgtttcagatgatccattaaaaactggcacagaattgggctgggctcagtggctcactcctgtaatcccagcactttgggaggccaagaggggcagattgcttgagcccaggagttacagactagcatgggcaacatggtgaaaccctgtctctacaaaaatataaaaattagcccaacgtggtggcatgtgcctgtagtgagggggaggctgaggtgggaggactgattgagtctgggaggtggaggccacagagagccatgattgtgccatcgcactccagcctgggtgacagagtgagactctgtctcaaaagaaaaaaaaaaatggcacagaatgatacctaaagggttaatctgcattacaaaagggtttttattcctgacaaataagttccttaaaatagcaccttctacaacgcccccgtcacaaccctacctatctttaaatagaatggcatgaaacatttttggcaagtgtaagccattttacaaatgcaacatgacgctgctatcagtattttatttgcattaccagttttacagatcaataactcttcaaaggtaagtctgggctgagatatgcagcaaactccagctatagctttggagaaaactgcagccaactttacctctgccccccaggaagatgaagcgtcttggaaatgacactggaaacaggattgatttatgggcctggcacttgggcacatgctcacaacgcaactgctgcttaaggtaagtacccctaaagtaaagtaatagcaaagagaattgccttggattcctactagctgccagggaagggtgtgccaagaacctctgcagcccaggacaggagtgtatcatccagaaatgacccttggcctgcacacacacacacatgcacgcatccaggccatccccaactccactagaagtggtcccttctcccctgaatttggtgcccttttatcagtactcttctcacagtcttttttttttttttttttttgagactgagtctcaccctgtcgcccaggctggaatgcagtggcatgatcttggctcgctgcaacctctgcctcccaggttcaagcgattctcctgcctcagcctcctgagtagctgggattacagacgcccaccactacgcccggctaatttttgtatttttagtagagatgtggtttcactatattggtcaggctgatctcgaactcctgacctcaggtgatccgcccacctcagcctcccaaagtgctgggaatacaggcgtgtgccaccgcatctggcccaccctgcctacttccgtactctattcctactccctgtacctgccccttgctctgaacgccttgtgagggaagatcacgccttgttcctcttgtcatctctacagtgccaggcagggtgctctgaagagcacctaacctgagagtgtttgttgaatgaatccaggagctttcttcccaccgctctgtggccacctgcttgtcttctccctctgaggccaatgccggtagaggagggaggaattctagaggtgttcaggatggagcagggagcctggaactccccggcattcgagaaaggtctccttcccccatgctggcagcaaagtagaggggaagacaccatcccggtgctcacggggacccaggaggagcagcgttttcaggtgtgacacgtgctcaggctctcttggcatccgtgggccaccgccgtacacagcaggacacctctgagatggagcgaggctgggaacctggtgcacccttcgtgggccccagcgggcctcacacattgtgcagactctcacaggcaccagccccacaccaagcactgtgcagtgttcagcaatgaatatgacatggtcctggtcctccaggagaatgggatataattgcggaggcaaatgtctagagttctgagcatctgagcagaatgaaatacgggcttagctgaggcatacgccggggtccagcagaaggggaggtccaggaggcagcctctgagtgggcccacatctgtgctgggggcttcccagaggaggcccatgagggccacacacctcccatcccagcattgctactcccagcctgactcctggctcaggagcagactttcccaccctgttcctagtggggaggctggtcagaccctaagtgcagaggcctccctgagcccacggggagacgtgacttacccccacggccctacgccagcaccagatcagagaagacagggtggggtgccagccactgccagcctccctacagctccactccccacccaggcctgcagccaccgctccacccatactcacacatcagccatctcccgtggttctgcatctatttttacctccattggctcctcctcagagccacactgtagagtgggtggggcaggactgtgatccccatcttctgtgaggggcagggaggcccagagaggttcagggacagcctcccgtccccagcaatgctggctgcacatgccttctaggccccgccgatgggcactcggttaggcagcctcgcctagcagtctgcaaactccccgaaacgcatcctcactgggcctcccttctcgacacagaaccagagagcagctgagcaaaaggctgaggtggaagctctgagaggtgtgtccaggagagaaaaaggaagaccgctgtggtgtgccgggccagactcacagagccggcgtggttccggggccgccccgctcctcaagggattctggccaccactgccctccagttccaccgggagccaacctctcctacaggacgggtcactgctgcagagaacgccgtcagccccagagcgggtgggccagggcccagcagatgctccctgcctgtcccgcctcgggaagggcacctgcccacctggctgcagcctccaagccagctgttccctccccccttcagctgacccagtgcttttccttcaaggaagctcagtgacctctggctcttgccctttgcaaacaccctcttgcctcagctcggagacaccaagtccctgtctcctggctgggaagagggtggcccctctcttgcggttgccgtggaaacgggggattcctgcccacccgctccagggaggcggcgaggctcgggctgacaggcgcgccaggtgactcctggcacagccgccggagccctgagctgggctggcctggagggggcggccaccactgccccgaggacaccggtcggggaggcaggcccgcccctctcccccgggaacagctgccggggccgggaccctccgccgagggcttccacccggccgcgcgctctgcgcccgcatcagccatttctcccgcgcaccttcggcagcgccggcccggccccccccagcgcccagggcgtgtcacgctcccaccttcacagccaccaggaagggggaccctgagccggggctggtcggggttcccagctcgcactcctccaggagaaacacatcttcgtcctccagaaccttgtccagcaagcctatcgcctcctcttcctcctccatggcagccggagcccgcggagggcagacaggaagcggggtccacgcagcggcggcgggaggagggaggagggaggaggcgggcgggagggggggcaggtctacacccgcgcgcccggcctggggctcccgacccgggactgcatcccggacctagtccagcccgctccgccgccgccgccgccgcctcgcgcgtcctcgcccggcgaaagggggagcaaggcccgggcagcccctgacgccgtgcccggcccgtggcggaggcgaacccgccgcacagcagcccagcgccctcctccgtgtcccgcccggccccgcagggcccgcccttcccgggctccggggctcgggctcgcgctcgctccgaacacacaggaaacgcgcgtcgcgaggtggagccgcccgtcctctggggttgcggggccgcggctggcggaggcttctgcggcggaggaggagcgaggaggccgcggccgggccggggtggggtggagcggggaggccgcttcccagacgcatcttcattccccgcgcgcggccgagccaggagcccggcgagcaggggcgacccccagagccaccccggagtccccatgcgccggagcccccttccggaggggaggccccggcccgcccagaagccacagccgcgtcccgccgccgctggaggagtcaggctttgcaacagacaggcctgacctgcccccaggcaggagcgcggcgccaccactgtcctgcacaggagcggtgggcgtcccactcacagggaccaggatccccctcctccaagcagcccccctcctccgagcagtccccccactcacggacgctactgacaccagcacccccacctcctctgagcagcccccccactcacagaccagcccccctactcacaggcgctgcagagaccaggacccccacctcctctgagcagcctcccacctactcacaggcactgctgagaccagcacccccacctcctccaagcagcccccccagccaccccaccgcagggagccatcctgcaaggggagtgcacacagaacccaggacaggcaccatctccggccctgcccactcccagccagcttcccctggcttctccaatggttgcagaacccccaactgtgcagggagtgaggccacattctggtccccctggccctagttcccagatgcacatacacctccttccatgggaggaggagtccagaggaggccctgggaaaagctcttttacaacccaacgatggagcaaaggttgcaaacggcacccatgagggtgcgggtgaggcctgcgggtgaggccagccggtgaagcgagccaggtagggcagggtgaaaccaccactcactccagccgatggctgctggaggaaacgcaagctcatggctgcctgatctctgttcaaaataagctaaaatctggcttattaacaggaatgctcctgattttaaaacgatggcaaataattaacattttaaaacaacatggtgccgtctaaatgaaccacacctgtggcccgagttcaggccacagccccccactccccccagaattcttcagaagctctgggctctaggtggggctcatgcaattccattggcagcagagaagctgccctccctggagagaggctccatcctgttgcagagctgaaatacagagcaggggattgcggggtgagcccttgaggggccccagggctaacagcctttgatcagggaactgtgccaccagggttcaacagaggcacacccccaccccacccatctccttccagcccctggttttcccctgtccctgcctgggtgggttataaatagccagggcgcatctgaagggccctttcagccacaattcctcatttggtgcgggcgggtgaggctgtggcgagggcttgggaacgaccaggcctggcattccccagggcacaagtatgccagctcagggcctggtaccacgggttcttctgtctcccgcccggcgggctccaagtgcatggcatgggctgcccacatgagtcagacctgcaggtgacacgaagaagggcctaaaaccccacaggcccctgctgtgttccttcctccactcaagaggacatgaggtgcccttggaagtctgccaggatatcctcgtccccgttccccacacctctacacggcatggtgagactgacgcccacttcttcccaaaatccctgaaccccacacaagtgactccctgagtatccagggcctctctactccaccctgtccccggtggctggaaattccagtgagtaatgagagtgcccctccatcagacacagactccactcacaggccctcggtgcccccctggaggggaagtgactcaccagtccccacagcttccctccccttccctgacaaatgccctgagccagccctggacctgagctccacactccatctgcctcggcctggctcctaatgttctccatagaagcagcctgcttcaaaggcccccccaaacggtttattccaaagccagaggcctccctctccgactctttggcctctgcagtctagagtttctccaagccctcagctgccctgttgatgcaggcactgccccgaccactctctggtgtaggctggcccttcattctcccgcctcctgtaaatgtggagtcacttgcttgggcccagcctcagccctctgctcccttcccccagagaagcagcccttctcccttccaggccagtggtggcccgctgccagctgcagccctggtgtcttgctgggctctaggtctagcacctgccccggccactgggtctcctcacttggaagcccagccacggcccttccactccacacatctggaccaaaggacccttcctccttctgaaacagcttccccttccgggtttccacttctgttagtgcggccgccatcttacgagtcttccttccctcaacccccacatcccttttaccaagtccttcggttcttcttttcctttgccaaagccaccaccccaccaagctttagagcctcttacacccacacgaccacacgtacttccccactttggctcctgatcttgtctgtccatctgtctgttcattcattcattcatacccagaaaaggcctggcatggcacacatacgaggctgggagacggggcccttgccgttctcaggctctcgatccgtctggggtgaggacgtgtgaacacacgaggcagtgttctcgtttaccagccaccctggggatggaggacagtggcactaacgctgcctgagagtgaaagcttcacaggacagtggcttctgagtagcatctggaaatagggaagggtttccaggcaaagaagagaaggcccgaaaggaaagggttaagcagcttcagcaacccggttgcagtggcgcacctgaaatctcaggtactcaggaggctgaggtgggaggatcgtttgagctcaagagttggaggctgcaatgagctatgatcgcaccactgcactccagcctgggcaacagagccagactctgtcttgagggagggagggagggaggaaggaaggaaggaagagaggaaggaaggcaggttaagaagcgctgcttgctagaggacagaagatgaacttggagaagtgggctgaacagcatcatggagggtgaggggcataagcacacaccacacctagctactgtttgaaatctttcgcagccactgagatttctgacaccatcaagtctaaatctcagtctccaatggttgactccccacagtcttcccccacacccaccctccattccctccttccctgacccaatcagcaagcatttgttaacgcctgacccaatcagcaagcatttgttaacgcctgacccaatcagcaagcatttgttaaccacctgacccaatcagcaagcatttgttaacgcctgacccaatcagcaagcagttgttaaccgcctgacccaatcagcaagcatttgttagccgcctgctgtgcaccaggcagtgtgctagcatcggaatgcagccatggacagggaaccccgtgcctaccctcgcggagctgacagtctcagggacagattgacctggtgactgactcccaaggcagtgtcaagggaggggcaaggccgtactggggaggggagcagtgtcagaactctgcagctgaggtgccacttttctggaagggataacatggaaacacctattgcgattttttttttttttttttttttttttgagacggagtctcgctctgtcacccaggctggagtgcagtggcatgatctcagctcactgcaacctccgcctcctcggttcaacccattctttcgcctcagcctcccaagtagctgggattacaggaacccgccaccaggcccggctaatttttgtatttttagtagagatggggtttcatcatgttggccaggctggtctcgaacccctgacctcaggtgatccacccgcctcggcctcccaaagggctgggattacaggtgtgagacacggcacctggcccactgcttatttttagattcgactttaaacgtcacctcctccagggagcctcccgtgactccccgttggctgcgtcagatgtgcccgctggtgccctcagagcccactctacgttcccaatcgtggcacttctattttaacttctttattttcctgttacatcactaacaattctaactctgtagacacacataataaagaaagagaaagtctcctctggttccctctgacagagggagcctctaagagttagttatacatttttccttatttgtgtccacgaataaactatacatataggccgggtgcagtggcttacgcctgaaatcccaacagttcgggaggccgaggcaggaggatcactcaagcccaggagtttgagaccagctgggcaacatggcaagacctcatctctataaaaattttaaaaaataattagctgagtgtggtggcatgctcttgtggtcccggcttcttgggaggctgaggcaggaggattgcttgggtcaggatattgaggctgcaatgaactgtgtttgtgctactgtgttccagactgggccacagagaaagaccctgtctcaaaaaaaaaaaaaaaattaggctgggcgcagtggctcacgcctttaatcccgcactttgggaggccgaggcaggtagatcacttgagttcaggagttcgtgaccagcctggtctacgtggtaaaaccctgtctctactaaaaatacaaaaattaaccaggaggggtggcacaggcctgtaatcccagctactctggaggatgaggcacaagaattccttgaatccgggaggcagtggttgcagtgagctgagatcacaccactgcactctagtctgggcgacagagcaagactctgtctcaaaaaaaaaaaaaaaaattatggccgggcgcagtggctcacacctgtaatcccagcactttgggaggctgaggcaggcagatcacctgaggtcaggagtttgagaccatcctggctaacacggtgaaaccccgtctctactaaaaatacaaaaattagctaggcgtggtggtggacgcctgtagtcccagctactcaggaggctgaggcaggagaatcgcttgaacccaggaggcggaggttgcagtgagccgagatcgcgccactgcactccagcctgggtgacagagagagactccgtctcaaaaaaaaaaagcagtggttagagatgctggtggggctggggaacagacaggagagagactatgtgaggcacaatgacatgagtttagtctggctggttcatgcattcattcagctaatatttactgagcacctactgtgtgccaggcacagttctcggcaccagagactgcaatgagcaagttttgttacaaaaccgacaaaatctctctctcgtgagagttcacaattctagcacggagttggtcctgaggccacagaggtaggcagggggtccaggggtcaggtcacacaaggccttgacagctgtgcaaagggaaggggggccccataggcgaagggaaggtgctggaggatttcaggacaggtgtgacaggacattcatcctgcatccctcctgctgacatcagatgactctttctaaaacactgctcactctatgcccagcaggaagccaccaagccagcccaaacaagagccgtggggccccagctgatgactcacccatctcactgttgacagtaacctctcaaagggcctggcacgttctcacttccaggcctttaacaacggcaggtcctcggcttgaagcactttctcccgcctcttggcttctccctggctctcccagctttcctggcagaaactcaagccccacctccagactgtatgaagctcagtagctcttcagccaatgggaactgacaccaaagggcaagtgccagggcagttgcagccactaactgcagccacagatgggactggattcgtcaccttccagatcaccttgctcctccctctgcctcctctctgttctagtacaggtcactccaaaatcatatacatagttcaactacataaagctaatgttggccagatgcagtggctcacgcctgtaatcccagcactttgggaggccgaggcgggcagatcacctgaggtcaggagatcaagaccagcctggccaacgtggtgaaaccccgtctctactaaaaatacaaaaaattagccaggcgtactggcgggtgcctgtaatccccgctactagggaggctgaggcagaagaatcacttgaaccccgggaggcggaagctgcagtgagccgagatcacaccactgcactccagcctgggtgacagaaggagactctgtctcaaaaaaataaaatacataggctgggcgaggtggctcacgcctgtaatcccagcactttgggaggccgaggcgggcggatcacctgaggttgggagttcaagaccagcctggccaacatgatgaaaccccatctctactaaaaatacaaaattagccggatgtggtggcctgtaatcccagctacttgggaggctgaggcaggagaatcacttgaacccaggaggcggaggctgcaatgagccgagattgcgccactggactccagcctgggtgacagagggagacgccatctcaaataaataaattacataaaataaaataaagctaatgttgaggagaagccggtacacaacactgtttatacagtgaaacaaataaactaaaacagaaagaaaactcccctgcactctggatgtgagccccagctctgcctcttgccaactgtgtgacctgggcatgtcatctagtctccctgtgcctccgtttcctcatctatagaatgggggtaattacggcatcaactctagggctgctagctagccagaagacggagatcccagacagggcgtgagagctgtgggatgagccaggccagccaggtgtggttcatcagggaagattaacagtatgcagaggtgagcaagatcccagccaggtgtgaatgtaggagggccagagaggacgggagccagcgatgacgggacccagggtcacaaccaaggcactagtctacctacttccgacttacctccttcccaactgggacaagcccaggagccaccctgagcctcagtgtcttcatctactaaacgggggcagccccatggctggaggacttgggtggcagggcagcccctgggctcctagcacagcacctggcacacgggagggtccagctcgtgtccttctctttgcagcagggacccaagatccaggaaggggagaaatgcaggggccggctgctggggggcggaggctgaaactcgaggagtccctgaaccacacaacccaggtccggagcagtcaggagggagtggagcaggcaccatctcaggagttcctggctgccatgccgcctcttcacgcacctaccagcaacctcgaatcccaagccctaagccttctgaagagaccaagaaagggaagaagaggctgcagttcttcccagcgttatccctgagcctgagtcctcccagcgttattgcctgagcctgagttcctcccagcgttatccctgagcctgagttcctcccagcgttatccctgagcctgagttcctcccagcgttatccctgagcctgagttcctcccagcgttatccctgagcctgagttctccccagctttatccctgagcctgagttctcccagcgttatccctgagcctgagttctccccagctttatccctgagcctgagttctccccagcgttatccctgagcctgagttcctcccagcgttatccctgagcctgagttcctcccagcgttatccctgagcctgagttctccccagctttatccctgagcctgagttctccccagctttatccctgagcctgagttctccccagctttatccctgagcctgagttctccccagctttatccctgagcctgagttctccccagctttatccctgagcctgagttctcccagcgttatccctgagcctgagttcctcccagcgttatccctgagcctgagtcctcccagcgttatccctgagcctgagtcctcccagcgttatccctgagcctgagtcctcccagcgttatccctgagcctgagtcctcccagcgttatccctgagcctgagttcttcccagcgttatccctgagcctgagttctcccagcgttatccctgagcctgagtcctcccagcgttatccctgagcctgagttctccccagctttatccctgagcctgagttcctcccagcgttatccctgagcctgagttcctcccagcgttatccctgagcctgagttcctcccagcgttatccctgagcctgagttcctcccagcgttatccctgagcctgagtcctcccagcgttatccctgagcctgagttctccccagctttatccctgagcctgagttcctcccagcgtcatccctgagcctgagttctccccagcgttatccctgagcctgagttctccccagcgttatccctgagcctgagttcctcccagcgttatccctgagcctgagttctccccagctttatccctgagcctgagttctccccagctttatccctgagcctgagttctccccagctttatccctgagcctgagttcctcccagcgttatccctgagcctgagttcctcccagcgttatccctgagcctgagttctccccagctttatccctgagcctgagttcctcccagcgttatccctgagcctgagttcctcccagcgttatccctgagcctgagttctccccagcgttatccctgagcctgagttctccccagcgttatccctgagcctgagttctccccagcgttatccctgagcctgagtcctcccagcgttattgcctgagcctgagttcctcccagcgttatccctgagcctgagttcctcccagcgttatccctgagcctgagttcctcccagcgttatccctgagcctgagttcctcccagcgttatccctgagcctgagttctccccagcgttatccctgagcctgagttctccccagctttatccctgagcctgagttcctcccagcgttatccctgagcctgagttctccccagcgttatccctgagcctgagtcctcccagcgttattgcctgagcctgagttcctcccagcgttatccctgagcctgagttcctcccagcgttatccctgagcctgagttcctcccagcgttatccctgagcctgagttcctcccagcgttatccctgagcctgagttcctcccagcgttatccctgagcctgagttctccccagctttatccctgagcctgagttctccccagctttatccctgagcctgagttctccccagctttatccctgagcctgagttctccccagctttatccctgagcctgagttcctcccagcgttatccctgagcctgagttcctcccagcgttatccctgagcctgagttctccccagctttatccctgagcctgagttctccccagcgtcatccctgagcctgagttcctcccagcgtcatccctgagcctgagttcctcccagcgtcatccctgagcctgagttctccccagcgttatccctgagcctgagttcctcccagcattatccctgagcctgagttcctcccagcgttatccctgagcctgagttctccccagcgttatccctgagcctgagttcctcccagcgttatccctgagcctgagttcctcccagcgttatccctgagcctgagttcctcccagcgttatccctgagcctgagttcctcccagcgttatccctgagcctgagttcttcccagcgttatccctgagcctgagttcctcccagcgttatccctgagcctgagttcttcccagcgttattgcctgagccttccttgctcctcccttcctcctgactgaacatcccagaactacttggttccattccacaaataccagttgagaacccctaggtgccaagaagcttccactggggtccacagagatgatcagggattaaggtcctgatctcacagggcggatgcaccccacaagtgaccgtgcacacctcccaaactgcagtaggatcagcggcggggtgggtgtgaaagcttcacaagggagggcgtgtgagcgggacctgacagcgctgtgcaggctctggcatcatagaaacccaagtttcaataacacgctgccccgctggctgcatggtcttggacaaacaataatattaatagctattattaagagatggagtcttgctctgtcacccaggcggggtacaatgcctattcgcaggcgtgatcctagcacctctcagcctccaactcctgggctcaagcgatcctcctgcctcagttccccttgtagatgggattatgggagtgaactaccatgcccagctaatcttaggcaaattacgtcacctctccgagccccagttttcacacctgtaatgtggagatggttatagcacctacctcatagagttgttggggctcttaaatgaaaccaacacgtgaaaggttcagcacaagcctctctaagcagctgtgatgagggggaggaggaggaagaggatgatagggacaatgatgatgatttttttttcctttttttctttttcttttgagatggcatctcactctgtccccctggctgctggagtgcaatggcgtgatctcagctcactgcaacctctgcccccactgggttctagcaattctcctgcctcagtctcccaagtagctgggattataggcacctgccaccacacccagctaattttttgtgtatgtttttagtagagacagggtttcaccatgctggccaggatggtcttgaactactgatctcaggtgatccacccacctcggcctcccaaagtgctgggatgacaggcgtgagccaccgcacccggccaatggtgaggatttcaattcgcctccacccttatctttgggttctcctgcaggctggagtctaatcccctgtttcgattttacattgacaaagcattctgccaaacaccatctcacagaaacctcacaacagctgtgaggtttgagccctgtgaggtcaggagggaggaaattctcagtgtcttcacactacagatgagcaaactgcagctctggtggggagtcatgagtgacacccctcaggccacacagtgagacagtggtagagtggggacaaaacccagttcttctctctgccttgtagcccctttttactaagcttcccaagaggcaagcagacagaggagtctgtggcctgtggggaggcgggttttctgtaagaccatggtcctgccttaggaacctacacccccacttgtcagctgagatgagtcctggccctttcttctcagagtgaaactgggcagtctccgctgaatggagccacccgtggtctgtgggcctggccctgccgtgctgccctgctcagcctggacttgggcagggtttatggggcagggcttcaggtttcaccctaatacctctgtgggatccatgtcttggggacacaaaagaagacaaaggcagagtgcaaggctgtggaagggcgtgctggggagagaggagcatgtcctgccaacaccgcagagacccggcttcacccggggccaccccatgtggcagaaaggaggttgattgcaaaagcaggttcggtcatggtgcagcagatattgatcagacttggtctttgcagtggtaatgctgttggctccccagccctctaaacctggcgagaaaagtcttgtgggccctggtggccaagggctgtgcactttggtgagccaggcctaatgctgcaggcctcccctcatgctgaaattccgcagcatcttcctgcagctgctcacagtgggatgggagctgagtccccccaggcagggctctgagccctgctgtggtctgagagctgctcacagtgggatgggagctgagtccccaaggcagggctctgagccctgctgtggtctgagagctgctcacagtgggatgggagctgagtcccccaggcagggctctgagccctgctgtggtctgagagctgctcacagtgggatgggagctgagtccccaaggcagggctctgagccctgctgtggtctgagagctgctcacagtgggatgggagctgagtcccccaggcagggctctgagccttgctgtggtctgagagctgctcacagtgggatgggagctgagtccccaaggcagggctctgagccctgctgtggtctgagagctgctcacagtggggcctcctccccactacctttcaggggagttagagctatctagagacaaggagactgaggctcagcggtatgaggacacttgcccaatgtctcacagctaaagagtagattttcttttattttcttgagatggagtctcgctttgtcacccaggctggagcgcagtggcaagatctcggctcgctgcaacttccacctcccaggttcaagtgattctcccgcctcagcctcctgagtagctgggattacaggcatgtgccaccacgcccggctaatttttgtatttttagtagagacagggtttcaccatgttggccaggctagtctcaaactcctgacctcaggtaatctggctgcctcagtctcccagagtgctgggattccaggcgtgagccaccgcgcccagcctgagagtaatagattttcatctgcgcaaagcttatctgctttccatcctgggtggctgaaggaataatagtatgacacttcattttctaggccaacctgactaggccacaaggtgtccagatacttgtccaaacattaatccggacatatttgtgaggcatttgggatgaggttgatatgtgtattggtggactgagtaaaaagactcctccccagtataggtgggcctcatccaatccactgaacacctgaatcaacaaaaaggcagaataagaggaagctcctctcgcctgactacctgagcgtgagctgggatgttggcctcctccagcctccagactcggactgaaacactggctcttcctgagcctcgagtccactggcttatgagctggaatttacatccctggctctcctagctctcaggcctttggacttggactggaaccaatattggctgtcctgggtctccagctattgactgcagagattaggacctctaagcctccataatcacctgaatcaattccttctaatacttttcttcgtatgtagatatagatacagataacgcacacgccctgttggttttgtttctctagagaacactgactaacacaaagactcaaccttgggcttcccgttggctgcatatttgggcgtggaaggcccagcgataaggcggtgccagaagccagatatctgaatatctacaacaattgtctgatttggtccagaagtcccccctgttcccaaggccccagcaggaagcctggtaggggaggggacctgtttggccaaataagcacagccaagccgcagaaacctcggtcttttattaatagtgtttttaaccaaaacatccccaagtactcaggaagaggcgtcagctccctccaggcaccccgtgtaaacagcaatccctgcagagtccactaggtggggccggtgacccagcggaaagggcagaaacgctccccgaggagggaaggcaggtgcgcggatgggacctttgcccggacgatccccaggctggacaagtgctccctactcctgccttgcgtggcttctagtcgatggtgtaaacatcaaccctgggggccacaagcactttagggggcagtcactctagcatctctggatttcaaggtcctcaagccaagtgagtccctcgtgagccaccaagcaagacgcacagccaccaagtcaagttctgccccgaagccccggagcgccaggcgggggcatctgtgcgtgacgcccgtgatctgtctcccgagagaaggcacctgccagcaccaaaggaatcggaaaatcgacggacacggaaaccagtcatggtggtcacgcgacaaggacagggcacagggacagggagcaaagagggaggtggcgcggggacaggcagcggcaaagaccctggccccacaccgggattccgcagcatcttcctgcagctgctcacagtggggtgagagctgagtccccccgggcggggctctgagccctgctgtggtttgagagctgaaggcagagatgggagcgagagtcttctcctcgttgctctcccctggttggcccccgttcaggtccctgaacacctgctctgcctccttgggttactatttgtaccctgagcccaatgcctccaggagaaccagggcaaaaaccctgcccccgcaggtccgagacgcttgtctctaacccgcctcccgtcttagggcaggtcaacaacacactgaccaaccccctcgccggcccccttgcctcccacctgccccccgccagcccttcccacaggtgcacgcctggactgccgctaaactcggcctcggcctctgttgccatggcagcaatgtggcttcccccaagtgggaagcccgttgccaaggcccttgttgccaaaggctataacagccaccccggtgtgtgaagaggggtgagagctctgtggggggtggagggtggccggcggggctggaaggagcagggggttctcaagaatgggagggttcaggcggcctcagctggggtgggggggcactagcccctggaggaagaagaggcagcccgtggcatctcagcgactgctcctctggggacgtcagaaggcaggacggagaccccctacaaaacacacccggacgagcaggaccaagcaaggatggggcactcccaccgcctcctgcaacacacaccccccacagaggaccggcttggattcttctcccccaccagctccaggcaaacaacccccagaacctctgttttgctcgttcatgtgtctccgacacgcacacacgagctgcgctcagacagcgtcagtccctgtcgccaggaacacgttaatgacaaggaccgcaaaccctccacagtttctatccctggcctgtctcagagcacatacttaatattccttctacaatgcttctctctggagcagaactcttgtctctgtcaacaaggagaggtggatgccatcagagtttgttcccttccagagtgaacagaggagggctggagcgggcagctcattgcacccacagggagcaccaggcccaggctggctttgcgggagcagcatctgaacacctggagcccacgggccacgcatgcagccactgcctggcctgggtgcagaggggaggagagcctggtcctctcctgggtcctctggaggagacaggctaacaggggaaagctgaaagaggcacggaggggtctgggaggcctggggagcagacggctagtagacggggagagacaggggcggcagcgttggcaaagcaggtggggagggaagcccgagcctgagaggggtccagggccaggacgagatgacgaggcaccaagaacggccaggtccaaacgtctccagtcccaatctctcgagaccaacccaagcagggcctggcccacgatgcccaggccttcccgtcacccctccccaaacccagaaagaaaagccggtgtacctaccccaggagccagtccctcaggtggagtcggggagacgccatcccccccgccctggctgcgggcgctgagctgcggggacatggtgggcgactcatcgatgtacggcatggtctctgagccctccgggggccccttctgctcctcattcccctctccgtcgtactcgtccgtcccgtagctgaagtctgagacaaggaacaagaaaggccactgagaatcctccaccagagctgccagggactggtagcgtagtgggcgccggcggcggcccccggcagccatggccccggccgcaccatccacgcctggcccgggcgggggctgtgcgggggcctgggcctggtgaggggcgggggagagccagcaggcaccgggccctgcccgctccggggctgctgggaggcggggaggagcggctctgctgttgctacccgatgaagagcatgtcagccgcgtatttcaagctgctgttttctttgccttctgcctaattccaagtgtaaaaattaacagtgggagcaagaggcaggacgcttccaactctcctctctgagtcaccattttgctttttatagggaataaggaggtggggggggccggtcgatgtcacttcctgtggccctcctccttgggtaccatttgtactgagcccactccctccaggggtccagggcaggttctggagtgtgggaggggagccctcagccctcagaacaaggccccgcacggaggacggagcccaaggcagcagggcgtgggcgaggaggctgtgcccaggcctggcagggacaggggctcacagcagactcctcggagccggtgcttatttctatcaccccagtgtgggcttccttcaaaggaggagggaaggaaaggcgaccgggaagttgagccgcattaaccccccagggctgccagcaccacttgggctccagagcccaggcacggagcccacccaccttgggaggggaggctgagccagtgcagcgagcggggtgtgcaggtcagcagctcagggcttcacattttccaaaagggttacgagggcggcctcggaaaggcccctgcgtccagccccaccagcatggctataggagggaccctcccacaaaccggcccctgccccttggcctgtttgctccccagctctgacccaccacgactggcaacggagaacgtggcagtgttgctcccgagggctgtggtggacctccttgggctggggccgccagcggggggtggacacccctctcacactcatcgcagagcaggggtaagcttcagcactcgtgcgggccagcgggagctggcaccgcagggcgtcctggagacacgaagatcaccgtgccggcagccttggggccagcaggagcctcctacgcaccggactgcccagtggcggcgtccgcttgttaaacctccccgggtatcttccgggcgggactccctggccaggcatcttcggatctcgcacagtgtgatgggggaggctggctgagcctgccctgccatctgcccagacatcctttcctccaggtcaccctccccatggcacctggccccctggcaccttagtgaatcctgcccctttgtccttgagcccctggggcaggaggtgagcatctgagtcatcactgtacgccagcacccacaaccccacctgtggcaggctctcggggaaagtgcgtggagcgaatgaatgagcagaggatcgcaccgtctgtctcaggtctgaggcttcagccaagtcccagccagccaagttctccacgggggccccagctcttccctcctctgtcacaacacaccagcccacaggcaaccagcagctggagaatggtgtcaacaggtcaccgggacgcctggccgtggccacactctgcccaatctggccttttggcagccgagcgcttcccctaggctcgctgcacctgcttctgtcggctgcctctcctcgtccctgagccaatgccccattcagctgccaggggacatggactagttttttccctagacagggttgtgtatgaagaaccacaggacccagggatgccccatcactgagatgagtgtacaccacacacccgggcaggacccagggatgccccatcactgagacgcgtgtacgccacgtacctgggcaggacccaggatgccctcccactgagatgtgtgtaggccacgcacctaggacataaggcccagtgccctggagaccatgacacttgtgtctgtggctgaagggatgtgaaatgactctggtccttccagggggaggaggaagaggcacagcggcacccagctggcctgagtctgggtccgtgaagggcctggccgtttggtgacaccccctcactctggagaagcacaggaggggatggaaggcagcctcccgccggcccctccctcctccctcctcctctccaggaggctccaggctgccctgttggtgcctggagtccagggaaaacaagcaatagtggaccgcggctttgcccacagtttagattccagccggccaagcagactctcctgtacactgaccaattcccaggggtcgcaggaatggaccccacacacttgggagatcgtccaagatcaacgggggggaagggacggtagggaaggtctctgccagtctccccacatgcacagttcatcctgatcagagcagaggaccacgggccctgccatcccctgctccttccagcctggatgttccgcggggaggcagttcttatttttcccaatttacatacaattgccgaagatcacaggatcagaacccaggtctcaaatgccctccctttccctctgaatctcactccaaagaagtccccttccatatccctcctggttaaggggggctgaccatggagctgaacgcagggggcctgaggacagggtgctggtgggcggaggcccaggggtggcgaaagggctcggcctgcgaacatttccagggccttcccctttcatttctgcccccacaaaaccatgagagcccaggagactccaaccaggaaaaggggtacagaaaagatggggaaaccaatcctcggagaaggcaggaaccctgggggaggaagatggggacctactgagcacaggcttcagtctccgacggccacaggtgggtatgctgagcagacagcggcttgggcaccagatctcaaaaaagaagaaaaggcagacaaggcaaaggctgctggcagccaatatccatttccccgctgactaacagaaatcctactgtattcggagcggcagtgcacccagcagctagttcaaagacacctttcctgatggtgtgagccatatgattacgttctagacaacaagatgttacagggatatgtgtggaacttgcaggaagctgctggaagagactgatttagccgaaaggtacactatccacactgcccttgttcctccttctgttgctggtttggagagttgatgggatggctggagccccagcagccatcctgaaccatgaggtgagctgaggatagaagccaccactgaagacagctgagcagaaagctgggagtccaggtcactgagggcacagtggagcccaccccaggaaggtctacctcgggacgttttcacaagctgggagtccaggtcactgagggcacagtggagcccaccccaggaaggtctacctcgggacgtttttacataaaagaaagaaaaagtgccaaatgcaatttgagcctctgttacttggtttttctattatctgcagtcaaacctaaggtaactgacccaggtgatcttccctgacgtccccgcttcggtgcttttcctctgactgtcaccgtccttctcaggctccttggtgaaatcttctttctctacccatcccttaaaaattgctgttcccatggaggggaacgtcacacactggggcctgttggagggtggagggcaaggggagggagagcattaggacaaatacctaatgcacgaggggcttaaaacctagatgacagggccaggcacaggggctcacgcctgtaatcccagcactgtgggaggccgaggcgggcggatcatctgaggtcaggagatcaagaccatactggccaatatggtgaagccatactggctacaaaaaaattagccaggcgtggtggttggcgcctgttgtcccagctacttaggaggctgaggcagaagaatggtgtggacccaggaggcggggcttgcagtgagctgagatcgcgacactgcactccagactgggcgacagatcaagactccgtctcaaaaaaacaaaaacaaaaacaagaacaaaaaaagattcatgcacttcagcaaatgttgggctccagtgagtgacatgctggagtgaagtgtacaactctctgcaacttactccgaaatacataaaaaataagatgggctgaacgcggtggctcacacctgtaatcccagcactttgggaggccgaggcaggtggatcacgaggttaagagttcaagaacagcctggccaacatggtgaaaccccctctctaccaaaaatacaaaaattagctgggtgcgatggcgggtgcctgtaatcccagcaacttgggaggctgaggcaggagaactgcttgaacccgggaggtgggggttgtgatgagctgagattgcaccattgcacgccagcctgggtgacagagtgagactctgtctcgaaacaaccaaccaaccaacaacaaaaaaaccaagatggaatgatgatgttcagagggatggaaagatggacagctgtgtgataaagcaagcgcataaaaatcatcactgggaacgttagacagcaggtgaatgggtgttcactgtgaattctttcaacttttctgtgtgcttacaattgttcatgataaaatggtggtggtggcagggactggtactcgccagcttccatcaacctcgcatcaccttcctctcccgaattgtgttcctgctcccggaagaagtcaggtctgcagactcctgggcatctccacctttaggagcctcaaacgcagccttttcccaaagaccacacacgtagggaacctgggagccattctagatgcctccacattcccgcccctcatctcctgcactgtgaggcatcccccctcctccccaccctcaccaactcttacaaggacaattccagcaccctccccacagcagccgggtcacaaatcagaccgtgttgccccccattcacttagggacacagccccgctcctcagctcaaggccctttgtggtctgcacctgctccacctctccagggtcctattctcctgccctgtgacatcggactccttctagctccctgcggtgggttcagtagtggcccccccacaaggtatgtccagattctaattcctgggacctgggaatgtgaccttatttggaaaacattctttgtagatgtgaataaatgaagggtctcaagatgagatcattgtcgattaaccgatgggtcctaaatccaatgctgtgtccctatggaaagagaaagggggaaaacacagacagaagagaagacagaggcaaggtttggactggggctgccaccaaccaaggaatgcctggagccaccagacactgaaagaggggagtaagtgggaactctgccccggcagcctggggaggggctgggactttgatttcagacttctggtcttcagactgcgagagcatcgatttctgctgttctaagccatcaagttcatggcaatctctaatggcagcattaagccacaaatgcagcgcctgacacgcacacagctctcccctttgcacaccaaatgcagtgcctgccacgcacacagctcgcccctttgcacaccaaatgcagtgcctgccacgcgcacagctcccccctctttgcacaccaaatgcagtgcctgccacgcgcacagctcccccctttgcacaccaaatgcagtgcctgccacgcacacagctcccccctctttgcacaccaaatgcagtgcctgccacgcacacagctcccccctttgcacaccaaatgcagtgcctgacacgcacacagctcccccctttgcacaccaaatgcagtgcctgacacgcacacagctcccccctttgcacaccaaatgcagtgcctgccacgcgcacagctcccccctctttgcacaccaaatgcagtgcctgccacacgcacagctcccccctttgcacaccaaatgcagtgcctgccacgcacagctcccccctctttgcacaccaaatgcagtgcctgccacgcacacagctcccccctttgcacaccaaatgcagtgcctgacacgcacacagctcccccctttgcacaccaaatgcagtgcctgacacgcacacagctcccccctttgcacaccaaatgcagtgcctgacacgcgcacagctcccccctttgcacaccaaatgcagtgcctgccacgcgcagagctcccccctctttgcacaccaaatgcagtgcctgccacgcgcacagctccccccctttgcacaccaaatgcagtgcctgccacgcgcacagctcccccctttgcacaccaaatgcagtgcctgccacgcgcacagctcccccctctttgcacaccaaatgcagtgcctgccacgcgcacagctcccccctctttgcacaccaaatgcagtgcctgccacgcgcacagctcccccctctttgcacaccaaatgcagtgcctgccacgcacacagctcccccctctttgcacacactgctcccgtgcctagaaaaccctccttgctgggcgcggtggctcacgcctgtcatcccatcactatgatgtggggcatcctccaaggcaggaggatcacttgagcccaggagtttgagaccagcctggccaacataaggagactctgtctctatgaacacacacacacacaaagacacgcacacacacacatacacatatatatatacctctccttaccccttgtccacctggtgaaatcctgttttgccctcaaatctgcctcatctgtgccctctcccaggaactttcctgtattctacatattatgataatacttgaataccgaaagcacttttttttttttttttgagatggagtctcgctctgtcacccaggctggaatgcattggcacgatctcagctcactgcaacctccacctgccaggttcaagcgattctcccgtctcagcctcccgagtagctgggattataggcatgcaccaccatgcctggctaattgttgtatttttagtagagacggggtttcaccgtgttagccgggatggtctccaactcctgaccttgtgatccacccacctcggcctcccaaagtgctgggattacaggcgtgagccaccacacctggccaataaagcacttttacaagccaatgagaaaagatgaaaacctcaactttctaaatgtgtaagggaaatgaacagaaaatttaaaagagaactacaaatattcaaaatgtattaaaaagaatgttaacctcatttgtaatgaaagaaaatgtaaagttctatatagttttcactgttcgtgtcaaattggcaaggattttaagataataataacaatatccagagctgtcagggcataggtactcacagaaactcttggaggctgcctataactggcacaactttggctgggcacagtggctcacgcctgtaaccccaggtctttgggaggccgaagtggacggatcacctgaggtcaggagttcgagaccaggctgacccacacggagaaaccccatctctactaaaatacaaaattagccaggcgtggtagcacatgcctataatcccagctacttgggaaggctgaggcaggataatcgcttgaacctgggaggtggaggttgcggtgagccaagatcacaacattgctctccagccttggcagcaagagcaaaactccgtctcgaaaaaaaaaaaaaaagttggcccaacttttctagagtcaatctggtaactggtatcaaaaggtttagtggttggtacagtttatacccagcgtaataagattatgatctatgatactagttataaatgaacataaaaataaagttgtaagtcacagggctgtctgtaagtgtgaaatattaaaaacaacctgaattatgagactggttgagtcaattatggtttttctacaagatgggctgctatatagcattaaaaactatatggatgatgaatagcatcttatcaagtgcaaaaagagattaataacaataattaaagtatgttacaatgtctgaaaaaagtaaaaacatacgtgcatagaaaaaagactggaaggctacaacacaaaatcattagagccttccgattctggaaattttgaaaaaattaatgtacggtctctgcgctctagggcactggcagacacccgacacccgtcttcccttcttccttgcttactctaccctcgttttctaggaagtggcaacagaccagtcccaggcaagatacccgctttctctgcctctctcattaccaggaacggctgccctacaccattctggccactgagacccaagtgaagcatgctgggacctctggcaaggccctgactttgatgattacaaagagacgttttgccttgaactcatgggtgatgattggagttacggtggctttactgctgccaccaggaacatgtcaagaaagaacagaggccgggcgcgtggctcatgcctgtcatcccagcaatttgggaggccaaggcgggcagatcacctgaggtcaggagttcgagaccagcctgggcaagatggtgaaaccccatctctacagaaactacaaaaattagccgggtggtgactcacgcctgtaatcccagcactttgggaggctgaggcaggtggatcacctgaggtcagaagtttgagaccagcctgctcaacatgatgaaaccccgtctgtactaaaaatacaaaaattagccaggtatggttgcacacacctgtaatcccagctacgcaggaggctgaggcaggagatcacttgaacccaggaggcagaggttgcagtgagctgagattgtagcactgcactccagccggggcaacagagcaagactccctctcaaaaaaataaaaattaattaattaaattaaattaaataaataaaagaacagagccatttccctcatgctgttcagctgagccacactaggaagagcctgtctcatttcctgctcatgggaaatacaagtccctatatattgggttttctgctgcttacaatgaacacatttccaaatgatatcctcacagcccagagaggaagcgagtccaatcagcaatcaaatctccgagatgctacgacagaggcctcaaaggcccggcaaggcagaccggagggtgtgggcaacacttggggaggggaggtggctggggaggctttggtgccacgctaaggaagacagttcatcgctgtggctgagagcagggaccctgcggtccggcagcggaggttccagcccacgctctggcacttcctaacctctctgtgcctccgaggagtgcctggcacagggcggctgctactaaatggatacgggtttagcaaatccgtgtgaaacgggggacgacacaggatcaagtgcacgggccgctgcgggggttaaactggatgacacgcatacagcacttagcacataggaagcacccaatccatctcagctgctattattaatgttattaattggatcttgaaagctgtgtgggtgcctgccaggcgggtgggggacaggagcagagtttcaggcggtgagaggaggcttggcagtggcacccagtgggaaacagcagggcccctggaggggactataaatagccaggagggctagaacacagagtgagcagagggggagagggccgtgctggagaggaggcagggacttgctcctgagagcctcgtgagctgagccgagagccgtgcaggactcagtgaggatgggtgacctggcccatgatcctctgcaggctcttgccggccacatcattgctgaatattgctaactttattttttattctttttctttttttcttttttttttttttttgagacagagtttcactcttgttgcccaggctggagcgacaccctccagcctgtcgcaagggtgatacagaggctgactgttaagtgataaacttattttctgcccaagaattgaggatgggaatgagagagggaagagcagctgagggagcccagccctgaccattattccaccaaagctgcatcaaaagtcttcagagaggccaggtgcggtgtctcacacctgtaatcccagcactgtgggaggctggagcaggcagatcaccggaggtcaggagtttgagaccagcctggtcaacatggtgaaagcctgtctctactaaaaatacaaaaatcagctgggcttggtggcaggtgcctgtaatcccagctattcggggggctgaggcaggagattcacttgaacccgggaggcggaggttgcagtgaggcaagattgggccactgcactccagcctgggtgacagagcaaggctctgtctcaaaaaaaataaacaaataaagtcaggtaatgtgattcttccagttttgttatttttgttttggttccatataaattttagcattttttttttctatttctgtgaagaataccattgtttgagcattattcctaaagtccctgggatattcagaatggtcagtgagcactggtttaaagtcacccctgcactggcccctaacactagagtcagcctgtccttctgtcctttgaaacttcgaagccaggcacggatcccttttctaggatgaaagtcctacatatgtcttcttccaatagaaggctgttttgtctacattgaaaatctgatctgttttgtttttgttttgtttggttttgttgttgttgtttgaaatagagtctggctctgttgcccaggctggagtgcaatggcgcgatctcagctcactgcaagctccacctcccaggttcaagtgattctcttgcctcagcctcctgagtagctgggattacagatgtgcaccaccaggcctggctgatttttgtatttttagtaaagacagggtttcaccatgtaggccaggctgatcttgaactcctgacctcaagtgatccacccacctcggcctcccacagtgctgggattacaggcgtgagccaccgcgcctggccaaaaatctgatgtttagtgcggtgaccttcctttacagtctttgctacatcttctgcacaactggccgcagcttctccatccgtacttgctgcttcactttgcctttttctgttatgaaagcggcttctttcctgacccctcatgaacaaatctctgccagcttcaaactttcctctgcagcttcctcacctctctcagccttcacagacttgcagagtgcgagggccttgctctggattgggctccggctcaggggaacgttgtggctggtttgatctttatccgaccactcaaactttctccatatcagcagtggggctgtttcccttatcattcttgtgttcactggagaagcactttgaatttccttaaaacacttttcctgtgtgttcacaatttggctaactggtaggagaggctccgcttccagcctatcttggctttcaacaagccttcctcactacactaaatcatttctttttttttctctctctctctctctcttccttctgtctctccctctttctttcttttctagacagtctctatcacccaggctggagtgcagcggcacaatctcagctcactgcaacctctgcctcccaggttcaagtgagtctcccacctcagactcctgagtagctggaattacaggcgcccgccaccacgcccggctaatttctctatttttagtagcgatggggtttcaccatgttggccaggctggtcttgaactcctgacctcgtgatctgcccgcctcggcctcccaaagtgctgggattacaggcgtgagccaccgagcccgggctaaactgaaccatttctagcttttgatttaaagtgacagacgcacacctcgaggccactgtagggttactcactggactaacttggatatttttgtgtctcggaatagggaggctggagcggggagaagagagaggctgggaaaggctggtgggcggaacagccagaacacacaacgttcatagatgaaggttgccgggtccggtctgtggtgcccaaaacaatgacaatgctaacatggaggatcgctgatcacagatcactgtaacaggtgtcataacaataaaaaagtctgaaagatcgtgagaaccaccaacacgtaacacagagagaatgcgaggtggccacacacttccaactggtgaaaaaaaacgcagcatctttgaagctcaactaagcatggaggtgccgtaaagcgaggtacgcctgcacatgagtgccgtaaagcaaggtacgcccgcatcacaggagtgccgtaaagcgaggtatgcctgcaccgcaggaggctatttactttaggttggagcaaaggtaatatataatggtaaaaaccacaattactttttttttttttttgagacggggtctcactctgtcacccaggctggagagcagtggcacaatttcggctcactgcaacctccgcctcctgggttcaagcaattctcctgcctcagcctcctgagtagctgggattacaggtgcccaccaccaacacccggctaatttttttttttttttagtagagatggggtttcagcatgttggccaggttggtctcaagctcctgacctcaggtgatccacccgcctcagcctcccaaagtgctgggattacaggtgtgacccaccacgtccagctctcaactacttttgcaccagcctaaatacaaagctcaagaacaggcgaaacaaatggatggtgatagaagtccatggcagtggctttctgggggtggacgacggggacagggagtgttggctgggaaggggcaggaagcaactttccaggacactgaagatgttccatatcttgatctgggtgttagttacacaagcagacatatggaaatattcaccaagctctatgcttaagactggtgcacttgaaaagcttttttttgttttttgatttttgttctttgttttttttagagacagagtctcgctctgttgcccaggctggagtgcagtggcacaaacatagctcattgcagcctcaaactcctgggctcagatgatccccctgcctcagcctcccaagtagctgagaccacaggcatgcacaaccatgcctggctgattcgaaaaagtttttgtagacacagggtcttgctatgtgggccgggctggtcttgaactcctggcctcaaagagtcctccactttggcctcccaaagtgctgggattataggcatgagccaccacactctgcctgaaaaacttcttaaaaatttaaaatctaagttgtactgttgcaggaaactgaggaccggagagaccgatatggagaagggaaggactgtttattttaggtatgcactagctcagtggatttgcatttaaaaagcttagcattgaataaagacagaatggggtttttataagcagacttcacaaaagtaaaacaaaagcagttaatcatatagtgcataacttgtggcttgtagctgtgtcaaaagaaaaacaaggactggctaaatccagacatttgtaaaaacagttatgcttaggaagccagggaaaggagtaacagtaaaggaatttctttcttttttccttcaaccttgctctaaaaggcgggtgtgtggagcccatttctttagccttggcttcttaaacagcgttatcttataactccttaaagtgagcttgctaggcagaaaaaaaaagaggttttttttgttcctttgttttttgttttttgagatggagtctcgctctgtcgcccaggctggagtgcagtggcgccatctcggctcactgcaagctccgcctcccgggttcaagccattctcctgcctcagcctcccgagtagctgggactacaggtgcctgccatcatgcccggctaatttttttgtatttttagtagagacagggtttcaccgtgttagccaagatggtctccatctcctgacctcgtgatccacccgcctcggcctcccaaaatgctgggattacaggcgtgagccaccgtgcccggcctgttttttttttctttttaacccttgccttgcctgttacttttcttggagtaaatacatacatatttgtttttaaatttctgcctccgtaccattatgactcatttacaatggaggaaatgaaagcgcagggagttaagttactcgcccaagatttcacggcagtcaggtgggaaaccagatggacacaggtcatccaaccccacaacctttgctcttaaaatgttatcatatgtaggactcatacaaataccaaacacgaagtgcgtgggctgccctgaggggttcatatggaagaaacaaccagtcacagagcgtgaggaaggaaaaggtccatttgcggcagggtatcagcgtgcagaatgggggcaggacgcaggaggttggccctgatgaacagactggtaccactgaagccgagctctggaggggtcagactgcagagggcctggaacactatcctgaatagtcagatttcacgcacgctgggagccacggatgccaaaatggcaaggtgatttcagaggtgacttcaggaaaacgaagctgactgtggtgcatgagatgatgtggaacggggcaaaccgcccctccgtgctttgtcaaaggtgaccatggtgggaaccaagggcaaagtctggcgatgggagagttgactgaaaatgcggccacagcagggtcctctgggcttggagggctgagcgatggacaggaagggggagctggttccgggggaacagaccctaagtccaggtggagacatgtctggactgagaagactcatggccatccctgtcagaagatccaacgggcagccagacagcagagtctggaccacaggtgtggatctgggaggccggcaaccctgaaccagggaactggccagcggaagcgaggctgccacttcccaggtgccacctgtaccagatcagcctgtccggggcaatttcagcagggatggtggctcagatacaaaatctaccacctcacctacaacaataaggacactgtcttctactgcactttattttattgatttatttatttttggagacgaagtctcaatctgtcacccaggctggagtgcagtggtgggatctcagctcactgcaacctccgcctcccaggttcaagcaattctcctgtctcagcctcccaagtagctgggatcacaggcacccgccaccatgcccggctaatttttgtatttttagtagagatggggtttcaccatgttggccaggctggtctcgaactcctgacctcaagtgatccgcccacctcggcttcccaaagtgctgagatgacaagtgtgagccaccgcgcccggccagtcttctattgcactgggaggcagaggttgcagtgagctgagatcgcaccacagcactccagcctgggtgacagagtgagactgtctcaaagaaacaagatgaggataacgataccatgtcacagggtggttgtgaaaatgacattaaataacatgatgtaggttaaagaactgggcacagtatcagggcagaagggtccttgggaaagctcagctgaagccgagtgggtgttgtaggcaacgggaaagtagacaccttcagggtccaggtgaccccagctgatccaggagatatttaataccatcgggagcccctcagtcagggcctggctccaaggggaggaatcctggaaaccagcatctttcccacgggacaagccacctccttctcagggccccccattctttgattgatggagcagaggttggggagccaggacagctcagtggtcaagggcagaggctttggaatcacactcgggttccattcctgagattagcacttcgggaatgtgaccttagccatgtgaccttgggcaagctacttagccattcagagcctcagttttctcatctctaaaatgaggataaaaacaagatctatacctcatgaagcttttgcgaggttacaatgaggaaatatatgctatgcaaggcacccaaagctggcgctaacaaaacggcagctattatcattattcccctgctctccttcctgagtaccaagaacccttagggacctcccagcccttaaaaaacaaaccagggctttggcaatttgcagtgagttaagactacagcaagctttgtcagctaactctgctgttcatcagtcagcctccattcagcacaggctggtggactagttacgacttaaattcttttttttttttggagacagagtcttgctctgtctcccacgctagagtacaatggcacaatcttggctcactgcaacctccacctccccggttcaagcaattctcctgcctcagtctcctgagtagctgggattacaggtgcccgccaccacgcccggataattttgtatttttagtagaggtagggtttcaccatgttagccaggatggtctcaaactcctgacctcaggtgatccacctgcctcggcctcccaaagtgctgggattacaggtgtgagccactgcgcccggccagttcatgacttgaatcctaagataactgttccaatcttcactgcacactggaatccctggggagttgggaagctctctggctcctaccccagggattgctactgaattggtatggaatggcctgggcatcaggcctgttaaaagctccccaggtgactctaatgtataggaaggccaagagccgccaggttcagacagggacactgaagtgagcgtctttacaaccaaatggaactaagactcttgctgggcacagtggctcacgcctgtcatcccagcactttgggaggccgaggcaggcggatcacctgaagtcgagagttcgagaccagcctggccaacatagagaaaccccgtctctactaaaaatataaaaattagccgggtatggtgacagatgtctgtaatcccagctactcggggggctgaggcaggagaatcgcttgaacccgggaggcggatgttgcagtgagctgagatcacaccattgcactccagcctgggcgataagagcgaaactccatctcaaaaaaaaaaaaaaaatactctgaagcagcctatgaagccatcagccaggcgcgtgatcaattcagccagcacagggaaggctgcccggaagaggcagggcttgtcctcagtcttggggactgtgggattcgctggggaagagaagacaagacggacggaaagggctttgctctgattgtgaaccacagacaggcaggggtgggtgggggtcggcccctgtctcattcactcaggaccctcggcctggcctgtagcagccactgggagcacagacagcgccaccctcaccccgaggcctggagcccctcattagcccagcaaagcggcaactggaggccgggcagaggctgtggggcagctcactcctgggaggaagctcactcctgggggacagctcgctcctgggggacagctcattcctggggacagctcgctcctgggggacagctcattcctggggggcagctcgctcctggggggcagctcgctcctgggggacagctcattcctgggggacagctcgctcctggggggcagctcgctcctgggggacagctcattcctggggggcagctcgctcctgggggacagctcgctcctgggggacagctcgctcctggggggcagctcgctcctgggggacagctcattcctgggggacagctcgctcctgggggacagctcgctcctgggggacagctcgctcctgggggacagctcattcctgggggacagctcgctcctgggggacagctcgctcctggggggcagctcgctcctgggggacagctcattcctgggggacagctcgctcctggggggcagctcattcctggggggcagctcgctcctggggggcagctcgctcctgggggacagctcgctcctgggggacagctgctgttgcaggagttgtttgctccggctctgcctccactgctgggaacagactcgaggccccaccatgggcgggtgttatggcctctctggttgccatggagatgaaatccaatcatccacctccaagatccttggaagagggaggcagagaccgtagccgcctggagaagtggccgcctggagaagctcagggctccacagcctgagacaaaggaatcatagttcttggacatcaagggcagaggctgaggcccagggtgtcagggtggccagcagccctgggcagagaagcgcatgtggcttcaccagtctccagctcttggggatggatgggacatgctgagtattatctgcgcagtgttttacacggtgagcccacggccaggatctcatttcatccccacagcccagggaggttgtcaaagtagctatgaatggccccctttgacacgggggaaaactgaggcttctgagtctcatccaaggccacctggctgagaaacagctgagccacagattaaagctactctttgcaccaaggccattgtttcctgcgatttgacaaaatccccccaccttggcagagggaactaaaattcctcatctctctgtaggaaagacagttatgtgcccaccgaacatagaggaatcatattgcagacgggccgtataaccttgccatgatacgacgaaagctgacggcatgtgtacgcaagcaacagccactcaacaaacatctcctaagctatcacacaccagatgcaggggcgggcacagactccagcacccccagctccgttacgagtcgcccatggaaaggcaacgggattcaacgaggtgggcatggggccaggaggcagatctgggtcccgcgtccagacctaatctctaggtgccgccacttccttatctgtaaaatgggcaagacacagctgccctgcgcagttcacagggctgcccctgtggagtgacaagagataccagataaaaagagcatttcacaaacaataacgcgttcagtcaatcaggcaaaaaaaaaaaagggggcaggggccaggctcagtggctcatgcctgcaatcccagcactttgggaggctgaggtgggtggatcacctgaggtcaggagttcgagaccagcctggtcaacatggtgaagccccgtctctactaaaaatacaaaaattagggctgggtgcagtggcttctgcctgtaatcccagcactttgggaggccggggcgggcagatcacctgaggtcaggagtttgagaccaacatggtgaaaccctatctctgctaaaaatacaaaaattagctgggtgtgtggcgggcccctgtaattccagctactcgggaggctgtggcaggagaatcacttgaacccaggaggtggaggttgcagtaggccagatggtgccacggcactccagcctgggtgacagagtgagactctgtctcaaaaaaaataaataaataaaaataaaggaaaaaaagaaagaaaataaatcctctacaaagaaagcaagtctgagttcgtttgggttatcggtatattctgtcttccccgcgaggtggtggccctcttctgctcactgcctgttatttgtggcgcccaggacaggactcacgcagagccaatgctcagtaactgctggctgagtgatacgatctcctaataatcctcctcatctcttcccataacaaccaattcaattatttagggtctgggggccaggaagtccttctgacaaatcccataggagttctaacccttattagagttaacagcttcagcctacttcctgcttcccctccgaacctcctcaagaattgataacaagtaataatcctgggctgatttgatttaaggctctgctcttcctcctgtctttccctgtgggaaatgccactcagccccagagctgcagaaggcgggtggccaggaggcgatgacctgggaggacctttcaatccaacggtgctcaccacctgcctgggatggcctcctcggagcccccctcccatctatggctttgtaagtccttagggtatttatgaaaaattaaatgacaatctagtgctgagaagtaggaagaggcaattcagagaacagacaagtaatgccaggtccagagaggccagcaagactctcaaagcagccctgcagggtggcagcagccaggaccaggatgcacgacccctgccttccaccccagggtgcccttcaatcccagagccacgcagctccgggctcctgcccctgtccgcagaagtcgcccaaggcgtccacttgcaccccttcacacatacacctgcagaagcagccgcacctctgcccagtgctgctgggtggccacgttcactggccttcggctcaaaatgctggctctccacccagagccttcctgggccttaaacataattctactgttgaactgggctgtcacagagtgcctcaaaagtcacctccttctccccactcccagctccagagcaccggtgactgtgacttccacttccaatgtcttgtgtcattcaaggagggcaggtaagaggacgtgcccaggttagcctcttccttggacattcgacgtcaccattcctccagagtggtgcaaagctaggtgtgcgcggagctggggaagggcaaaagcccagccagcttgtctctgcttgtttctatccacgcaggcacatggagacacacacacacacacacacacacacacacacacacacacacacacatcacatccttgtggccccaccacctctggcccccacactccattcagcccccggcctctctgctgccataagcaccctcctaccagcaagcacagccatcacttggaggctgtggtcctgagctctggcttccccaaaggtgaaacggaatgataggattgttgtggggattccatgagatgacgtctgtaaacagctcagcacagtgcggggcacatgaagatgaccatgattctgccacttcccctagaagtcagttacacccaagtcccttcagtgcccagacacctgccaccatgccaccactgccacatgacaccactgccaccactgccacatgccaccactgccaccaggccaccactgccacacgacaccactgccaccatgccaccactgccactactgccaccattgccacacgacaccactgccaccactgccacatgacaccactgccaccaggccaccactgccaccatgccaccactgccaccaggccaccactgccacacgacaccactgccaccaggccaccactgccaccactgccaccattgccacatgacaccactgccgccactgccaccatgacaccactgccctggccacagagcaggctcaagggccttcatccttcacataagccacctgccactatgtggtcaacacgaccagtgcccagcaatatccccatcctcctgtctttctgggcacatggaaggccgtactgtctggccacttggcagtccctgggcagggccaggtgctcagtcctggctaacaaactgtaagtggacatgacaagtatcatttcacggctgaacagtgaaaaattacacacagctctttctccctttctcctccctctgtgacccttggaggccacatattccaaatggtgcagtctccatcaggctgggtcccggcatgaccacggggagcagagccccccgtctaccaggaccactgtgagcaagcagcagcttgcttgtgttaagtgatgaggatttcagcagtaatttgtggggggttttggttgttttttttttttttgacacagagtctcactctgtcgcccagcctggagtgcagtggcacaatctcggctcactgcaacctctgcctcctgagttcaagtgagtctcctgcctcagcctcctgagtagctgggattacagtcacccactaccacactcagctaatttttatatttttagtagagatgggatttcccaatgttggccaggctggtctcaaactcctgacctcaggtgacccacccgcctcagcctcccaaagtgccgggattagtgtgagctaccacgcccggccttcagcattaatttggttctacggcatgaccggctaccctaacaccctgctcccactcagcccttccatgtatgctcagaaggccaaccccagcctcacggaagctccacacacacttcccaacacagcacctgacagtcctttctcctaaccccacccacgccagcctcatggcaagctgcagccgcccttttcccattcaggagagaagcagaaacccagcaccctcttctggggaaagacgggaaagcaaggtggaatgtcttccagcaagtaagtaagtgccaggagcaccaacggcttagtgttgggtagaagctggcacctgagggccacgccttcccagccagcatgatggccccaggctggtcaatgacccacccactctccccaggctggtcaatgggcccaccccacggtaagcttcaaggatggcctgcttgctgctgatgagtgaagtaagcccaaaggttgtcggggaaatacctgcattcctaagagcattattgacacttgccaaaaaacagaaacacctcaagtgtctatgggtggatgaatggatacacaaaacgcggcctttacataaaacggatattattcggcttatattccgacacaggccaattctgacatcgatgaaccttgggggcattaggctacgtgaaagaagctggtcacagaaaggcaaataccacatgattccactcggatgaggtgcttagagcagttagattcatcaagtcagaaagtaggagggtggtggccaggagctgggggctggagaaacggggagctgttgttcaatacaggggtccccagcccccccgggcatggaccggcaccagtccgtggcctgttgggaaccaggatgcacagccggaggtgagtggtgggtgagcaagcgtcaccccctgaaccccacttcccatccgagcagcagcggcattaggttctcgtaggagcgtgagccctgtcgtgatctgcgcgtgcgagggatcgcagttccatcccgaaagcgctccccacccttccccggtccgtggaaaaagtgtcttccacgaagccggtccctggtgcgctggtttcacagatgcggagtctcagtttagccaggtgagagttccggagatgacggtgctgatggccgcaccagagtgtgaacgtgcctcgggccactgatgcgtacactggatggaaaattttaggcatgtgtattttgccatgattttcttttgttttttgtttttgtttttgttttttttgagacagagtctcactctgtcacccaggctggagtgcagtggcgcgatctcggctcactgcaagctccgcctcccgggttcacgccattctcctgcctcagcctcccgagtagctgggacgacaggcgcccgtcaccacgcccggctaaatttttttgtatttttagtagagacggggtttcaccgtgttagccgggatggtctcgatctcctgacctcgtggtccacccacctcggcctcccaaagtgctgggattacaggcgtgagctacctagcgcccggcctattttgccataatttaaaaaaatagaataaaatctaaatttaaaaaaaaagtagacaggaaaggagtaataccagggacagagacccccccatgggtatcgacaggaggccagggggctgaaccaggcctggagcccacccagcttctgaagaggggttgggagtcaccttctgaattacaaaggaagatcccacctccagaattcatttctggttttagtttttttttttttttttgagacagaatctcactctgtcacccaggctggagtgcggtggtgtgatctcagcaacttccacctcccgggttcaagagattctcctgtctcagcctcccgagtaggtgggattacaggcatgcaccaccacacccagctaatttttgtatttttagtagagatggggtttcaccatgttggccagctggtctcgaactcctgacctcaggtgatctacccaccttagcctctcaaagtgctggggttacaggcgtgagccactgtgcccggcccagagctcatttctgttttgccgccaactccctggcacaagacgagctcagctcggccataggtaggggttgccgggcacctgtcagctccaaatgccaggagccaggctctccgaattccactcccagttttagctgtgtgtcctggggcaagttgcttcatctctctgtgctttagtgtcctcatttgtcaaatgaagataataacataacaacatcatcccatgcagcttttgtgacagttgaatgagttagtccaggcgaagttctaagaacagggcctggcacgtggtataacgttagtggctgttattgtcgtcactgacgttgtcactgctgttgtccctgttgttatgatttctccccatagtcccggcctgggagagacaccgagaggaaggccagcttgcccggtgtcttctcaagggctgacacacttctcaaagcgctgagattacagacgtgagccaccgcgcccggcctgtgtcagaattttttttgttacccacctgacaaagctcttcatcttgctaaagataacagagcacttggccaagccagcgcgatgtctgcactcagatctcctctctcatcttttgcccacaatgggaaaggaggtaagaagtctgtgttccgggtgtgctgagcacttgctgtgtgctgggagttgcggtagacactgtcctgtatgattccactctgaagaggtgctcagagcagtcagattcgtccagacacaaagaggagggtggtggccaggagctgcaagcagcggcacacgtgtgggcaatacacaggttgcccaagcgccgagagaggcccaggaggacgggccccgggcatggcaagcgcactgccccctctcactcctccggcggccgccgtccactcccagtcctagatctgagctccttcctgggagtccagggcccttcacaagtttgggtgaacaatcccggtacacggtctgtggtaacatcctgcacggctctaaaccagaggcaacagggcaccccacccactgggaaccacgcgagcagggagggacgaagggaggagcatcacgcacacagacgccggactccctaggttctgcaaacccagccatcaacacacagaggcccacgagcccattcctgagcctccctcccttgctgagctactggtgcgcgtatgtgtgcatatatatacacatgtgcacacacacactcctgggggtgaggaggtcacgtatgcaacttgctgtcatctttctaaaaggtaagaatggaggcaggagaacatttgattcagagctcatgctctgcagccagactgactgggtctgaatcacaggctccaccccttaccagctgtgtgaccttgggcaagtcacataacctctctgtgcctctgttttaccttcaacatggagtaacagtagcacccaagttcacagggtttctgtgaggatgaaacgagtaaacatctaaagcacaccgaagagaggattagttcctattaccacacctcagaagctcagcaagtcagatctcatgactgccaggctctcacagaggccctggttcccctctggctctacgtcttatttccctggaccagttccctaaagccctgtctgctgagaactcatctgacaattcatcctaatccctagagggccccaagcaaaaatcccaagctcagttcctgcacccaggctaggcttggtcagtgtccagccctgccctccccaactgcttcctgggcgtgacaccctcaacgcccccacctctctcattctgccatttagaaaccacaaagggcctcggtcagccactccccacctcaaagccgcgttcttccctgcggagagattgtcatggtttttccagcaagggatggacaagtgtgtttcttcacaggacatcctgagaatgcctgattctggggatggctgacatcctacagagccctggacaggaagcccaaggatttaggttgaaccctttttgggcaggtcacttcaactctctggctgcccgatccggctcttctgcaaaacaggaacatcactgcctcctccccaagtgagggagaggatacaatagaaagacaggacatccatcccggctaacacgaggaaactccgtctctactaaaaatacaaaaaagttagccgggcgtggtgatgagcgcctgtagtcccagcactttgggaggccgaagcaggtggatcacgaggtcaggagatcgagaccatcctggctaacacggggaaaccccgcctctactaaaaatacaaaaaagttagccaggcgtggtggtgagcacctgtagtcccagcactttgggaggccaaagcaggtggatcacgaggtcaggagatcgagaccatcctggctaacacggggaaaccccgtctctactaaaaatacaaaaaagttagctaggtgtggtggcaggtgcctgtagtcccatctactcgggaggctgaggcaggagaatggcgtgaacctagagcttgcagtgagccgagatcgcgccactgcactccagcctgggctacagagcgagactctgtctcaaaaaaaaaaaaaagacaggacaggctgggctggtggctgatgcctgtaatcccagcactttgggaggctgaggtgggtggatcacctgaggtcaggagtttgagaccagcctggtcaacatggggaaaccccatctctactaaaaatacaaaaaattagccgggcgtggtggtgcgtgcctgtaatctcagctactcgggaggctgaagcagaagaatcacttgagtccaggaggtggaagttacagtgagccgagatcgcgccactgcactccagcctggagaacaagagtgaaactctgtctcaaaaaaaaaaaaagacaggacagtgtctactacaactcccggcacacaacaagtgctcagcacacctggaacacagactttttacctcctttcccgttgtaggcaaaagatgagagaggagatctgaacccaggcattgcactggcttggccaagcgctctgttatctttagcaagatgatgagctttgtcacgtggttaacaaaaaaaattctgacacaggccgggcgcggtgggtcatgcctgtaatcccagcactttgggaggccaaggtgggtggatcacatgaggtcaggagtttgagaccagcctggccaacacagtgaaacctgtctctactgacaatacaaaattagccaggcatggtggtgcacgcctgtagtcccagctacttgggctgaggcaggagaatcgcctgaaccaatgagccgagattgcaccattgcactccagcctgagcaacaagagtgaaactccgttaaaaaaaaaatttttgacacagcctgggcaggtttaatcagctgtgatccagagccgccctctgttctgggagatggggaccagtctggacccctttcttgccccatcatcaggtgcacttggtcaaatccccaccataccccttcccccacaactaggcagaaggaccaaggaaggccccctgacactacatgggcctggcgtggccccctgtgtccctcagtcataccccccagcctggccaatgcccagatggcttttgggacagtgcccatcatgccccccagcagatggcacacctgcgggagggctggggatccaggcacacctgcgggagggctgggggtccaggcacacctgcgggagggctagggatccaggcacacctgcgggagggctgggggtccaggcacacctacgggagggctgggggtccaggcacacctgcggggagggctggggacccaggcacacctgcgggagggctgggggtccaggcacacctgcgggagggctggggacccaggcacacctgcgggagggctgggggtccaggcacacctacgggagggctgggggtccaggcacacctgcggggagggctggggacccaggcacacctgcgggagggctgggggtccaggcacacctgcgggagggctggggacccaggcacacctgcgggagggctgggggtccaggcacacctgcgggagggctgggggtccaggcacacctacgggagggctgggggtccaggcacacctacgggagggctggggacccaggcacacctgcgggagggctgggggtccaggcacacctgcgggagggctgggggtccaggcacacctgcgggagggctgggggtccaggcacacctgcgggagggctgggggtccaggcacacctacgggagggctgggtccaggtctaccgaacctgtcagcctgtcacacgcatcacatggtgagaaaacctcgcccggcaaccatctcatccttctcactggtttgaagcctggtggtcaccatagcaacaggctcccgctccagcctgccaggcggggctgatgcaattctcggcagcgagcagctccaactcagctcacatggctctgctcccactcgggggcgggcgcgtgggaggaccaacgaagagggaggaggtgggcacgcagcccacagaaatctcagcttcccccagttctgctccgaggactgggtctaagggacgagggccaggaactgagcagcgggttcacctcccaggtccttcatgatcctggtgtccctgccgcggctgccacttctgggagattcatctctaaggcctcaggggacctgggggatcgggagacaggctgtaccatggcgtctccaccaccacacggtcccctccccgcctgcaccccacaagctgggcacccccacttcccggggcccacgggcagcccggaccttcagaattcaacaggtgcagcttacagttcccgtcccgtggtgctgcctgccctggttgcattaaagtgctcataaagcccagaatcctcctgcaaaccaaaatatctccatggtgccggccagccccttcctcccagctttccatcccactccacaagggtgtctggctgccctggggagtgttacctcctctgcacggaaggcacactagctgagagcccgttcaagcatccacatcccccaatttcatggaacgagcacacagaaaggatgggggtcacctcgtcctgcctgcccgcccaccccccacacactgcggacacagggaaggaagccacaggacaagagcttggcaatgccgtgtcctcagggctccggcgcctacccatggatgtagtgctcgccctcccaaggccggtgtcctggtgacgatgccactagtgccaagaatgcttccctcctgcaggccccgctcccttccccattccagcagccacttcccaccctgcatttgttccctcctacctggccctcaccaaggcatccacccaatcctggcggggcctcagcacaaacagggcctgctctgggaccgtgcctcctgccaggacgctgtgccaggaggagggatctgcagatcccttcccgggcgccctgggggccagccagtcacactgggccctctctgtggtcgcctcgatgcctgtgggaagtgattagctctgaggccacttgagagatggtgttcagctctgggatgtcccagcaatgtgtactatgggagcctccaggatgactggagcagatgggcaaagaaggtaaactgtcaggctgggggcatctttccagacacacagatccacggagtcacgttgagtgagtccagaaaggaacccacatatctatggtcgacggattgtcaacaagggcaccaagacccttcatggggaaagaagaatcttttcaccaaatggtgctgggacaaccagattgccacatgtaaaagttgaacttttactttctaccatattcaaaaaataactctaaatggatcaaagacctaaatgtaacagctaaagctaaacaacatgtagaagaaaacctgggggtagatcttcatggtcttggacttggcaaaggattcttacatacgacaccagaagcacaagcaacagagagcacgggggaaccacacgtcatcaatgaacacttctttgcttcaaaggaccccatcaagaaagtgaaaagacaatgtgcagaggggaagaaaacatatctagactatattttaaaaatcttacaactcaacgataaaaagacatctaggccggccgcagtggctcacacctgcaatcccagcactttgggaggccgaggcgggcagatcacaaggtcaggagtttgagaccagcctaaccaacatagtaaaaccctgtctctactaaaactacaaaaattagccaggcatggtggcaggtgcctgtaatcccagctactcgggaggctgaggcaggaaaatccaggaggcggaggttgcagtgagccgagattgcgccattgcactccagcctgggcaaaagagcgaaattccgtctcaaaaaaaaaaaaaaaaaaaaaggatagggtggcaggtaggtgggtgaccagatcctgctggccatcgagggacaggagaggtgctcaccgtggagcacagtgtcctggtacccaggtggccccaggttcaactccaacactgtgatcctcaatgggggtgctgtggggacccaaattcagacacccatgcccaccagcctacaccagagggcagacgggtatctaaggggcacatgctgtggggaagagcctaggcctccggctgcagggggctcatgaggagccattctgaggactgagcctttgttgagagggaacctggggccaggtggctgctcccttcacatgggcgacagtgtccagtgagaaaataaacctcttttcatgtgaagaaaaaaaaaaggcctctcctgagttcctggctgggtagccgggtagacggcagagctaaatgctgtggtggctcacgcctgcaatgccagcacttcgggaggccgaggtggaaggatcacctgacgccaggagttcaagaccagcctggccaacgtggtgaaaactcgtctctactaaaaatacaaaaattagccagacgtggtggcgcacacctacaatcccagctacttgggaggttgaggcaggagaatcacctgaacccgggaggcggaggttgcagtgagtggagatcgtgccactgcactccagcctgggtgacagagagagactctgtctcaaaaagaaaaaaaaaaagctttatgtgcattatcttatgtaatcctcttaaccattacttggtgaatagtgagttccactactatccccatttcatagaggagtaaactgaggcacagggagatggactaacttgctcatagtcacgtagttacttaatggtgaggctgggatctgaatacaggcagcctgagaagtggctcttccgtccacctccaacctccttttagccgagggttttgagctcatttcaacacagccactgtgtccagggataccagcaaagaattagatcaatgtcaggctctgacgcacaggcaggctcagtaataacaacagtccacacacacatacgataagttaactcaccgcagcctcacaccgcgccaggaggcaggcactaatattatctcaattttacggatgaggaaaccgaagctcagataggtcagatgactggcccaaggtcacacagctgctgagtggcaaagcttggaacccgggcagtctggtctcagacactaccctctcttgctactaagtcagtcgtgctacagcgcacattactttttttttttttttttttgagatgaagtctcactctgtcgcccaggctggagtgcaaaggtgcaaccttagctcactgcaacctccacctcccgggttcaagtaattctcctgcctcagcctcccaaatagctgggattacaggtgtgcgccaccacgccgggctaatttttatatttttaatagagacagggtctcaccatgttggccaggctggtctcgaactcctgacctcatgtgatctgcctgcctcggcctcccaaagtgctgggattacaggcgtgagccaccgcgcccgacctcagtgcacacagttctaacatgcctagggggctggtccctcaggccacaggccatgagaagcagcaactacaagggaagagccgctgctggaacacgcccagcggaacagggggaagccaacaatcccggcagatgaaggaaaggaaccggcaggcacaccgctctcacgccaatgcgtgcggacagcctggtgggatcagcaggaccatgacctgagcctgcctgccaggcacagaacctcaggcgcacccaggcagacccacgatggggtgcactcagccccgtatcattcatgctgcaggtcagcctaggaagggatcgtgcagtttggtaggtcaccttctagaatggattgaaaaggattatctcgcctaataagggcaggtattactttatgaggctcatttcaagcgtgcatgggtatatgtgtgtgtgcagatgtacgtatgtgtgtcgcgttgcagcatgaaatgattttccactatggattctcttccaacaggtggaaggagcgtgaccacccctgagtaagccgccatttattcctgcaatggaattccaggcagctttgacggtgcacagtttagagctacaggcaggagcgaagatgaacctaaaaacataaatttaaccagaaaagggcagctcacaggaacatgcttacaatgtaattcttcttctttttattctttttttaaatttgtatttatttattttttttaaagtagagatggagtttcgccatgttgcccaggctggtctcaaactcctggactcaggcaatccagccgcctcggcctcccagactgctgggattacaggcgtgaaccaccgcgcccagccgtctcgttagtctttagtaaaccaaacccagacattgtatgtgctgttttgcatattgctacatttcacatataacacagaaaatggctgggtgcggtggctcacacctgtaatcccagcactttgggaggccgagacaggcagatcgcctgaggtcaggagttcaagaccagcttggccaacatgatgaaaccttgtctgtactaaaaatacaaaaattagccaggcgtgatggtgggcacctgtagtcccagctactcgggaggctgaggtaggagaattgcttgaacctgggagttggaagttgcaatgagccaagaccgtgccactgcactccagcctgggtgacagagcaagactctgtcttaaaaaaaaaaaaggaatcaaaagtgcgtagggctagtccaacccttacatttcacagctgaggacacagagggctggcatgggagtggcggaggtagaataaaaacccagatctcctgcctcccagtgcagccaaagccaccgttgtaaccacagcctaggattacccagagaaggctgaagcctgttcagactacagggagcctgtttgggactcacagtcctctggcgatgagcagagactcttcatgctttcgtgccttggacccacagcagcctggtgaagccaagggacctttctctgaagaatgttttgaaatgcgtaaaactaaactatgcaggatgacaaaggaaaccaactatattaaactactgtcttagtcatggaactctcaggagtccaagagaagtaggaatgcagtactcatacacaagagaagaatgcggtactcacatacaggagaagtaagaatgcggtactcacacacgggagaagtaggaatgcggtactcacacacgggagaggtaagaatgcggtactcacacacaagggaagtaagaatgcagtactcacgcacaagggaagtatgcggtactcacacacaggagaagtaagaatgcggtactcacacacgggagaagtaggaatgcggtactcacacacgggagaggtaagaatgcggtactcacacacaagggaagtaagaatgcagtactcacgcacaagggaagtatgcggtactcacacacaggagaagtaggaatgcggtactcacacacgggagaagtaggaatgcggtactcacacacgggagaagtaagaatgcggtactcacacacatgagaagtaagaatgcggtactcacgcacaagggaagtatgcggtactcacacacaggagaagtaagaatgcggtactcacacacaggagaagcaggaatgcggtactcacgcacaagggaagtatgcggtactcacacacaggagaagtaggaacgcagtactcacacacaggaagcactcagtaaaagccagtgacacttacgaccattaatcttcagaatcccttccacgtccttggtcgtgggtccacgatgctgaggagggaggcccagggacctgtgcctttgagtcagacctgtgggagcccctccagggcctgatctcggcgagggatgagggatgctggccctgaactgcaggcctcacacgtgacgctgccgccgcttggggaggtgccttctggagggaacaggtcccttggggctgagaggagagggacccacagcaggccctgcctggagacagggaggtagggcgcaggaggaaacacttacaccaataggagcagagccctggggtctagggccgctgtacctctcctctctggtacaaggttcaagaattgcttgaacccaggaggtggaggctgcagtgagctgagattacaccactgcactccagcctaggcgacagagcaagactctgtctcaaaaacaaaaaacaataacaaaaaaaaaccacacacacacacacacacacacacaaaaggactaacacagcctcttatgggccaggcactcacacattatttaagcaaagttcatgaaatgtcagctctgcaactgtacagtcagtaggaattacaccccaaattcagatgaggaaacaggctcaaagatgtaacagcttcatgcaaccagcattgacacctacgtctctctgactctaaggagaactgaatcccagtgaatgtccgttcattcatttttcattcattcattcactcaccaaacacttctcatggttcaggcactgttccaggtgccaggggtacgacggagcagcaaacagaccaaatgtctgccctgtggagctgagttcacacgacagccagacgccgagcgcgtacgaggctctggggagggaggcggcgcagatgactcagccagggccacccccgaggagctcacattcaggttaatggaggtgttgccattctctgttgaagaagtgggggaggacagacgtggcgcatctgagaacctattctaccgtgaattattaacacttttcacagaggccacgctccacaaagggaacttcagcgatacggaaatctcccaaggtgggacgcccgtgcggtggaggcaacgtcactccatcgagccttgctctctggccccgccacctgtacgagtgctgcagacggtgccttctgagggaagcgggcaggtgtcgctggaccgccctgcctgctaaatatctatgtggattcccgttccaaggacaccatcccttctcagggatacaaggctggggtgtctgagtctcatctccttcccagcacctatcctgggaaggttttgtcggaaatccccgtcacccacaagtccagtcttttttttttttctgagtctcatctccttcccagcacctatcctgggaaggttttgttggaaatccccgtcacccacaagtccagtcttttttttttttaagacaaggtctcattcctttgcccaggccagagtgcagaatgtgatcacagctcactgtaagctcaaactcctgggctcacatgatcctcccacctcagcctcccaagtagcttagactctaggggcattccaccacacctggctaattttttaaaattttttttgtagagacagggtcttgatatgttgcccggactggtcttgaactcttagtctcgagcaatcctcccatctctgcctcccaaagtgctaggataacaggtgtgagccaccgtgcccggtcaaagtcactatttttttttttttttttgagatgaggtctcactctgtagcccaggctggagtgcactggcatgatcttggctcattgcaatctccgcctccagggttcaaacaattctcctgcctcaacttctctagtagctaggattacaggcgtgtaccaccacacccagctaatttttgtatttttagtagagacagggtttcaccatgttggccaggctggtctcaaactcctgacctcaggtgatccacccgcctcgacctcccacagtgctgggatgacaggtgtgagccacagcgcccggccagaagtcactccttttacagccgggccgaaggcacctgttaggtcctctcccacccgctacaccactagctaatggtaatcatagcacccattcccctgggagccccaaaccagcccgggagatgcatttcactgcggaggctcattaagtgactctcccagtgctgcacggactttacatggggacgctgggttcgaatccaggctctgcaatgttgcaatttctctttcctttgccgacacatcctccagaggttagagactcccagcagaactgaggatgtgaaaagactcagttcgtggtgaggacccagtgagtgtttatcaacagcaacaattatcccttactctggcagagaacagcgccgtgaacacacgtcgccagcatccagcttctcagctgatttttacaacagccccaggacatacgtgggacaggcgtttatcaccctcactttgcagacaggagagactcggcaagaacagctgcacctagacacagcctggtttcctggcgtgggcccctccggatcccctctccctgcttctccatcctctcttccaccccagcaggagatgagaggaagacaagggcatgaggctgggatgtggtacccccagctccccactgtgggccacccgggctgtgcacgctcctgcccagaagccctcaccacatggcctctgcctccaggtctaggacacagaccctgccctcaccctgcccacatttccgtcatagctctccccgcactcctcagcctgagtgtggcatctgcttcctgacgggccctaatggatgtggctcacacctctcatcccagcactttgaaaggctaggccaagcacagtggctcacacctgtcatcccagcactttgaaaggctaggccaagcaccccggctcacacctgtcatcccagcactttgaaaggctaggccaagcacagtggctcacacctgtcatcccagcactttgggaggctgaggcaggtggatcacgaggtcaggagtttgaggccagcctggccaacatggtgaaaccccgtctctaataaaaatacaaaaattagctgggcttggtgctgggtgcctgtagtcccagctactcaggaggctgaggcaaaagaatcccttgaacccagaaggtggaggttgcagtgagccgagatcctgccattgcactccagcctgggcgacagagcgagactcaatctcaaaaaaaagaacatgaacattaatcttttgctccattaatttgtgcctctctgttctctcctgtaaactggagatgataagtatcttcttcatagactttgtgaagaataagggagttaatacagacaaagtgcctgcaacagtgtaggacacacagcaagcgctaggctaacgttagctattatcactggccactctgcatcaatcgcatcgtgattttttgtgtcgactctgtatcgaccctgtaaaagcaaaatctcaatgtttctgtgacaattccatagaaacttttcttcagcttggcctctaggagccagggggtggcacaaaagagagaagcaagtcacaagatgagcaagacgcatccaggtgggaccctggcgaagtgtcacacacagcactgaatccagacgcaggggccccagataaactgcaagacgcccagtgaacatggatgtcggagcatccaggtgggaccctggcaaagtgtcacacacagcactgaatccagacgcagggaccccagataaactgcaagacgcccagtgaacatggatgtcggagcatccaggtgggaccctggcaaagtgtcacacacagcactgaatccagacgcagggaccccagataaactgcaagacgcccagtgaacatggatgtcggagcatctaggtgggaccctggcaaagtgtcacacacagcactgaatccagacgcaggggccccagataaactgcaagacgcccagtgaacatggatgtcggagcatctaggtgggaccctggcaaagtgtcacacacagcactgaatccagacgcagggaccccagataaactgcaagacgcccagtgaacatggatgtcggagcatctaggtgggaccctggcgaagtgtcacacacagcactgaatccagacgcaggggccccagataaactgcaagacgcccagtgaacatggatgtcggagcatctaggtgggaccctggcaaagtgtcacacacagcactgaatccagacgcagggaccccagataaactgcaagacgcccagtgaacatggatgtcggagcatccaggtgggaccctggcaaagtgtcacacacagcactgaatccagacgcaggggccccagataaactgcaagacgcccagtgaacatggatgtcggaggatctaggtaggacggaccctggcaaagtgtcacacacagcactgaatccagacgcagggaccccagataaactgcaagacgcccagtgaacatggatgtcggagcatctaggtgggaccctggcaaagtgtcacacacagcactgaatccagacgcagggaccccagataaactgcaagacgcccagtgaacatggatgtcggagcatctaggtgggaccctggcaaagtgtcacacacagcactgaatccagactcagggaccccagataaactgcaagactcccagtgaacatgaacgtcaggtgagcaacagacaagctttcggtctacagataaaatgcaagacgcccagtgaacatgaacgtcgggtgagcaacagactagctttcagtctactatgtcctaagttttgtatgggatatacttacttttctttttttgagacagggtctcactctgttgcccaggctggagtgcagaggcatgatctcagctcactgaagcctcgacttccccagctcaagccatcctcccacctcagcctccgtaggagctgggactacaggtgtctgccaccactcccagctaattttttgtatttttattacagacaagttctctctatgttgcccaggctggtctcgagctcctggcctcaagtgatcctcctggcctcccaatatgcccagccatatgggatatacttatatttaaaaattattcattgttcatctaaaattctaatttaacggggcatccttatttttatttgctgaaaaactcagcagtgctttcagtgtggttggtaagattgttcccattctaaaggtgagaaaaacacagctcactagagcataaataacttgctggaggtcataggctaagcaggtgttcaaagaccaagctcccggcctgcagaggtgcctccacccagccgagcaacaggcctggggccacagaaccgggccctggagcgccttcccacaatccaaaaatgcccctcagtccctggaggggagcctgtgacccggaggagccattttctcccgggcagagggagctcctcacaagccagtgctgggggaagacctcctgcgggtggatggccgggaggaggtgcaagagagggctgcagtcagccagggtggcacccacagcccttccgggagccacccctgcctggcgctgggacctggagacaaaatgtccaggaggaaactcaggaagctccagaggaaacccctcaggaagtcctgaaatagttccacagcccagagtgaaaactttctttttttcttttttctgagacgaagttgtgctcttgttgcccaggctggagtgcaatggtgtgatctcagctcactgcaacctccgcctcccgggttcaagtgattctcctgcctcagcctcccgagtagctgggattacaggcatccaccaccacgcccagctaatttttgtatattttagtagagacggggtttcaccatgttaggcaagctggtctcgaactcatgacctcaggtgatcctcctgcctcagcctcccaaagtactgggattacaggcgtgggccaccatgtccagccccaaaacgaaaattttcaagtgagagcagccttgagggtgccatggtctctctgagtccagggcgtagacccccagtgcctggcagcttggcccggctcacagggccccctccccagagcccacgcagatgacctcagctcccaccccccggagtgtccgcacccaccctccccagcgcggtccccacctccgctctcccagagcccacgcagatggcctcagcccccgcccccggagtgtccgcacccaccctccccagcgtggtcccacctctgctctcccagagcccaaggtggagtttcacttcggtcattctcagctctatttttactcaaaggtggtaggaacaccacacgttcaaagcaggacaggcaagtcgtctgactccacgcggctgcaaggctgagcttttctgtgagcagggacgggggcaggctgcggccccatgcagggcttctctccagggccaagagtctaggtccagtgcccagtccccggtcctgatactcaagcaggtgacattcagcgtcctcttcacctggctgagaaagaccaacagcatccccaagcagaggaacagcacgtgcaaaaggcaccacactatgaatgggcgagtgttgtatcctgggaaaccgggagaggctcagtgtggccggaggcccgggggtgtggcagtggggccaggaggggaggctgcggctggagatgggttggacccagtctctgagaaggctcccacgttgtgctaaggagtttagagtttatcctgcaggaaggagggagctacgaaggcttggagggcagatgctgcaggcgcctggtccttcccatccagtgtgggcagcgcgggcctcacctgggacttgctagaaatgcagaatccaggccgggcgcaggggctcacgcctgtaatcccagcactttgggaggccgaggcgggcggatcacctgaggtcaggagtttgagaccagcctggccaacatggtgtaaccctgtctctactaaaaatacagaaacattagctgggcatggtggcacgcgcctgtagtcccagctacttgggaggctgaggcaggagaatcgcttgaactgggaggcagaggctgcagtgagagctgagatcgcgccactgcactccagcctgggtgacagagccagactctgtctcaaaaacaacaaacaagcaaacaaaggaaatgcagaatctgagctccggacctgccaaatcaaaatgtgcatgtccatcatggcacgggggctgggggaccccgtgataccccagtgatttatcttctcggggtgaggcaaagccttgagctctggctgggcggagagagaggccaccagttggatgtctccagtatccccttctgatggcccttctgccctcctaacacccagctccacctcctgcttggatcctccctgctccaggactctccggggcatccccagtgctggatccagacacccagagccctagagcacttcgtctcttcatagccacccccaactccaaccaatcacaaagcagcatcttcatagccacccctgactccaaccaatcacaaagcagcatttcccagggttccacctgctcggtgcctagctgggtgttgcggggaagggagaaccaccatggtgaaaggctggtcccccgagcggagggagtaagccgaggagcttttcagacatgcagaggcctgggccccaacctgaggtctcatgccccaggccctggcattgggcgcttctggcaaagaacacaggctgaggcgtcaagacagatgtgttgtgtgacctctgggaagtcttggggaagcatgaaacaggataaaaatggctaagaactcagcaggttgccggaggctaaatgagatactgttagcaaagcagagaggacaatgtctggcatcctatcacggaagcctttgttattctccctcgtgcctctaaggagttgagagtctggcagagaagaaatgacaactggcatgaaacactgtgcaggtaaacactataaaacaacacgatatcggccgggcgggtcgctcacgcctgtaatcccagcactttgggaggccgaggcggacagatcacttgaggtcaggagttcaaagcagcctggccaacatggtgaaaccccgtctctactaaaaatacaaaaattagccgggcgtggtggcgcacgcctgtaatcccagcactttgggaggccgaggtgggcagataacctgaggtcgggagttcgagaccagcctgaccaatatagagaaatcccgtctctactaaaaatacaaaattagccgggcatggtggcgcacacctgtaatcccagctactcgggaggctgaggcaggagaatcactggaacccgggaggtggaagttgcagtgagcactgcagaggttgtggagattgcaccattgcactccagcctgggcgacaagagcgagactctgtctcaaaaaaaaagataagaaagtgctaagcgatgtgagccggagcaatcagcattagggactctgagccagggatctcactaaggccagtgctcgaatcaggcctggaggacttcctggagatggtggtagctgagctgaggcttgaagctggttagatccttggagcacagagctttgcaggatggtgagaggccttactggctagagaatgggcagtgtgctgggaaactggaatggataacaagaggttcccccagtctggactgaatgtggtgggaaaggcaatgccccactgaacccactgaaggtttctgggcaaaggagagaaaatggtctagcacagccacaggcagttggaaagggaacagtgtccttcactcagggaggggcttgaggacagacacggcaggcacccacaacaagggcctggctgtgctggcagctgaccagctgcagcaaggtcctccggctagaagcagcagctctcctgacagccaatgtgcgttccatcctttcttcccagggagcaggagaccgaatcagctcctgcctttggtttctgaagattctacacccaaagatggcacttggtgccccagctcatccaggcctcccaagggggaacgtgggtcaggagctgccacggggtctgcaagacgcttgctggcctcgaccaagtcaaggtggctgttccacgcggctgggtggacgccagctggtctctcatgaccctccccgtgacgcactcgcaaagtaactaccaaggctttctgctccattaacaccaaagctggccctgcaggggaaagaggagggagggaggacgtgggttttgtctagacagaggcactcacaaagccagatgatgcctgagcttccgccacgcaggaagagggtgagcagaggagggcagagaagacctggtgcgtccccctcagggtgccccccatggcagaagtcaccagcagaggccaagaacaatggccaatcccccttcttatccttaaaatcagggtaacaacctttcataggtttactgtgaagatgaaatgagatcacgaatgtgagaacgctcgctctactcttgcacccgtgaggtgtccaatcaattgctttgttacttttattcctattgggaaatgggctcaaaagatctgtgtcaggggttacctttcatctggccagaatccagagctacagaagggtctggcttgatttgaagtcccagccaaagggggctccgctaaggtgtaagccccccagacacaggccttccccaggggctgacctctccgtgggggactctctgggctcgagggccgtcgtgggtgtgagcctgggtctggagggtctgccccgtcattaacatgctgcgcgcgggagagttcaaacacagcagctggctctgcagcccagcaggccctgggcctcggcaaaggacctcgatgctcagtggcctgatttatggctgagggctctctttattttccttttgaaatgtggaggtggattttaaaaggctggagagcagggccagcacgcttgggctctgccaaatccccgcgtcctcgcccctggcctcgctctagaaactgggcactggccctgctccatcccaaccgccaaagtctattctcactctccctttctctgtgtttgtgtttgtatgggggggtgtgtttgtgtttgtgtttgtgtgtgtgtgtgtggggggggggtgtgtttgtgtatgttaacaatcagcacttcttgccaataattccaggaacacagcaatgcaggcacgtgggctccaagtgcccatgaggagacctccttaggctcatgcccctaggaagaggcagcccagttggtggatgctcccagtgcttccaggatgcctggggcagagggctgtctcctcatatcacgggggcttgggggcaagacgcagtcttcacaactgtctttctagctagagaaatgaacccagatccatcaacctcagtgaaataccagcgtcaaggagcccccaccagcaccgctgtgaagggtaagagtgcgggagaaagaacacagtttacagcagggccaaccgagcgcacagtccctggcttgtagtctgcgaccttgaattaattaatttagtttgtttatgtatttatttatttattttgagatggagtctcattctgtcgcccaggctggagtgcaacagcgtgatctcaggtcactacaacctccgcctcccggattcaagcaattctcctacctcagcctcccgagtagctgggattctaggtgcctgccaccatgcctggctaatttttgtattttagtagaaacggggtttcatcatgttggtcaggctggtctccaactcctgacctcaggtgatccacccacctcggcctcccaaagtgctgggattacaggcgtgagccaccgtgcctggcctgtctcttccattctttctaaaccaaattaaaaactagtttctatgaatccatcaggactgatggactttcttttcacgggaccccaggatcctgggagacccaaggatgaggtttctatctatgtccctctacagaacccagacacagttcccaaagaggctcccgtgggcgccattgcacagaacaactgcagggggcactcttgcatagcacacactgccacgctgaccccacaactcccagaggggtctctctcctaaaacttcaccttcaatagcacacactgccacgccgactctacaactcccagagggatctttctcctaaaactttgcctccaagggagagactccctcaaaaagatgacgtatgggctgtttaggcccgaggtaacgcgaacggggtaaccacaagtgacgaagtcaattgcggctgtgaggagtagatgttcccagccagagaaataactggcttaattacacggcgtctttggtccccgtaatctcgatccattaaacctttgctgctgaccaggagccgctgcccaggaggaaggggttagcccagaacactcacagaagcagcccttcaatcccacgaaggtaatgatggccacatccttccccaacagccccgagtaagcccacagatccctgctcaataccaggcttctctaggcagcaccagctccaccgatgccccggggagtccagcagccaagctgcccggagtgacaaggactctgagcttccttggctctggtttacctgaggcctcccagccacccaagacttcctggagaccctgctagccttaggcaagatgcccaatcacgtgtgccatgtccacctgtgacctagaggcacaccaaggcatcagaggtgagggcagggacaagaaggaggtgagtgaggccaggcacggtggctcacgcctgtaatcccagcactttgggaggccgaggtgggcggatcacctgaggtcaggagttcgagaccagcctgatcaacatggagaaatcccttctctactaaaaatacaaaattagccgggcgtggtggcagcacctgtaatcccagctactcgggaggctgaggcaggagaactgcttgaacccgggaggcggaggttgcagtgagccgagatcgcaccactgcactccagcctgggcaacgagagtgaaaatctgtctcaaaaaaatgaagaaagaggggagtggcacccgattaatcaatcaggtcaccacagagccgaccacatctggctctatctactgaagcccaggctgactctgacattttccatacagccagtaaacccagattcatctttcggtctagtgtgtgtggggaggaaggaagggcaggaggaggacacaggataaagcctggacaaaaaactgggcgagaggccccagtcaggtctcgacccggggacagagaacccgctgctccatccacaagtggccacggcctcagatggtcccgcctcaaagggctctttgccaaatgcccaggcaggggtgggattgggcattatcttcagcctccatacgggggtgccttccgtagcctgcctattggcctgatttctttctccttcccccttcacaaggtctctgggtcaggttctcctcaagcttcagggaccagtggaacattcccgctgctcccagcagcgtcatgtccccaactgaccatatcttgccctaagaaatgcaagctactcctgggccgggcacggtggctcacacctgtcatcccagcactttgggaggccgagatgggtggatcacgaggtcacgagatcgagaccatcctggccaacatggtgaaaccccgtctctactaaaaatacaaaaattagctgggtgtggtggcacatgcctgtaatcccagctactcaggaggctgaggcaggagaatcgcttgaacccaggaggtggaggttgcagtggagccgagattgccccactgcactccagcctgggtgacagagcaagactccatctcaaaaaaaaaagaaaagaaaagcaagctactccccacagcagcaatggactttctcacatgtggggacaagccaaggtcacatgtcacaaacagcctcccctatcacagccccagagatgggtgagctgcagaactctccccctggtacaaacagtcacttggagaaaagtgccaagaatatagaacagagcaggtaatccaccccccccatcacctcagcccacccaacacatcacctcagtccacccaacacatcacctcagtccacccaacacatcacctcagcccacccaacacatcacctcagtccacccaacacatcacctcagtccaccccccccatcatctcagcccacccaacacatcacctcagtccaccccccacacatcacctcagtccaccccccacacatcacctcagtccacccaacacatcacctcagtcaacgcaacacatcacctcagtccactcaacacatcacctcagcccacccaacacatcacctcagcccacccaacacatcacctcagcccacccaacacatcacctcagtccaccccccccatcacctcagcccacccaacacatcacctcagtccactcaacacatcacctcagcccaccccccacacatcaccaacacccgccaccaccaagggcctggcaggggcagtgggcgcagggttgtcttgaagccgcctgccctaggtttgcgcccaaagggctcaagctcagccaaacagctgccgccaacgctggcagtgaagtcctccaatcataaaccctggcaaaagcgcgagactccctttgggggtctctgactccactacgagcgagtacaatgaccaaatccacacagccggaaacgcatggacgggccagctgacaggtttcagctaacaggggtttctgctgcggggaggagctcaaggagccaagaactcgagttttctttttcccacccgtactcagacaaccaacacctatggagggcctgtgcgggagccgctgtgggaggcgctgcctcagagctggtctgataccctgttcctgccggtcctcctgccacattccctgccccttcctaagtcctgtgccggcctctcccagtccctcgaggctttcccggatgaggagcgcaatgagctggacagctgagctgctcaatagctctcctcaccttcaaagcactttataaatatgaattaatccacacaacacccacgagagccatcatgccctccctctacgaaggaaggtaccggaattgtcccagaaagcagatcatacctcagacagagaacaagtcttccatcctactcgcaagagtgaggcagagcctccccgccattccccatcttccatcctcctaacagcatcttccagccaattccccacaaatttccttccttttcccgaagaacaacagtagccaacaatcacaaccacagaaacctaagtttctctgagtagatgacttaattcttctgccagccccacctctgagactccagcagccatgaagattatgggccggtgttgacaaaaaggaataaattactgggctattccgaaaacaagcaagcatctgccagcaggcgctcactagcacacacggaggggtctgatgcggccccgagaactgaactgctctgatcaaacgcacacaggctgtcagaccagtggcttggtccctggtgtagagaatgtggggctcagatgagaaactgaggtaggctcatgctcacctggagacaggcttacatctccactgctccaaatactttcctggcccatagatggggcactgaatctataaagggcatgaaaatatcacaagagaatgaaatcgcccttggaaatgttgcttggggtaagagaagtgagctccaaaaagcaggctctagtaacaacagatggtcacgttctgccttccatgacggccaagccactgcaggctcttgcttggctcagcagggaaggtatgtttgacaccaggactaaattacttgggaccaaatggaggccgaagtggcaaagggagaggctttaaatacagcctctgcctctcctctaagtaagtcctaaacacacatataaagattttccagttgaagaggtgccagatgatcaacctgcctggggcacacgtatgtcttgatccagatctgcttggagaatcccagggaccaagaaagtgtcagagcacacctccacccccattttgggctactccgctcccatttaatccaatctaatcccatgggattgggaaaataaaaataaaaaaataaaataaaaaaataacaaagagaagatgatacgtgtttagcagaaagggtgattaaagacctagaggcattatgaccaagaaaacatggccgggcgcaggggctcacgcctgtcatcccagcactttgggaagccgaggcgggtggatcacctgaggtcaggagttggaggccagcctggccaacatggtgaaaccccgtctctactaaaaatataaaaattagccgggtgtggtggcgggcacctgtaatcccagctactcaggaggctgaggcaggagaatcgcttgaaccggggaggcggaggttgcagtgagccgagatcgcaccgccgcactccagcctgggcgagagagcgagactctgtctcaaaaaaaagagagcctcagagagagcatcatagcaaccccagggagagaaaggtaaggtactgaggggtgaaactgacattgctacattaatacaggcaaatgagtggcgcagacacaagaactgggggatgtctgaaaccatctgtcactccacagggaaaggactctgctcccatcagccccagggcccctggcagctgggatccaactcttctccttgaggcagacaaatcacacttaccgcagcccttcaggacttctaccataggagagatggagggtttgctgcccaaccctcatcaaatgaccaccaaacctgtgatggaagtgggcacactcctcctgtcaaaaccagaaagaatgaactgccaaccccaaaggcaggaagtgtgttcagggccgggcgcggtggctcacgcctgtaatcccagcactttgggaggccgaggcgggtggatcacgaggtcaggagatcgagaccatcctggccaacacggtgaaaccccgtctctactaaaaacacaaaaaattagccgggcgtggtggcgggcgcctgcagtcccagctactcgggaggctgaggcaggagaatggcgtgaacctgggaggtggagcttgcagcgagctgagatagtgccactgcactccagctccagcctgggtgaaagagcgagactccgtgtcaaaaaaaaaaaagaagtgtgtgaggggaggggctggctggcaggctggcaccttaggagcagagagccaccagcctcagtgggttcagacagcctcagctgtccctgcctgggctccaggcccagcccccaggtcctgcaagaggcacagggccaggttggggtcagagccattgaagccatttaccctgctggaccgtttcagggagaactctgcaacagaggaccatagagaatggcgtcccccattccgtgacatcccaagaccttgaataaactcagacatacccaggtggtactcgggatcctcctcattattctagggtacaacctgaattccagctcagccatttgttacttatgtgatcttaggtctatgatttatgctaactgagcctcactttcctactctgtaagagttgcagagttgtgagatttggagagaatggatagaaagtgcctagcacaggccgggcgcagtggctcacgccagtaatcccagcactttgggaggccaaggtgggaagatcacctgaggtcaggagttcgagaccagcctgaccaatatggtgaaaccccatctctactaaaaatacaaaacttagctgggttgtggtggcaggcgcccataatcccagctactcaggaggctgaggcaggggaactgcttgaatccaggaggtggaggttgcagtgagccaagatcgcaccactgcactccagcctgggcaaagacggagaccccgtctcaaaacaaaacaaaaaacaaaaaacaaaaaaaaaaaagaaaaaagaaagaaagagaaagtgactatcccagtgcctgccatacagtaggtgctcaggagacgctattatcattgttaccaggaacaatgctcagagagaggaaggcagggaacctctaacaccgagtcattcccatctctaagtcacactgccaccctgtgccctgggtataccccctttacagttcccgatggatctggcatttgtggagatttgtcaccccaggactgtgagccttgtaagcaaacagcttcctgagaagcagaggaacttcctctgggagccacaaaaccttgctgccaggcaaatgacagctcgggtatttgttttaatttaggctcttgtcaagaggaaagttgatggctaacagcccaaacatgactgcacagcacctccccgggaagcctcctgctacagctctccactaagctgttccgaagagggaggcagggactcctcacactgcggccacatcagtgccccctcccacccaccatccaggccaccccaggagccgcccagaggccagggcagcagcaggagggtagacagctcaggtgccaatctgcctgaatcagggctgcccaacagaaccccctaagaggccttggcctaattcccttttctggcattcctctggtcaggaattttcaaggtggcctcaggcaattttgcttttttgctccaggcgtgggaggaagagggtggggtatggaagacttggaaatgatcagctcagaggagtcttctgctgcagagaaagctagagacagggttccatacgattccaggcttcgggaaatagggaaacaagaactgggttttgcaaagagccagaaacactcaggaacataagcacgcgtgaatctgaggcattgttatgacggctgtttgcaagcacacagctaagagagggccactaatcctgcctccgggtcaggagctgatctgcatctgcgctccgaacagatgtgtgcccccattcatgcagacgcacgtgcacgcacatgccacacagccatgggccctgaccttcacccaacgacgctggcctctgcaggggaaggagcagatggagcggcggcacctggcacaggacctatgcccaggggatccggctttgcccctttgatgttgagaaaccaaagcagaatgaaccatcacaaggacagctcctggggggaggagaggaaggaacatggatggaggaggaggcgggtggagaagaagatacagggaatgacctggacccaaggggatgctgaggtcagaggttgaatgttgggtaccacacagcctccagagtaaggctttggggctcaaggcatcacccttctctactccccccaccccccccatatgacttatcaaggaactctagctgggatgacccttacaaatgcccttgttggctcacgcctgtaatcccagcactttgggaggctgaggcaggtggatcacctgaggtcaggagtttgagaccagcctggcctcatggtgaaaccccatctctactaaaaatacaaaaaattagccgagagtggtggtgggtacctgtaatcccagctactcaggaggctgaggcgggagaatcacttgaacccgggaggcagaggttgcaatgagcggagattgcgccactgcactccagcctgggcgacagagccgagactccgtctcaaaaaaaaaaaaaaagaaagaaaacgctcctgttccatggcatccagtgcctagaatcaggctgaaccaggctccacgtggccccacgtgcctcccccaactcctgcctgggagatgtgctgagagagtgggagggtcccactcacgtgggccaggaagggcgaaatccactatgtaagcccaggaggaccctcttcctaatccctgagagctttcgggaaaggtgtctcagggaagggtggggagaaggggcggtgcctttctagcaacggagcaggagcaaggtgcggtggtgggggcggggggcggctctcggttcgccccaagcccccccacaccattacccgtgatcagttacgcatcccccggggccatgcaagagcaatcacatgatccagagagatttgggagcgagggggtggagaactcgagaaggtttgttttttttttcttctgagggtggtggtgatgatgagggtgggggtggtgatgaggctggcaggaaagattgctgagcccgggattttcagctcccgcatccaaacggcccccgcggatatctgcaccccccgtctcccctcccacccgatcccaccccagcaccgaacccctgggccctgaaccacacatgacccggtgcccctggggtggcaaactcgggtgccaacgactgctcccaaaacggcctttcggcttcagcctggacagagaagctgccggtccaggggcgggggcagcacccagaagggcctccctcccctgaggctcgcggaggccgggttcacaacaggtgggaggggggacgcagctctcggctcggtccgcccacggtccccgcccccggaccgcaggaatcctctctggggaccccccgcccgcgccccccagaccagcccggctcctgggtcccgaccccgatcccgattcccaacccgaccccgatccggaccccgatctcgcccccgcccgcgctccccggaccagcccggtgcctgggtcccgatcccgatcttggggtcccgatcccgatcctggggtcccgatctccatcctggggtcccgatcccgatcctggggtcccgcccccgcccggcacacgtactgctgtagagggtgtcgatccaggacaggcgcggcaggccccggtggctgagcggctccatcccgcggcggcggctcggtcagatccgaaacccgaccctcatcgcgcaacaaaggagggagagcgggcgggagccgggggaggccgaagttgcgagcgcggaggggcgaggaggccgggaaccaggtccccgggaggagcgcggggcggccggggcaggggcgagggcggggcgggagcccccaaaaccctcccgaaccctcccggccccagcggccgcgccgagcccagctgcggatcccggaaccgatgagcaacttcgcggggggcggggcgggggtggggcttcgtggtggggcggggctttggtgcgggggcggggctttggtgcgggggcggggcggggagggaccaatcggctcgaggctccgccctccgcaggacgcccccggccgggctaagggggcagcggggctccggcgctgggcgaggaggggccgcgggggtctcggggggtctccaggcggcggcgcagacccaggtccccctcgtcccccccgcgccgggctcagcaggatcctggcgatccgcaaaccaggtgccgtggggggcccgggagcccacaggggtgacatcacctcccgcccgggatctccaagcgcggcttcgcgggcgggagcggcggccgggcccctccccagccagacccgctgcgggacccacggggtgaacgtcctgcgcgccgcgggacgcgcctctctcctcccgaaccttcccccgctcgtccctttccacacccctgacctctgagcgcggccgttcccgccacacatggaggggggcgggtggagacccgggaggaccgaagtcacgggggctgtggggccaggacagtcccacatgtgcccctcctgggcggaggacaaactggagccaggagaagccccaagggctccacgcgttcccctccaggacccctcctggggaccccgagccgcggcctggaaagcccatcgtgtttgcatcatcacctagaaatggtgggaagtcgggtcaagaggcctgagaaatgaccgtttagagacgaaattccctctaaggaagaccccctcgcccaagggcagtgaagagattgggggccccatgcctgtctcctgtgggctgattctgtgggagccatggcagcttccccacagacctctttgggccaagcgaccctggagcagggaaggacaggaggggagtcaggccaggggggtccagggcagtggggctgaagccccttcctgaacccagggaaagggaagcagtggggcccacccagggggcccggtaccccagatagtgacatttcagataccggagctgtctccaccccaccccatccccaggcagcttaaggggaaaacttctgggagcccagccctacagaggcctaccaggaaggttaagtcagcctggcctttgccgggggcagtgtggtcggcacccgcagaacgctggaggggtgtgggggtcggtcctcatcactccaaacagacacacacacatctagttcttaaggggagaagcagctcctcccccaggatgctgagaggaagccccataagctgcttgggcagaggcctctgcagctgccccaggggagatgggggtcacccactcatcacaggctggggagcccctgggagacgcacaggatgatgctctgggtggggaagcctctacaggtggctgcagcagaagtggttttcaatattattagcccgtccctgcgtccccagggctccctccgccccaatcctcctggctcaggcaccagcgctgtctcttgccgcccctccctgcagctgtcaccctcccaccgtccctgactagcacacaggattgggagggccaagcaggcacctggagcttggcagggagggggcgtgcatctccaatgagacgctccagaaatagagcttcggcatgggaagggaacgagcaggctctcggaggaccgcgaggccggaggagccatgaggggccaagggcatctcttcttcccacctggaactctcggaagacagcccaggggaaaggtggaaacgggcgtgagctgccgccaccaggagccaccagcccaggaggcagcagcaccgtcccctcctcaaaacaacaacaagcaagaacgctcgggccctctccccacactgtggggttttcctgatggccacatccggcgctgactgtgagggagctatggatgtatgcttctgcgtgagtcacatacatttgcgtacattttacatttttatctacaaaggcttgaacaagctattttcagcatcctccaagctaaaatgtggcagttgctttccttcgcgttgccatagtttgcttttttctgtctacattctgtccaatcctggcactctcggaccctccactccacaacacgatagagggtagagggagagacaaatcttgagggctctacagaggaaacttctgataacgaacacagaacaccgactgtgtgcccggcttagcgtttcgttcactagcgtgatctcaccgtgaatgtcactgttatctctgttttctccattttccaggtcagaaaaccgaggccctgagcagctgagtaacccactcagagggtaagtgagggctgggacttgaaccctggcactctgttcatgctctttttctgtttgtttgtttgtttgtttttgagacagagtctcgctctgtcgcccaggctggagtgcagtggcacaatctcggctcactgcaagctccgcctcccgggttcacgccattctcttgcctcagcctcccgagtagctgggactacaggcacgtgccaccacgcctggctaatttttgtatttttagtagagacggggtttcaccttgttagccaggatgatcttgatctcctgacctcgtgatccgcccgcctcggcctcccaaagtgctgggattacaggcgtgagccaccgcgcccggcctgttcatgctcttaaacaccacgcatactgcctccacggccagctaactggtgatcaccgggtgctgaaggtcctgagaaatctctgcgggtccatggggttagagaccaccctctgggaaaccctgtcaaccctcttccatctccagacgtctgtctcagacaacgtgtctcaggaaagggcagtcacttcgagattcccttgatgcctttgttggatggcttccagtagatgttaacaccacggccagatgctaaccttggccacagagacaagtgtgtgagcctttgagcaccacagtgatttgggtgggaacagaaacctccgcatccctggcactgaggagttggggagatccaacgtcacgcgctgggaaggaaggagttaaagagtccttctcctccgggctttgccaaaggtgatgctaccctgaagtgctctaaccccagcgatcaaccccaatctgtcagaggagcggggagctgtggcagacagaccttcctgattcagctaaatgtggaccgggtggggaccagccagtgctccccaaggcactgaacccccatctatcacgctgcctcctccaggccccttctaagcattccccagacagtccctggggccagtgctctccaccctcccagccctccctccagcctgtgcactcagactgtctgcggctctccaaccccagggtgacctgcctgctcctgcctcatcactggacttaaaggggatttcatggttgggtgcaccgccaggagcactgggttaatgacgaggggctgagtgggaagaaggtacatcccattttcaaggctatttgccctgctcctaattcccaagcacgtgctactcacggcctctccaacgaccaactcttgcttctaccaatcaaggtagaagccttggttcttggccaggacagaaaaaaggggacgggccctagaaccaaaactgggtatctccacatttcctcccttctcatgttagcagctcagctccactgcacacgacaggaaggccccaggagtctctgcttccttgatcacccagaggtcaccgctgatgacaaaaatatgttcccatgcgggggccaggcagggagccccggtgcgtgcagaggctgaatacacagtgggtgggagggagtggggccctctacattcaaatgaaaaaccaaaaccaaaaatagactgtgatgaccaaaaaaccgagagtttgcaccctcactggcccatcaggtccttaaaagctgggactggccaggcgcggtggctcatgcctgtaatcccagcactttgggaggccgagatgggcagatagcctgagtctgggagttcgagaccatcctggccagcatggtgaaaccccgtctctactaaaaacacaaaaattagccaggcgtggtgcatgtgcctgtaatcccagcagtgagccgagatcctgtcactgcactccagcctgggcaacagagtgagactccctctcaaaaaaaaaaaagccagagccgggcacagttgctcacgcctgtaatcccagtactctgggaggccgaggtgggtggatcacgaagtcaggagatcgagacgatcctggctaacacggggaaaccccgtccctactaaatatacaaaacattagctgggcatggtggcgggcgcctgtagtcccagctactcgggaggctgaggcgagagaatggtgtgaacctgggaggtggagcttgcagtgagctgagatcacgccactgcactccagcctggggacagagcaagactccgtctcaaaaataaaaaataaaaaaaccaggactgcatcttcctcactgggcagacccagtgctcagcgcagtgggtgaacaaggctcaggtagactcccagcacagctatgaccacatggtgcctccagatcagctttctgccgagcgcccagcagatcggcattcaataatgcacattgaacaaataaaattaatgacagctaacagttattgagtgcttttttttttttgagacagagtcttgctctgtcacccagtctggagtgcagtgggcattctcacagctcactgcagccttgaactcctgggttcaagctgatcctcctgcctcaccctcccaaagtgctgggattatagatgtgagccaccgtgcctggtctactgagtgcttcttaagtgtcaggcactgctctatctgctttacgtaggttatttcacgtaatccttacaataagccaatttactattatctccatttcacagaagaagaaattgaggtgcagagaggctaagccattggctaactagcagatggcgatgcttggaaatgaaccaagtctgaatccagggttcccgtgtgtaatctctgcattgagcggcaattagtgaatgaatgaataaacagaatgaagttaaactcagggaggaagaaatcggagctacacgagggaggcaggcagcgttatttcagaaccctcccagggccactgatgataaagtagaaagagaactggtatcccaagaaaaccatatctactacagcaggccagatgaccctggagacaagctgaacaaagtccagtgacaatctcccaaatgccagtcccggccaaaccccacttcttcaatgcctccggccaatctcaagagtttccagcctcagtgttcacatctgtagacagtatgcgcccagggccaggcacagtggctcacgcctgtaatcccagcactttgggaggccgaggccagcgggtcacctgaggtcaggagttcgagaccagcctggccaacatggtgaaaccccgtctctactaaaaatacaaaaattagctgggcgtggtggcgggcacctgtaatcccagctactcgggagactgaggcaggagaatcgcttgaacctgggaggtggaggttgcagtgagccgagatcgtgccactgcactccagcctgggtgacagagtgagactccgtctcagaaagaaataaaaaaaaaaaaaaaaaaaaaaaaaagaaggtatgtgcccaggtggatcaagaagacgacctccaggcctcctatgagcactagcagaatacaaactctcctgtcagatcctggggtggcctgttttccgtgctttgctctattcccatttccttggtacagtaaagcagcatttactattcttttttttctttcttttgagatggagtttcactcttattgcctggctggagtgcagtggcaggatctcggctcactgcaacctctgcctcctgggttcaagcgattctcctgcctcagcctcccgagtagctaggattacaggagcccgccaccacacctggccaattttttgtatttttagtagaaatggggtttcgccatgttggccaggctggtctcgaactcccaacctcaggtgatccgcccgcctccacctcccaaagtgctgggattacaggcgtgagccaccatgtgcggccagcatttactattctaagattcatcctcagccctccagtctggggaaagaagaaaattccccaggcctccacagtgtcacctgtaagggtgaagtctcagcctatgagtctgtcttttgccctcttctcacctgccctctgctcagcctcccggcttttccagcagccagtgagatctacaggcaacagaggtgaactggaagcccttcccagttagtcatttctgcaccaaacttttgtgtcagcttgagtcatgggaagacctgctgccctggcaagatgtggacctgctccccggggagctgcattcaccccctcactgcctccctaggcatcactgcaggataaagcacagtgacatcaggtccttgcagctgtgacactccccacacgcccccacacacttcccaggggccgagttgaagccccgttcccatggccaggggccacagcaagggcagcatcctgggcagagccgctggcttagattatgcactccccgagccaccgttttaggagggtctctcgccaagccccagctcacgtggccctcacctgacatggctcagatgacaccacccacaggtcaacagcagagttttcccaaagggtccgtccgagggctcgacagcagggcctggagccccctactcatttacttaccaccaagtccccatcagcattcagaaagacgccagcagaagagtccaatggattctctaagtctccaaaacccagagattcagttcagtggctccaatctccttagccccaagggaaacaagagcacgtccagctggggtcagagctcacgggctggccctctgccctcctgtggtcacgacggccccgaagctggccgtgctcctcgctcgttcagccagaattctgcagacgcatcccaggcctacgctgctctgccaggacctctgacaccacccaccaggctggccctgtccccatcaggcccaggagtggctgcaggagccgagggcaggctgtcaaggagacgggctccgagaggcagcggctcaccattcagcaaggcgagggcaaaggaacctcagagcctagccaggggcgcctgccatcagtggagcctctgctctggggctgccggtcgggccgtgtgtgctgtgtctctttaaggaccaggcctcttcaaggcaagttccctctgcagtccagtcctgcctctgcccgtcctgcggcagagagtgggggctccccagcgccatctggcggccgcacagcagcacctcggccaccagaggcttccagccaagcggcccgcaagtgcctggacaaaaatctccagcttggacacagggctgcaggctgctgttgggaacacagctgggggagtcaggaggagctccgtctgggaaggagagagcagaagcccccaggagtgacatggggagaatgatcatcccgccggacaaaaccttcactaaaatatcctcaaatgggccgggtgtggcagctcacacctgtaatcccagcactttgggaggccagtgtgggcggatcagctgaggtcaggagttcgagaccagcctggccaatatggtgtaaccccatctctactttaaaaaaatacaaaaagtagccgggcatggtggtgggtgcctgtaatcccagctactcgggaggctgaggcaggagaatcacttgaacctgggtggcggaggttgcagtgagccgagatcatgccaccgcactccaatctgggtgcgacagagtgaggctccctctcaaaataaataaataaataaataaaatattatcaaattgggccgggcacagaggctcacacctgtaatcccagcactttgggaggccaaggcaggcggatcacttgaggtcaggagttccagaccagcctggctcatgtggtgaaaccctgtctctattaaaaacacaaaattagccggacatggtggcgggcatctgtagtcccagctactcaagaggctgaagccggaaaatcacttgagatcgaggctgcagtgaactgagatcgtaccactaacaccccagcctgggagacagagcgagaccctgtctcaaaaaaacaaataagtaaataaaaataacaatgtgtgggagcatttaaagaggtcacaataggccagctgcagtggcttatgcctgtaatcccagcactttgggaggccgaggcgggcagatcactaggtcaggaatttgagaccatcctggctaacacggtgaaactccgtctctactaaaaatacaaaaaatcatctgggcatggtggcgggcgcctgtagtcccagctactcaggaggctgaggcaggagaatcgcttgaacctgggaggcggagcttgcagtgaaccaagatcgcaccactgtactccagcctgggtgacagagggagactccgtctcaaaaaaaaaaaaaaagaggtcacaataactaggggtcgctactagccttcagtaggcagaagccagaaatcttaaaatgtcctacaggacttgccctacagaacatctgttgtaagtgccaagagcgttgagaactctacctggttggggaaaacaggatggcggatggcgagttcccatctcacccccagctggtcctctttccccatcacactgctttggatgtccttcctactaaatttcgccttcataaacgtaggggtggatggaggg

SEQ ID NO: 4 - DNA, 74054 bp, Homo sapiens
  source 1..74054: mol_type = genomic DNA
ctgcacttatttaattcatctgtttcctccatgatactgctggtgccattaaaacagagacgctgtctgattcagcacacaaggaaggctccagcagatatgagcataagttttttttttgtttttttttttgaaatggactttatctcttgtcgcccaggctggagtgcagtgccacaatcttggctcaccgcaacctccacctcccgggttcaagcgattctcctgcctcagcctccccagtagctgggattacaggcacctgtcaccacgcccagctaatttttgtatttttagtacagacagggtttcaccatgttggccaggctggtcttgaactctcaacctcaggtgacccgcccgcctcggcctcccaaagtgtgaggattacaggcgtgagccaccgcgcccggccaagtatttcttgaatgaatgttagttaattatctgaggaccaaggaacagagccagagctgcattccccactaaggagcttcctcacttgtgttaatggtgtaaaaagctcagactcaagtccagctcactgagttagaatcccagtttcacccattacagataaccttgggcaaatcaattaatcactaagcttcagtttcccaatgtgtaagaggtacatgtcacatccatctgcctcttagggctgttgcaaagataattaaagaatacaatacacaaaaggtgcttagtacagtgctgggatataggaagtgtccaaattttagttatgactatggttagggggcacttcaatggatatcgttccaaaagggaacaatttaattaacccagggaccgtccagcgttgctggggacccagtccctgcctttacgaagcccatagggaagcaagtgagacaaacacaccactcgactatctcgagagggagacgcgccaggtataaactaaatgccctcagacggcacagggagggaggttcggggcagggcttccctgagataacaaacgggaaggcctctcaaaggcggatgggaaagagagggatcccgattacctctccgtgtcttcctgggcaacagccctcgccgcgggcttttcccgggccagtgctttgggaagggaagccctccgggcccagacccggctacagggaatgcggcgaggccgcgggactcacccgcggcgctgaagccgaagccggcggggacaggcgagtgttccgcgagctccaatcggataacaaccagtgacacactcatagggcaggcgctggccggcgcgggccccggcgggctcaggcgaggctggaaggcgagccgagaggccgagcggcccggggccggcagcgccgccaccacctcaatgcagttgccgccgcctcagcagcagcagctcctcgaacagccctcggagccacaacaacctccacttccgcctcccggccgccgtcgctgacctgcggtttacgcatgcgcgcaggaccgcgcacagcgattgggcggcgtggcaggggtcacccactgctcttccggacgcaattttgaggaggtcggagcggaaggacgtcgtggagattgcttgcgctggggtgccacacttaggctgagctgcaggttttcgcacagtcgcgagttaacctctgcttgctccagaggcctcgtcctaatccacctcggctgacggcgcgggatccctggctccgcgaggtctccgaattgtccgagctatctgctatgcagaactttgccccttttgttgtgtttgactcctgtctctaaccctagtctggatggttttgtttctgtcccactttacagataggtacaacgaggctcagagaggtgaagttccttctaaggggccgtagagagtggagagtcgatcgctgttcagatagcgatctggctgggcgcggtggctcacgcctgtaatcccagcccagaggcttaggcgggcgaatcacctcaggtcagcagttcgagaccaacctggccaacatggtgaaacctcgtctctactgaacatacaaaaaattagccgggcttggtggcgcgcgtctgtagtccaagctacttgggaggctgagacaggagaatcgcttgaacccgggaggcggaggttgcagtgagtcgagatagtgctagtgcactcccgcctgggcaacaagagcgaaactccgtctcaaaaaaaagagagaaaagatggtgatctgctggttacgagcatagtgctgcagttagaccggggtcctcctccccaccctgtcacttcacaaatgtttactgagagtctagacacccttgggatgcttgagatacgttggcgtataagataaacacagttcctgtccgtactatgaggttgacctacatcagcagttgtgcagtcttgaactagtatagtcattgcataaagttggcatgatatcatgtcctcatgcagttgtgaggatgaaatggaattatgtatatggagataacattagcttttctgaggctcagcattctttccagtatgtcagagtggcttttgtatgtagatactgacacaatcaatgcatatgggacacatacatgacaggatgctactctaggtacattgtataatgatacatatgtaagtacatagtacattctagatgtgtgtgtgtgtggacatagtgcgttctagatgtgtgtgtatctggactatgacatgaccacaagatacatgcgtatatagatcttgtgactacatcctatgaaatacgtttccatatgccctgtttaaatcagggtttctcaactctgcactattaacattttgggtcctgattattcttttttgtttttggcaagggggcggggtgtcctgagcattgtagagtgtttagaaacatccctggcctgacccactagatgtcagtagcacctctccccaggtggtgacaaccaataatgtctctggacctttccagatgtctccttggggttagaaaacataaccctgttgaagaatcacagggttatgtgaaagtgcataaaccatacacacatactgtatgcataaaacctatgagacctcttgtgaacttttttagtatattactatagtagataacatttcaacatgtgccaggtactaatttgagtgtttcatataccttgtgtcatgcaatggtcacaacaactttatgaaactggtactatgtccctgttctacagaggagtaacctgaggcttggaggaagagtaactggctcaggatttcacaggtagtagtggcagagctggaactgaaattcaggcaatctgaatccagaacgaacattctttatctctttaccaaacaaacctttttttttttttgtattttgagacggagtctcactctgtcgcccaggctggagtgcagtggtgccatctcggctcactgcaacctcggcttcctgggttcaagcttcctgcctcagtctcccaagtagctgggactacaggcacacagcactgcacccagctgatttttgtatttttttttagagatagggtttcaccatgttggtcagacttgtctcgaactcctgaccttgtgatccgcccacttcggcctcccaaagtgctgggatgacaggcgtgagccaccgcgcccggcccccccaaaggcatttttcgtctctactaagccctcacacaaaatatacaagtgtgtaagtaaatttctctttctatcataaacattggccttggcataggaacgttaagtaaaactgaaaatgcaaatgaaccttgacatttttagtttcaaatattgcccccaaattcagcaaatttccaattactgtcgttgcatggtggtatcctcagcagatgggtgcaggaccccctgcagatgccaaaatctgtggatgctcaagttcctgatatacaatggtgtagcatttgtttataacctatgtacaccctcctatatgctttaacccatttcccatttagaaaaaaaaagtacttgacttggtgtggtggctcacgcctgcaatcccagcactttgggaggccgaggccggtggatcacttgaggtcaggagttcgagaccagcctggccaacatggttaacacccgtctccactataaaaatacaaaaaattagctggatgtggtggcgagcgcctgtagtctcagctactcgggaggctgaggcaagagaatagcttgaacctgggaggcggttgcagtgagccgagatcacaccattgcactccagcctgggcgacagagcaagactccgtctcaaaacaaaacaaaaaaaagaaagcaaaaaaagtgcagctcgctgccagcacagtattctcagggcaagcaagatatgagttaagtaatccctagattgcttataatactggctgggcacgatggctcacgcctgtaatcccagcacttagggaggccaaggtgggtggataatgaggtcaagagatcgagaccattctggccaacatggtgaaatcctgtctccagtaaaaacacaaaaattagccaggcgtggtggcacgcacctgtaatcccagctactcgggaggctgaggcaggagaatcgcttgaacccaggaggtggaggttgcagtgagctctgatcatgccaccgcattccagcctggtgacagagggagactccatatcaaaaaatatatatatttaatatatatatcaaatcatatccatatcaaaatatataaatatatatacatgcatatatatgtatgtatacctaaaacagtgtaagtactgtgtaaataaatagttgttaacctgtattttttgtttgcattttttattgttgtgttgttatttttgttggtttttgtttgtttttgagatggagtctcactctataaccccggctggaatgtggagtgcagtggtgcaatcttggttcactgcaacctccacttccctggttcaagtgattctcatgtcccagcctcccgagtatctgggattacaggtgtgcgccaccacgcctggctaattttttttctgtgtttttagtagagacggggcttcacaatgttgaccaggttggtctcgaactctcgacctcaggtgatccgcctacattagcatcccaaagttctgggattacaggcgtcagttactgtgcccttactgtgtgtgtttgttttgttttgttttacttcaaatattttcttctttttttttttttgagatggagtctcactctgttgcccaggctggagtccagtggcaccatctcggctcactgcaagctccgcctccccagttcacaccattctcctgcctcagcctcttgagtagctgggactacaggtgcccaccaccacgcccggctaattttttgtatttttagtagagatggggtttcaccgtgttagccaggatggtctcaatctcctgactttgtgatccgcccgcctcggcctcccagagtgctgggattacaggcgtgagccactgcacccggccttacttcgaatattttctattgtagttggctgaatctgcagatgtggaactcacaaatacagagggctgactatagatgagaaacacattatattcaagatttaccacttaagagtcctttctctaggtgcttatagaggttgagtatcccttgtcccaaatgtttggaaccagaagtagttcagattttggattttgatatatctgcgtatatataatgagatatcttggggttgggacccaaggctaaacatgaaattcacttatatatatatgtttcatatatatcttatacacctagcctgatggtaattttatacaatattttaaataattttgtgcatgaaacaaagtttgtgttaagtacttacgtgtggaatttttcattgtggcatcgtgtgggggctcaaaaagttttggattttggatcatttcaggtatcggatatttggattagggatgctcaacctctacagttttttagtcctagctgggcgccgtgactcacacctgtaattccagcactttgggaggctgaggtaggtgaatcacctgaggtcaggagtttgataccaacctgaccaacatggcgaaaccccatctctactaaaaatacaaaaattagccaggtatggtggtgcgtacctgtagtacctgctactcgggaggctgaggcaggagaatcacttgaacctgggaggcagaggtagcagtgagccaaattcgtgccactacactccagcctgggcaacagagtgagactctcaaaaaaaaaaaaaaaaaaagagtttctgattttggagcatttcagatgtcagatatttggattggggatgctcaaagtatatagttttggagtccttttggccccactgaatgactcctgtaaactcagatgctgtcttaccaacctgttttgcactctcctgatttttagtaagctttttaactgtagaaatcacataaaaagcttaaagattttcatgaagaaaatagaatttgccttcattattttggtttttttccccatctttttatttcaagcttatagaaaagtcaaaagaagttacagtgatctcccgttatacctttcatctagactcactattaatgtctggccatgtttggttttctctatacacgagtgtatataggtatgcatctgtatacgtgtacatgtatgtatgtgtgttgtgtgtgtctttttttttcctgaaccttttgaaagtaagtttgaggaacagttaccaggctgctgcagtgatctgtaagtggaaatgatggtgttttgtggtgtgagggtgtcatcgtaagtgctaggaggaggcgagtacaggacatcttaggtgcatacaggagagactcctaatgagtcttttctggtatccccaagaggcttcatgaagacagtgactggtaaactgcaacccaaaggactgtttggaattagccaggcaacaggtggaacagagcattgcagaggagaacatgcgtttgaggaaactgcatgtagatgtgtatgtccagatcatcccaggttgagatgaaaaaatggggagctgctgcagaaaggaatgagatttttttttttttttttttgagatggactctggctttctcacccaggctggagtgcagtggcacaatcttggctcactgcaacctctgcctcccaagttcaagcaattctcctacctcagcctcccaagtagctggattacaggcacccaacaccatgcccaggttatttttgtgtttttgagtagagatggggtttcgccatgttggccaggctggtttcccaactcctgacctcaggtgttctgcccatctcagcctccctaagtgttgagattacaggcgtgtgccactgcgcctgacgggagtagatcttttaagccaggcttaggaattgagattttattttaagggcaatggggagccattgaaggtgttgtttgtttgttttttgagatggagttttgctcttgttgcccaggctggagtgcaatggcacgatcttggctcactgcaacctctgcctcccgggttcaagcgattctcctgcctcagcctcctgagtagctgggattacaggcatgcgccaccatgcccggctaattttgtatttttagtagaggtggggtttctccatgttggtcaggctggtctcgaactcgcaacctcaggtgatccacccgccttggcctcccatagtggtgggattacaggagtgagccaccacacctggcccagatttacaatttttaaagaatactctgactggagggtgaagaaagaattggagagaggtctgagaagaggcaagggggccagttaggatccatgggcaagatggtggcagtgagaatgcaaagaggtagatgagattttcaggagaaagacttgacagcacagaactagatagggcgaggtgaggtagagattgcagaaagtcagaggcgagtcccagctttctagcttgggcagccgagtgggcgatggagcccttgactaagtagccagggagggaggagacactgaggtcagttgtgggtgtgattcgaagtgcctgttggagatgggttagagatgtctggctggcccctctgagctccaggatggaggcctggttgggaggcagtgcaggcaagtaacgccctgtgccttcttcccacacagcctcagcctcaccatgtgtgtcaggagctgtttccagtccccccgtctccagtgggtgtggagaacagccttcctgaaacacacccagcgcaggcaccaggggtcccaccgatggacacaccttggaggcagcacctacagagcggtgattttcgacatgggcggagttctcattccttctccagggagagtcgctgcaggtgagctattgattctgtttcactttgtgggactagagtggtggtgggagaatggagggtgatcgggaaggcagaggggaacacttgggcagcagtgtgtcccagcaggccatgctctggctctcgagtcgaattccaagcaccactagggggctgagtgtcttgggcgcatgattcagcttctccaaatcttactttcctcatcattaaatgagctaatggtagtgccttcctccttgggatttggcggagagttatccgtgggaagcacttgcttagcacagtgattgctcagtgcatcctaaattctcaatcaatgatgagctgccatgaatgctgtgattagaatttaaccaccaaggcagggcacagtggctgaagcctgtaatcccagcacttttggaggccgaggtgagagggtcgtttgagcccaggagttcaagaccagcctgagcaacatagtgagaccccgtatctgcagaaatttaaaaattatctgggcatgatgacaggcacctgtagttctagctactcaggaggctgaggtcggaggatcacatgaatccaggtggttgaggctgtagtcagccgtgatcatgccactgcactccagcctgggtaacagagcaagacccttactcaaaaacaaacaaccaaaaatcccaaagaatttaaccacttcttcttgggaactgttctacttctgaaatctagaatgctgaaattccccttttgattacagccttcctcccttctaccccactccctctaaacctgcttctggactgacagggtaagggtcagccctctggtctctggtcttctctttaccagccccttcctggttttacttcttttctactcagttcagtttttattagttaaagtcgttttggcttcaagcagtagaaaacctaacaaaacagtgactgaaacaagctagaagtttctttctcttgcacataaaagcccaggtatgtggtctggggcactgtgtgatgcgactctgtggtatcagggactccgactctttatagcatgttgctctgctgtgacttttcatttccactcttacattgtggtctgtcttggctgtgtcgcctcctgctatcatattctcatgccagccagcaggaaggacaaagggccaggcagccatccctctccttttgaccttctgtggtggctggttggccagttctccatcctaaatcaacccaggcacaggttttctatgcctgcgtgtctaggctttccagcactgctgaccaaattactcagccgtgctaactggctgcacaagctggtttctgagctccagcctcagttgggccattggtgctacgcctgagcctctctgttccttcactcttatctctctgttccttcactcgtatctctgtcatgtttacctcaggggctgttccagactgtccactccccctgctccttaccacccccaaatattcttgctctgcagatagctgaatctgttcttctacaaagaacataaagactaaacctgagcaacacagtgagaccctatggtgagctaggattgcaccactgcaccccagactggcacaacagtcttttttagagaacctgtctctaaaaaaaaaggcagcagggaagaacataaagatcactggacagaaagtttcttgactttctctagaatatcttaagaaccaattcacttctctccattgccactgcctccacccttgccttctctcacccaaatgatgtcatcagcctcctaacttcctctgcctctggctctctggattttacaaaatctcctcccagctccagaattaacctttctaaaacatggatcgtgcttctgcgcttagcagctcacacctgtaatctcagcaatttaggaggccgaggtgggcagatcgcttgagcacaggagttcaagaccagcctggccaacctggtgaaaccttgtctctacgaaaaatacaaaaagcgtacctgggcatggtggtgcatggatgtagtcccagctacttgaggggctgcggtgggaggaactctttagcctgggcgattgaggctgcagtgagctgagattgcaccactgcactccagcctgggtgacaaagtgagaccctgtcacaaaataataaataaaataaaaataaagcatagatcttgttcctttcatccctggcttgaaaatcttgaatgcctgcatgtggtcccctagattaagtctagaagctttcacctgggattcagggctcctctcagttttagctttcctgctatggactacctgatgctccccaggcatgccaggcacatttgcatgtttgtgcctttgcaagctgtgtttcctccctgcctcctctgcctgttcaaatcctactgatgcttttaatggcaaatttaaggggatattattcagcaatgactggaatcttttgaacactcagtaaatctcatggttgttactaacttcaagagtcctcttctgtcaagacttctccaacctcatttgcaacctgggcagaatgttcctggatagccaattcccattaagtttcaccttcaccgagatatttttgtttgcagtgggatatgttcatgtctcctctatggggctcttggattccaggaccccaggtctgggatttcttcacttcactgttgcagtgttagctctgcaggctggctcagtcattcaggaaatgtttgatgggtaaatgtgaacaaaatagtgatgccttctactttgtcttttgcttgactggagcttctaatgttatttatttcaaatgaaccatatcaagggtcatttgataagaatatactagaattggccaggtgcggtggctcatgcctttaatctcagcactttgggaggacgagatgggcggatcacttgaggtcatgagtttgagaccagcctggccaacatggcaaaatccaatctctactaaaaattcaaaaataagcggggcatggtgatgggcacctgaaattgcagctactctggaggctgagcagggagaaccacttgaacccgggaaacagaggttgcagtgagctgagatcataccattgcgctgcagcttgggagacagagcaagactctgtctcaaaaaaaaaaaaagtatatatatatatacactagaattactgtactatactatttttttttttcttgagatgggatcgcgctctgtttcttaggctggagtgcagtggtacaatcatggctcactgcagcctgaaactcctgggctcaagcaatcctgcctcaggctcccaagtagctgggactacaggtgtttgccactatgcctaatttttgttttttatagagatggggtcttgctatgtttctcaagctagtgtcgaactcccgggctcaagtgatcctcctgccttggcctcttgagtcattggaattacaggtgtgagttaccatgcctcacctgctgtctgtttttgtatggcctgtcagccaagaatgacttttatgttttgaaatacgtaattgaaaaatatcaaaacaagaataatattttgtgacatgtgaaaattatgtgaagttcatatttcaatgtccataaaaatgaaattttttagaaaaccatcttgcccatttgtttacatattgtccatgactgcttttaccctgtactggcagagttgagtaatttcaacagggtccgtaatgctttcaaagcctaaaatatttaccatctggcccttttcagaaaagcttgatttaagctgttagtttactataaaattagtacgcacaacaaagaattcaaagtatagcccaaacattttagtttttttattttttattttactttatttttctccaagaatgcattttcagaccaaagctcaaacactttaagattgaatttaggccgggcacagtagctcacgcctgtaatcccagcagtttgggaggccaaggcaggtggatcacgaggtcaggagattgaaaccatcttggctaacgtggtgaaaccccgtctctactaaaaatacaaaaaattagccaggcgtggtggcaggtgcctgtggtcccagctacttgggaggctgaggcaggagaatggcgtgcacccaggaggcagagcttgcagtgagcctagatggcaccactgcactccaacctgggcgatacagcgagactccgtctcaaaaaaaaaaaaaaattgggcatggtagtccatgcctgtaatcccagatactcgggagactgaggcaggagaattgctggaactcgggaggcagaggttgcagtgagccaagatagcaccactgcactccagcctgggtgacagatcaagactccgtcttgggagaaaaaaaaaattgaattcagagggtataatgatttcgaaacttcaaaatgtttgactttaaaatttttgttagtgtgatagatgaaaattccatctttgtggtttcttttcttttccttttttttttttttttgagacagagcatcattccattgcccaggctaaagtgcagtggcgtgatcttggctcactgcaacctccatctcccgggttcaagcaattctcgtgcctcagcctcccaagtagctggtattacaggtgtgtgccaccatgcttggctaatttttgtattttcagtagagacagggtttcgccatgttgaccaggttggtctctctcttttttttttttttttttgagacagagtcttgctctgtcgcccaggttggagtacagtgatgctatctcagctcactgcaaacttcgcctcccgggttcacaccattctcctgcctcagcctcccgaagtagctgggactgcaggcatccaccaccacgccctgctaattttttgtatttttattagagacaggtttcactgtgttagccaggatgatctcaatctcctgatctggtggtccgcccgccttggcctcccaaagtgctgggattataggtgtaagccactgggcctggccttttttttcctgttattttaatgttcatttgcctgattgcaactgaggttgcgccttttttttttttttttgagtcggagtctcacatttgcctgattgcaactgaggttgcgccctttttttttttttgagtcggagtctcactctgtcacccaggctagagtgcagtgctgtgatctcggctcactgtaacctctgtctccctggttcaagctattctccttcctcagcctctcgagtagctgggactacaggtgtgcaccaccacacctagctaattttttatatgtttttagtagagatggggtttcaccatgttggccaggctggtcttgaactcctgacctgaagtgacttgcctgcctcagggttccaaagtgctgggattataggcacaagccactgcatctggcctttttttttttttttttcagagagcatcttgctgtatggcccaggctgtcaggctggtctcgaactcctagtctaaagtgattctcccgcctcctgagtagtgagcctttttttttttttttaatattattggtcattcagtttttccgtgaattgctcacttttcttgttgattttcagtaaacctttttttttttgagacagacttttgctcttgttgcccaagctggaatgtaatggtgcaatcttggctcaccacaacttctgcctcccaggttcaagcgattctcctgcctcagcctcctgagtagctgggattacaggcatgcaccaccacccctggctaattttgtatttttagtagagacggagtttctccacgttggtcaggctgctctcgaactccctaccttaggtgattgcccgccttggcctcccaaaatgctgggattacaggcatgagccactgcgcccggccggtcataaccgtttatctgttacatgatttgcaaatattttctcccttttatgccttgtcttttgattttattgataatgcttttagctgtaccaaagttttctttttcttcctttctttttgaaacggaattttactctgccactcaggctaaagtgcagtggagtgacctcggctcactgcaacctctgcctcccaggctcaagctatcctcccacctcagcctcacaggtagctgcactataggctcgcaccaccacacctggctaatttttgtattttttgtagagatgggttttcaccatgttgcccaggctggccttgaacttgggagcataaacaatctgcccacctctgcctctgcctcccaaagtgctgggattttagccatgagtcaccacgcccagccttctatattattttctaagttttagaattttgtttttctgacttggatatttactgtattgggaatttgttttgtgatggcctgaaagatgatttaacttaatttctattccatattgaaacctagttatgccaaccccatttattgaatagtcactgctaaaagagcataaaatacagataaaatttcctgctgccacctcgaccctttcccagttggttccagacttaagtggttatcattgtgaaaagtttcttgtttatttttgaaaaattgcccgtgtgtgttgggggtgggtgtggggggcatatacaaattggatcatatgctgtagactgttccatagcttttttttgactcagtatgatattttgccatctttttcatatcagttggcatatgtctaggatctagtttggaggttagtaaactttttctataaagggctagacatggtggatgtgatggcttatggctacgatcccagcactttgggaggccgaggtgggagactgtttgaggccaggagtttgagactagcctgggcaacatagtgagatccccatttctacaaaaaataaaaaaattagctgggcatggtagcacgcacctgtaatcccagctactcaggaggctaaggcagaaggatcacttgatcctgggagcttgaggctgcagtgggccatgactgtgccacagctccccagcctgggcaacagcaagaccccatcttaaaaaacaaaaataaagaagggctagataggctttgtgagccatactctcagtcacaactattcacttctaccattgcagcaagaaagcaataatagacaatagtaaacaagtgtggttgtgttccaataagactttatttacgaaaataggtagagccaggcatgctggtgtgtgcctgtagttccagctactagggaggctgaggtgaaggttcatttgagcccaggagtttgaggccagcctgggcaacacagcaagaccccatctcttaaaaaaatagataggagacagatttggccccaagccatattttgctgacctttgggcaagtttatatgttttaacatctgtgtggtattccgttatatgaatatatcataattgatgtaataaacaccttattagtatacatttaacttttctagttctttttattatgagcaattctgcacaaacaaccttgtacataacctttgcttactttcataaatatatatggaagaaatttctgaaagtagaattactacgtcaaatgtatgtgcatttcagattttgacagaaattatcaaattgctgtctgcagaggttgtgcttgtttacgctcccgtcaacagcatatgatggtgccggtttcctcacatgcttgccaactccgagactgtgaaaaatgctatatgctttagctctaaaattaaagtattttttggattgagttttaaaagtcttgttattttcaaaggacatataccagattgttaacattagttatttctgaaagaagataggactgcttgtccttttactttccttccttccttccttcctcttctttttttttttttttttttttttttaagacatggggtcttgctctatgtccctaggctgcagtgcggtggcaccatcatagctcattgcagcctcaaactcctgggcttaagcgatccttccacctcagtttcccgagtagctagaattacaggtgcaacccatcacgccaagctaatttttaaattttttctagagacagggtttaatcatgtggcccaggctggtatcagactcctagcctcaagcgatcctcccattttggcctcccaaagtgccgggattataggtgtgagctactgcacccagcctactttcttttgcatagttttctatgaaatatattgtctgaaaaattttcaatgcacagacactactttatcagaaaaaaacaacaaaggtgttttaattccaaaacaaaagctatatgtaaagtgtattttgtcttagatatataattatgaatgttgtatgtatatatttgcccccagcatctgtattatagacagaaaaagcaactgtggatgaggagaaacagtccttgcacaaatgttcccagtattctacagatgctgatgctgatccatccactgccttagctctttgtggacagaaatttccttcttggccaggcacagtggctcacacctgtaatcacacacagtaccttgggaggcccgaggcaggcaggcagatcacctgaggtcaggagtttgagatcagcgtggccaacatggcaaaaccctgtctctactgaaaatacagaaattagccaggcttggtggtgcacgcctataatctcagctacctggggggctgaggcacgagaatcagttgtacctgtgaggtggaggttgcaatgagctgagattgtaccactgcactctagcctgggtgactgagtgaggctttttctgaaaaaaagaagaaatttgcttccttatccacaaagacagcatttcaggcgaacatttcagtgtactcactccatgctgtgaagaattactatagcctatagaaggaagggcatgttctaggggccaccaggatctggcttcttccttcatgtgcttccatagtctctgccaggtccaggtaagtgacctaacatatggtccagtgaatatgagatcaaggaataaaattcatcatgcagtgcccggagtcctctcaagcaaccactgaggatctgatgcttcacagcagtgtgctctctgttgtacacattagcattgctcttcctctgggggtctaaggttgagattttgcattttgtgaatgtctgcaaatttccaacagcatccaccctggcagtacagcgagtccgtaggaactggtatggtaattttcctgagctccctaaaccccagcatgtatcaatgtattccacttttgcatattttgcttcctatagaatgggaggtacagaatcgtatcccttctggaactatattaaaggccttgatggaaggtggtgaaaatgggccctggatgagatttatgagagcagaaataacagcagagggttttttacgagaatttgggagactttgctctgaaatggtgagtggtaaacatacctacatttccatatttttctttttgccttgagtagtggttgcaacattcatgtataagttagttaaactgaaaataaagtgaaacctaataacccattacatgttttaaagttatttcttaggccaggcgcagtggctcatgcctataatcccagcactttgggaggcccagggggtggatcacctgaggtcaggagttcgagaccagcctggctaacatggtgaaaccccgtttctactaaaaatacaaaaaattagctggctgtggtggcgcacatctgtaatcccagctatttgggaggctgaggcaggagaattgcttgaacctcaggggtggaggttgcagtgagctgagatcatgccattgcactccaacttgagcaacaagagcgaaactgtctcaaaaaaaataataataaagttatttctttcacccctaggtgttcaatgttcaattcatatatgaataactaaaaatattcttagccaggcgtggtggctaacacctgtaacttcagcactttgggaggctgagacaggagaagtgtttgaactctggagtttgagaccagcttaggcaacatagccagaccttgtctctactaaaaatcaaaaaaattagccaggcatggtggtgcacacctgtggtcccagctattcaggaggctgaggcttgagccctagggattgaaacttcagtgaaccatgaccgtgccactgcactccagcttgggcaacgtaacaagactctgtctcaaaaaaaaaaaaaaaaaaattctttactaagttcctccagcatatatttttttaatgttttctggtgtattataaaggatgttatgaaggatacgaatgaacagccagatgacaagatacctgggggcaaaggttttagagccactgtgccctttccaggcctgccaccctcctcccagcacctccatgcattcagcaacctgaaagctcccctctaatagatactaaaacaggagctgtctacataatggctttgataaaaaagcttttttaaagcaataataatattgaacattttttctgtactgtgcactgttctaagctctttatataactcatgtaaccacaatagctctactaaaatataatttaaaatatagtaagaaaagttctgtaggtagatggtgatgatggtgatggttgcacgacaacacgactgtacttaatgccactgcactgtgtacttaaaaatggtcgagtgcagtggctcacacctgtaatcccagcattttgggaggccaaggagggcggatcacctgaggtcaggagttcaagacaagcccggccaacatggtgaaaccccatctctactaaaaatacaaaatttagccaggcgtggtggtgggcatctgtaatcccagctacttgggaggctgaggcaggagaattgcttgaatctggggggcagaggttacagtgagccaggatcaagatcacaccactgcactccagcctgggtgacagagtgagactccatctcaaaaacaaaaacaaaaaaaggttaaaatggtaaattttgtgttacatatattttccacaatttatatatatatatatatataaacatatatgtgtatatgtaatagtaaactttgaaaacattatgcaaagtgaaagaagccagtcaaaaaagactgcatggtgtatgattccatctgtgtgaaatgtccagaataggcaaacccatagagatagaaagtagattggtggttttctagtacaaggagactttgggggaaatgaggagtgactgttaatgggtacggtttactttttttttttttaattttttttttgagacacagtctcactctgttgcccaggctggagtgcagtggagcaatctcggctcactgcaacctctgcctcccgggttcaagcgattctcctgcctcagcctcccgagtagctgggactacaggcgtgtgccaccagctccagccaatttttgtatttttagtagagacggggtttcaccatgttggccaggatggtctcgatctcttgaccttgtgatccgcccaccttggcctcccaaagtgctgggattacaggcgtgagccaccacgcctggctggtttgctctttagagtaatgaaaatgtcctaaaattgatggcagtgatggttgcacaactttgtaaatatattaaaaaccattgaattgtactctttaaataggtgacttgcatggcatgtgaattagagttcagtaaagctgttctaaaatctgtgtgtgtatatgtatatataaaacagcagacttgcctttgcagattttgaaatgtgataatataagagttttctttctttctttctttctttctttttttttttttttttgagacggagtcttgctctgttgcccaggctggagtgcagtggcatgatcttggctcactgcaacctccgtctcctgggttcaagcaattctcctgcctcagcctccccagtagctgggactacaggtgcgtgccaccacgcctggctaattttttgcatttttagtagataaggggtttcaccatgttagccaggatggtctcgatctcctgacctcgtgatctgcctgcctcagcctcccaaagtgctgggattacaggtgtgagccactgcgcccagccttataagagttttcaaaacccacacagattgaatttaaaaacaagaaaaaaattgatcagaaactaaagttcataatggtgatactgaggcaatataaaaagcattaaatgacttctcaatcattaaaaattaaattacatatacttcatatacttttagatttcactgtatcctcttatgatatgctgttttttttttcaactagcaatccatgagcagaataaagaactcatttaattgtaatattgatataaatagctccattccctactgtgttgctcaggctagagtgcaatggcttgatcatagctcactgcagctccaatctcccaggctcaagccatcctcccacctcagcctcctgagtagctgggaccacaggtatgtgccaccaagcctagctaagttaaaaaaaaattttttttagatctcactttgttgcccaggctggtgtcaaaatcctgagctcaagcagtcttcccacctcagcctcccacagtgctgggattacaggtgtgagccactgtgcccagcctataactctagtcctggataacttttaaaaaccttatatgagagttcagcacaggggctgaggaacacagttcctgcaggcagcaagctatgagcctgggctcttgtagcagagagcagaaggacgccaggaataagcattttttttttctgttggccatgagtgtttgtcactcttaatgattgctgttctcctgtgccctctcctgttcttagttaaagacctccgtgcctgtggactcatttttctctctgttgaccagtgagcgagtggcaaagcagttcccagtgatgactgaggccataactcaaattcgggcaaaaggtcttcagactgcagtcttgagcaataatttttatcttcccaaccagaaaagctttttgcccctggaccggaaacagtttgatgtggtaagcttgagctaattgaaaaccattggaacagaatctgtgccctcgcttcagggtgcaatgttaaatgctatcttccagcaggtcttgagtgagggagtttttccttcagccacttgactaagttaggtttaaatgcaatatgttgaaaacagaccctttaagatatcactgtgttcttagcaaggtcagacatttatggcatttgattactggttgacacttcagctttacattctaaattcgaaccttagtcttcatataacacaagcatctctgtcagccctcatatcgtaatggatcctttggccttttctaagaccaactatgttgccttctatttctgtgacgttagttcctagaccagtgctgtccaataaaattttactgccttcctcggcctgatttacttccatactaaatccatctgctccatgtgtgtatcccaacctgtcatgtgataaacctatcgttttgacatgcttggctatatttgggtactttacctatttatttatttttatttttttattttgagatggagtctcgctctgtaacccaggctggagtgcagtggcacaatctcagctcactgcaacctctgcttcccaggttcaagtgattctcatgcctcagcctcctgagtagctggaattacagatgtgtgccaccatgcctggctaatttttatatttttagtagagacgggggtttcaccatgttggccaggctggtctcgaactcccaacctcaagtgatccacccacctcagcctctcaaagtgctgggattacaagtatgagccaccgtgcctggcctatttatttttttatatatatatatatatatatttttttttttgagaccatctcactctgttgcccaggctaaagtacagtggcaccatctcggctcactgcagcctccaccttccaggctcaagcagttctcctgcctcagcctcctgagtagctgtgattacaggcatgcaccaccacccctggcaccaccacccctgaatttttagtagagacagggtttcaccatgttggccaggctagtctcgaactcctgacctcaagtgatctgcccacctcagcctcccaaagtgctgggattacaggcatgagccatcgtgcctggcccctatttgggtactctctttttttttccttgagagaaggtctctctctgtcgcccaggttggagttcagtggcgcaatctcagctcattgcatcctccacctcctgggctcaagcaattctcgtgcctcagcctcctagtagctgagactacaggtgcatgccaccacgcctggctagtttttgtgttttttatgaatattagagactgggtttcaccctgttggccagggtggtctcaaacttcagacctcaagtgaccaacccacctcagcctcccaaagtgctgagattacaggcatgagccactgtgcctggccctatttggatactttaaaaatgtttgtttttgtcttataaccaacagcagtgataattccctttagaaactccaaagcccagattggcagttgatcttccagcaccttttagagttgtgatggatcagaaggacccttcccctggcccattcctccaaggatattctgagtcagtgcaaaagggaacagctcatgaaatatagtgagagtcatggtagcctctagaacacatcagattaaatttctctgataactcaagtattggacattttgctaccagagcccctttctgattctttccatctttggaagagctacttttgctggactccaggaagtggcatattaccttagccctacatctgcctatgcctgggtgtatttgtacccttcgttgggccagtgagattaaagattttcaactctgcctacacatcacatgacctgggagtttgtaaagatgctgggtctgtttccctggaggctttcattgagtatgtctagttgggatccaggcatgtgtatttcgaaaaagctccacaggtgattctgccttgcagctggggtgagataccccaagacgcagtgagggacttcagattctgtccatgcttttctcttatcagacagcctctgtcatgcttaccttgagaaggaggcttcccctccatcttcctgggatagagccttgataaataaaatcatttttatctgatctacatttggaaaaacactgaccttgttcccacagttcctgctttgccaagaaagtaatagaagccctgaataagttcatgccatcatgtgcaaaataagaaagagaaggctagagatcttatcaaataaatcttaagaatttattttacttcccccagatgtaattcacctagtgagaggagccgaatgcttcctggaactttgccccatcccccccaattccctccactctcctagctcttgtctcagccagtacagctctgccacttccatctggtacgttacatcgactggtgtctgaaacaccctgcttctgtacttctcactattgacgttttctttagggtagcctcttagactttttttttttagctcattcaggtccttaggagacaagagaaagtagaaaggtccagtttattccagacatttatttacctgaaagggcagttctcacccaacccagaatgcaagtgtagggtagagagaggggccactgggtttgtccttggccttggagagcttgggtcattccaagtggcaagtcagagatttagttctgttcttagggcagatcagagggtattggttataggctatgtggctataggagattgggcccactctataggagattacgccctggggacactgtaaaaggactttcggggaatcagtggatcagagacagcctgacactgagaaggctttcccgtgttctcctgaactctcaccagcaccctccacccattacggatcagatatgtggctgaagcaaggtcgtcagagtacaggagcctcttagcatgtcaggaacagtgtcagccctcccatggaatttctgtctaaatggagtatggatgggtttttaacctctgaaataaacactaagttcgtatttattttatacctgtaatagtgtcttctttctgcaaaaaaaaaaaaaaatggcgaaatgctttccgtcaaactgacatgtacagcttttcttctgctctgtttagccccaagatgtgacattagccaaatgctttgtcattttggaacccacttaagtttcatttaagtttcacaacttactgagctaagataggtacgatgactattaatattattcccattttattgatgatggcactgaggcccattatggctttgctcgtttgcacagggtcacagtgtctgaaacagacactttggtttctcgagtttgcccccacgttgtaacccagtattgtcaaattactcaatgtaagaaggcaacatcattttatatcataacactcttaaattacttgttataataaatctcaactgtccttcttatgcttttcctctcaaaaagtttaccagcatgcatgtgggagctccacctttcgggacattcatctctcattcctgtccctccatcagattgtggagtcctgcatggaagggatctgtaagccagaccctaggatctacaagctgtgcttggagcagctcggcctgcagccctctgagtccatctttcttgatgaccttggaacaaatctaaaagaagctgccagacttggtattcacaccattaaggtaatagtcactaatttttgaactccctcccatgcaccagccactaatgcaatgtttctctgtaatctttttacatttgtagctctagctttccttagggtttccccctgtgtttccatagtcatcttattttgtgttaattatgaaatctatgtgactagctgcttgtattttcaatgggaagcaagacaaacaggtactgcgaaggcaggttgagaaaagagatgggaaaggaggtgaatggcaggcttaagacctttgtgggggtgttcacactgtcctcatgatccagtgatgctgccttaagtggggagccagtggccaccagccatgcaggccatgcagctcactgctgtaaagcacgagaagccatgtgagggggtctcatgccaacttttttctattctttttttttttttttctcatacagggtcttgttatgtcacccaggctggagtgcagtggtgcaatcatagctcactgtagcctcaacctcctgggcttaagtgatcctcctacctcagtctcctgagtagctgaccagaggcatacaccaccacacccgactaatttttgtattttttgtagagacagggttttgccgtgttgcccaagctggtgtcgaactcctgggctcaagcgatctacccaccttaccctcccaaagtggtgagattacaggtgtgagccaccatgcctggcttctattcttctatgtttgggttttcatcgtcgagctgatgggcctgtagggtaagagcaaacgttgtaacataatcttctttcttcttggcacaagagggtattgtgaaatttttttttttttttgaaacagagtttcactttgtcacccaggctggaatacagtggcatgatcttggctcactgtaacctctgcctccctggttcaagcaattctcgtgtgtcagccccctgagtagctgggactataggcgcacgccaccatgcccggttaattttttgtattttagtaaagacagggtttcaccatgttgcccaagctggtctcaaactcctaagctcaggaaatctgcccgcctcgcctcccaaagattcacggcctcaccacgcccggccgtgaatcttttttgagatgaggtcttgctaggttgccgagggctttgaactcctggactccagcagtcctcccacctcaggcttcccaagtggctggaactgtgggtgcacaccatcatgcctagctgttttgtgaaccgttgaccagtgcttctctctgcaggatagaaagttcagtgtggttaggagttaaatgggaagaggaaatgcattctactgctccctcattagctaaatatcctgggttcgaaggccttcctcagagtactgacttctttgataatttccctctaaaggactaccctttgtaaaaagtaaagtagaggttcttctttaaagactttccttattatttaattaggaataaatagtaacttcttttagaagcaaaatttatttaaagacctgtgctaaattttttgttgttgttgttgttgagacggagtctcattctgtcgcccaggctggagtgcagtggtgcagtcttggctcactgcaagctccacctcctgggttcacgccattctcctgcctcagcctcccaagtagctgggactacaggcatccactaccacgcccagctaatttttttgtatttttagtagagacagggtttcactgtgttagctaggatggtctcgatctctcgatctcctgacctcgtgatacgcctgcctcggcctcccaaagtactgggattacaggcgtgagccaccacacccagctgacctgtgctaaaattttttttttttttttttttgagatggagtcttgctctttcgtccagtccagactgcagtggtcctatcttggctcactgcaagctccatctcctgggttcgcaccattctcctgcctcagcctcccaagtagctgggactacaggcgcctggctaattttttgtatttttagtagagacggggtttcactgtgttagccaggatgatctcgatctcctggcctcgtgatccacccgccttggcttcccaaagtgctgggattacaggcgtgagccaccgcgcccagctatgctaacatttttaaatatttgctagctgcaataaagaaattaatgtattttatgtttttagttcctgcaatttagtctaaatatttgccttggcctgctaatactggtccaagcaagtattgggtcatagcttgttcctcttctttatttgaaggtgtttttatttttctcagcattttacaagttacttccttcttcctttgttttcctctacctttgcctcttttaaaaagttttaagttgctagccaattaggacaaatacagaatgtaaagtctcgttccagccaatggaaactggacacagcagtaggatggatgcgtcagcttataaatgaccctgtctcctttgtttggtgtactgttgtggcaaaactgctggtgagtgtaccctttctgcaggaagtaaaaatggccttgctgagtaaattaaatttatgttcaagtgctatgtctttgtggcaccggggaacaaacatttcagacacctcctaggaaacagataggagcccctgaggccaggattgactgctggcacctgttcaatatatattctctgcacctgtactaccatgaattgtaaaattaaaaatatatacgtgtatatattctcaacatcctgtgaaaggaagggaaaaataacaacaacaaaaaatatacatctacatattctctctgaaaccaggttaatgacccagagactgcagtaaaggaattagaagctctcttgggttttacattgagagtaggtgttccaaacactcggcctgtgaaaaagacgatggaaattccgaaagattccttgcagaagtacctcaaagacttactgggtatccagaccacaggtatgtgggcttctttcatgttttggtagctctctccaaggcgaaggttttggtctgtttctcacttttcaaccctaatggaatgggctggagacaaagaagctttacagtgaggaaaatagccattgggcctggtgcatcggagcactgctttcagttttgcttgggaaaaagcattaacttccctatttatgcatctccaaaagtgtacctatcccactcttacacctgagagtgtggtatggcagtggttgcctgctttcaacagggagaggaacttggggactgcagtgtgtgctcagaggattttacagtttctaatgctttgagacgacagcccattttgtgaagacgacttagaagttacatcggcaggcgggtgcggtggctcacgcttgtaatcccagcactttaggaggccaaggcaggtggatcgcgaggtcaggagtttgagaccagcctggctaacttggtgaaaccctgtctctactaaaaatacaaaaattagctgggtgtggtggtgggtgcctgtaatcccagatactcgggaggctgaggcaggagaattgcttgaacccaggaggtggaggttgcagtcagccgagatcgtgctactgcactccagcctgggtgacagagcaagactccatctcggggggaaaaaaaaaaagaatttgcattgctgaccggggcgtagtggctcacttctgtaattccagcattttgggaggccaaggcaggtggataacttgaggccaggagttcgagaccaggctgaccaacatggtgaaaccttgactctactaaaaatacaaaaattagctgggtgtggtggtgcacaactatagtcccagctgctctggagactgaggcacaacaattgcttgaacctgggaggcagaggttgcagtgagccaagattgtgccactgcactccagcctgggtaacagagtgagactccatctcaaaaaaaaaaaggaaaagaaaaaaaaaaagggctgggcgcagtggctcatgcctgtaatcccagcactttgggaggctgaggcaggcggatcacctgaagtcaggagttcgaggtcagcctggccaacatggcaaaaccccatctctactaaaaatataaaaattagctaggtgttttggcgggcgcctgtaatcccagctacttgggaggctgaagcaggagaattgcttgaacctgggagactgaggttacggtgagctaagatagtgccactgcaggcctgggtgacagagcaagactccgtcccccccccaaaaaaaaaaggaaaaataatgttgctgggtgtggtagctcacccctgtaatccccagtactttgggaggccgagatgggcggatcatctgaggtcaggagtttgagagcagcctggccaatatggcgaaaccccatctctactaaaaatacaaaaattagccgggcatggtggcacatgcctgtagccccagctacttgggaggctaagacaggagaatcacttgaacctggaaggtggaggttgcagtgagctgagatcatgccactgcactgcagcctgggcagcagagcaaggctctgtctccaaaaaaaaaaaaaaaagttgcatgattttaaaacgcaacaaattgtctccatttcttggagacaagttttctctttcctccttcacattcccccctcagaaaaccaggtgccttgtgtgctttagaggacacttttgggccaggggtggtggctcatgcctgtaatcctaccactttgtgaggctgaggtgggcagatcacttgaggccaggagtttgagaccagcctggtcaacatggcgaaactccatctctactaaaaatacaaaaattagccgagtgtggtggcgcatgcctgtagtcccagctactggggaggctaaggcagaatcgcttgatcccaggaagcagaggttgcagtgagctgagatcacgccactgcactccagcctggacgacagagggagagtccatctcaaaaacaaaagaaaacaaaaaagaagacttacaaaattttttaaattaaattaaattaaattttttttgagatggagttttgcccttgttgcccaggctggagtgcaatggcatgatctcagctcactgcaacctccgcctcttgggttctagtgattctcctgcctcagcctcccgagtagctgggattacaggcacccactaccatgcctggctaatttttgtatttttagtagtagagacggggtttcaccacgttggtcaggctggtctcaaactcctaatctcaggtgatctacccgccttggcctcccaaagtgctgggattacatgagcctccgcacctggccaaagaagacatttttcccaggtaataaaggcttcacccacttgctccgtgaaaaaggcttttattgatggagtttcatgttaggatgttttccagcaattggattattggtagtggcctctgcacagctgaggcgcccactctggccagccagaagaactcaggccgagttctgttgcttgcctactcttctaaccaagtgaaatcagtctatacccagggttcagtcttcttatggagctgagaatgaattagtttcacctcagccaggatcctgcaagggagccacagaattcagcctagtgcagtgggaaattacatctcatgaaagcagctttgggtcaggccgaaggcctctgtgtcactcctttcagctgtcccagcagtgtcaggcagagggacgtgcaagggcacctttcatcctcaggcttaaagcattccatttggcaagatgggttgccatggctgcgtttgtgcttgataaacagaatgaacatgtttttattcatggagcaggagctggcaggaaggacaaaattggacacctgcacaaactgagaaaattactgtggtataaaatgaatggcctttgacaaactgtagtggcatgtgatcctggacctgagttggcggagtgtagacctgggactcagtcactcctagtaggcagagaagaggtacttttcttgcactgcatggcagatgaggatattttgaagcccaaatgcagaactcattagaaagaaagaatgtctgctcagatctgtcctccagggctggtttgagttttctttgttttcaaacttgcaggcccattggaactacttcagtttgatcacgggcagtcaaatccaacttactacatcaggctggctaatcgtgatctagttctgaggaagaagcccccagggacactccttccatctgcccatgccatagagagggagttcaggtaagttttcagggccaggggagcacttgcccactagcctccactgtgcacaagctcagccctaaactgaaaagtcagcactccataaaaataccccaagacatttaaaactacaattatgggccaggcttggtgggtcacacctataatcccagtgccttgggagaccgaggcaagaggatcattgagcccaagaggtcaagaccagcctaggcaatgcagcaagaccctgtttctaccccccatccccccccaaaaaaaagcctgggtgtgctggcatgaacctgtagtcacacctactcaggaggctgaggtgggaggattgcttgagctgggaggttaaggctacagtgagttactgtggcatcattgcactcccacctgggagacattgtgaaaccctgctccaatcccccaaaaagccaaatgtaaattagaactattctggaaaacaatatgatacaatttattaaaagcctcagcgttttcatactttcagacctaataattccaattctggggctctgtcttaaagaaataattctaagtagggggaaacagctgtatgtattaatatgctcaccataaagttgtttaataataagaatttggaaggccaggagcagtagctaccatagtcccagcactttgggaggctgaggcaggtggatgacttgaactcaggaattgaagaccagcctggacaacatagtgaaaacctgtctctaccaaaaatacgaaaaattagttgggtgtggtggcacatacctgtagttccatctactcaggaggctgaggtgggaggatctcttgaacctgggaggtggaagctgcactgagccgaggtgggcaccactgcactccagcctgggtgacagagcgagactgtgtctcaagaaacaaacaaaagagtttggaaactacttaaatatactataatctgtaccataatcaggaaataattaagtaaaccttggtatatatactgtcgcaatgacagtaatagtaatagctaacatttatcgaatggttaatatgtgccaggcactaaaataaatgcttcgaatgtctgttactgcagagcatcctcacaactctatgatatgttacaattatagtcctcatttacaactgggaaaagtaagccttaaagaaaccaaggcaggcagatttgctttgagctcaggcgttcgagcccagcctgggcaacatggtgaaaccctgactctacaaaaaatacaaaaattagccgggtgttggtgacttggacctgtagtcccagttacatgggaggctgaggctggagaatcacttgaacccaggaagcagaggttgtagtgagctgagatcgtaccgctgcactcacaaagtgagaccctgtctcaaaaaaaaaaaaaaaaaaaaattaaccagcatacccagggtcataaaactagtaagcaagtgctagagtctggctttatagccagtctgtgagatttcatagctcacctttaatgattatgctgttattgcagctaataaaagtatgcctataataacaaatgtgtatgataaaattttaagatagtaaaggcagatacaaactgcatatatagtattagctgattttttttttttttttaggcagagtgtcactattgtccaggctggagtacagtggtgtgatgatacctcactataatctcgaactcctgggctcaagtgattctccgcctcagcctcccaaatactacaggcacatgccatcatgcctggctagttttaaaaatttttttgtagagatggggcctcactatattgcctgaactcttggcctcaagcaatcctcccaccttggcctcccaaagtattggggattacaggcatgagccagcgtgcctggccaaggtttttgattattaattcaatttaacaaaaatgttgttactcagatattttatttcatcttgttttagatttggtaagttgtaatttctaaggagtctgttcatatcacctaagctgttgaatttatgatttataatattcccttactatccttttaatatacgtaggatctatagtgatatcctttttttttttttttttttttttttttttttgaaatggagtcttgctttgtcatccaggctggagtgcagtggcatgatcttggcttattgccacctccatctcccaggtccaagtgattctcctgccttagcctcccaagtaacagggattatagtcacacgccaccatgtccagctaatttactatttttagtagagatggggtttccccatgttgaccaggctggtctacaacccctgatctcaagtgattcacctgcctcggcctcccaaagtgctgggattacaggcgtgagccactatgcccaccctagtgatatcctttctttatcactgctggtattaactgataatttgtattctctctctcttgttagtctagctagggatttatcaattacattgatctgggaaccacagtttggttttgttacttttttctattgtttgttttgttttgaggcggagtttttgctctgtcacccaggctggagtgcagtggcgcaatctcggctcactgcaacctctgcctcccaggttcaagtgattctcctgtctcagcctcctgagtagctgggattacaggcatgcgccaccatacccaggtaatttttgtatttttagtagagatagggtttcaccatgttggtcaggctggtccgaactcttgacctcgggtgatccgcctgccttggcttcccaaagtgctgggactacaggtatgagcctctgcgcctggcctgtttttcttttctaatacaagcatttaaatatataacttttaaggctgggcgcagtggctcccacttgtaatcccagcactttgggaggccgagccaggtggatcacctgaggtcaggagttcaagaccagtcttgccaacatggtgaaaccctgtctctaataaaaatacaaaagtaagccaagtgtggtggtgcacacctatagtcccagccaatctcgaggctgaggcaggagaatctcttgaacccaggaggcagagattgcagtgagcggagattgcagtgagccaagattgtgccatggcactccagcctgggcaacataatgagactctgtctcaaaaaaaaaagaaaagaaaaaaagaagtgcattgtttaattttcaaatatttgggggtttttttcttgatattatatgtgaatgaattctagtttaattccattgaagtctgacaaataccctgcaagatttcaattttttggttttttttgagatggagtcttggtctgtcacccaggccgtagtgcagtggtgcgatcttggctcactgcagtctccacctcctgggttcaagcaattctcctgcctcagcctcctcagtagctcggactacaggcacataccaccatgcctggctaatttttgtatttttagtaggtatggggtttcaccacttcggccaggatggtctcaatctcctgacctcatgatccacctgcctcggcctcccggagtgctgggattacaggcatgagtcactgcgcccggccttttgtttgttattttttgagatgcaggtttgctcttgtcgcccaggctgcactgcagtggcatgatcttggttcattgcaacctccgcctcctgggttcaagtgattctcctgcctcagcctcctaagtaggtacaattaaaggcatgaggcaccatgcccggctaatttttgtattatttttattattttttgagacagagtctcgctctgttgcccaggctggagcgcagtggcacgatctcggcccactgcaagctccgcctcccaggttcacgccattctcctgcctcagcctcccgagtagatgggactacaggtgcccaccaccactcctggctaattttttgtatttttagtagagacggagtttcaccatgttagctaggatggtctcgatctcctgacctcgtgatccacccgcctcagcctcccaaagtgctgagattgcaggcatgagccaccaagcctggccctaatttttgtatttttaatagaaatggggtttcgccgtattggccaggctggtgttgaactcctgacctcaggtgatccgcccgcctcggcctcccaaaatgctgggattataggcatgagctagtgtgctgggctagattttaatttttattgaaattttttgagatttattttatggaccagcacatgacttatcttggcgaacatattgtgtttacttgaaataatgtgtattttgcaatatctgagtgagtggtatacaaatgtccatcagatcaagttggtagtgggttcagatgtatgtctttagataaatctatttttgtctaattctatcattactgagaaaggagtgttaaaagctcaactaagacttgtggatttctccatttttttctctttaattttgatcatttttacttgatatatttcgaagctctgttgtttagcacatacatacttatgattgtaatatctttctgatgaacttgcagttgtatcattttcaaatgtccctctttatctctggtggtacactgtcgtaaaggctgctttatttgatattaaagtagcctcaccagctttcttatgcttagtgattgcataatgcttccatttccatccttgtttttgcagcctatctatgtttatatattcagcgcatatctcttgtagacatcatataattaggtcatgtttttctgtccaggctgaaaacatctgtcttttatttttattttatttcttttatttattttattttatttttttttgagatggagtctcgctctgtcacccaggccggagcacagtggagcgatcttggctcattgcaacctccgcctcctgggttcaagtgattctcatgcttcagccacccaagtagctgggattacaggcacgcgccaccatgcctggctaatttttgtatttttagttgagaaagggttttaccatgttggccagggtggtcttgaactcttaggctcaagcagtcctccccctcagcctcccaaagtgctgggattacaggcaggagccaccatgcatggccaacttctgtcttttaattggaatctattcatcttttgagtttaatgtaattattgatatgtttgatttaggtctacaatttcaccattggttttttgtttgtcccatcatttttttgttcttacctacttttgggtcaattgaatattttttagaatttcattttaatttatgtaccatttttaattcagaaaagtaatttcaggccaggcacaatggcttatgcctgtaatcccaggactttgggaggccggggcaggtggatcacctgaggtcaggaatttgagaacagcctggccaacatggtgaaaccgcgtctctactacaaatataaaaattagctggttgtggtggtgcacatctgtaatcccagctactcaggaggctgaggcctgagaatggcttgaacctaggaagtagaggttgcagtgagccaagatcgtgccactgcactccagcctgggtaacagagcgagactgtgtctcaaaaaacaaaacaaacaaacaaacaaaaaacaaagaaaagtaacttcaagaaaatctcatcaattcagccagcaattttgtttattttcatttgtccttgcaggattatgaaagcccttgcaaatgctggagtacctgtccctaacgttcttgatctctgtgaagattcaaggtaaagttcagatgtttttgctattgcactttcaagctacaggagagaaaagcccatatgctaacacaaattccaatttgttaaagacaaataaaatttgggtaggagggaaaagaaactttatcacaacctctcccagaagttctcagatatttaagttatcctgcaagataagtatatgcctgctttagggataattggtagaaaacatcttttttaacattcaaaaaatacatattaatctagtttcatgttgcttgtctttatttatttttttaatcagagtctttctaaactgttttgttttgtttttttgagacggagtctcattctgtcacccagactggagtctcattctgtcacccagactggagtccagtggcctaatctcggttcactgcaacctctgcctcctgggttcaagtgattctgctgcctcagtctcctgagtagctgggattacaggtgccccctactatgcccagctagtttttgtaatttttgagtagagacagggtttcgccatgttggccatgctggtctccaactcctgacctcacgtgatccacccactttggcctcccatgatgctgggattacaagtgtaagccaccgtgcccggccctaaactatttatttatttatttatttatttatttattttttattgataattcttgggtgtttctcacagagggggatttggctgggtcataggacaatagtggagggaaggtcagcagataaacaagtgaacaaaggtctctggttttcctagcagaggaccctgcggccttccgcagtgtttgtgtccctgggtacttgagattagggagtggtgatgactcttaacgagcatgctgccttcaagcttctgtttaacaaagcacatcttgcaccgcccttaatccatttaaccctgagtggacacagcacatgtttcagagagcacagggttgggggcaaggtcacagatcaacaggatcccaaggcagaagaagttttcttagtacagaacaaaatgaaaagtctcccatgtctacttctttctacacagacacggcaaccatccgatttctcaatcttttccccacctttcctgcctttctattccacaaagccgccattgtcatcctggcccgttctcaatgagctgttgggcacacctcccagacggggtggtggccgggcagaggggctcctcacttcccagtaggggtggccgggcagaggcgcccctcacctcccggacggggcgggtggccgggcggggggctgacccccccccacctccctcccggacggggcggctggccgggcagaggggctcctcacttcccagtaggggcggccgggcagaggcgcccctcacctcccagacggggcggctagccgggcggggggctgacccccccacctccctcccggacggggcggctggccgggtggggggctgaccccccctcctccctcccggacggggcggctggccgggcagaggggctcctcacttcccagtaggggcggccgggcagaggcgcccctcacctcccagacggggcggctggccgggcgggggggctgacccccccacctccctcccagacggggcggctgtccaggcggggggctgacccccccacctccctcccggacggggcggctggccgggcggggggctgacccccccgcctccctcctggacggggcagctggccgggcggggggctgacccccccgcctccctcccggacggggcggctggccgggcagaggggctcctcacttcccagtaggggcggccaggcagaggcgcccctcacctcccggacggggtggctggccgggtggggggctgacccccccacctccctcccggacggggcggctggccgggcggggggctgaccccccgacctccctcccggacggggcggggggctgacccccccccccacctccctcccggacggggtggctgcccggcggagacgctcctcacttcccagatggggtggctgccgggcagagaggctcctcacttctcagatggggcggctgccgggcggagggcctcctcacttctcagacggggcggttgccaggcagagggtctcctcacttctcagacagggcggccgggcagggacgctcctcacctcccagacggggtctcggccgggcagaggcgctcctcacatcccagacggggcggcggggcagaggcgctccccacatctcagatgatgggcggccaggcagagacgctcctcacttcctagatgtgatggcggccgggaagaggtgctcctcacttcctagatgtgatggcggccgggaagaggtgctcctcacttcctagatgggatggcgtctgggcggatacgctcctcactttccagactgggcagccaggcagaggggctcctcacatctcagacgatgggtggccgggcagagacgctcctcacttcctagatgtgatggcgtcacttcctagatgtgatggcggccgggaagaggtgctcctcacttcctagatgggatggcggcggggcggagacgctcctcactttccagactgggcagccaggcagaggggctcctcacatcccagacgatgggcagccaggcagagacactcctcacttcccagacggggtggcggccgggcagaggctgcaatctcagcactttgggaggccaaggcaggcggctgggaggtggaggttgtagcgagccaagatcacgccactgcactccagcctgggcaccattgagcactgagtgaacgagactccatctgcaatcccggcacctcgggaggctgaggctggcggatcactcgcggttaggggctggagaccggcctggccaacacagcgaaaccccgtctccaccaaaaccagtcaggcgtggcggcgcgtgcctgcaattgcaggcactcggcaggctgaggcaggagaatcaggcagggaggttgcagtgagctgagatggcagcagtacagtccagcttcggctcggcatgagagggagaccgtggaaagagagggaggggagaccgtggaaagagagggagagggagaccgtggaaagagagggagagggagaccgtggaaagagagggagagggagaccgtggaaagagagggagagggagaccgtggggagagggagagggagaagactattttaaacagctttgtaacatgctttttgagtgtctcttctttcctaatgttttaattatgtaacatttgaaaccttcagaaaaggtgaaagaagaaaaactaatacaatgaatacctgtttacacttcatctagatcaaaaattaaaacattgttaacattttgccacatttattttctgtatatgtgtgtgtgtatacatgtatacttttaacatgtagataatgattttttttggctgaaccttttgaaataagtttcagacagcatgcatctctcaagaataaagacattgaccgggcatagtggctcactcctgtaatcccagcacttaaggaggctgaggcaggtagatcacttgagcccaggagtttgagaccagccagggcaacatggcaaaaccccatctctacaaaaacaaacaaaaaattagccaggcgtggaggtgcacacctgtagtcctacctacttacccggaagattgtggtgggaggatcacctgagcctgggaggtggaggctgcagtgagctgtgatcacatcactgcactccaggctggatgatagagtgagaccctgtctttttttttttcctttcttttcttcttcttcttttttttttgagatggagtctcactctgttgcccaggctggagcgaaatggcgcggtctgggcacactgcaacctctgcctcctggattcaagcagttctcctgccttagcctcccaagtagctgggattataggcatgtgccaccacacccggctaatttttgtatttttaatggagacggggtttcgccttgttggccaggctggtctcaaactcttgacctcaagtgatccatccgcctcggcctcccaaagtgctggattacaggtatgagccactgcacccggccgacattgtttttcataaccacaacaccagtatacctaactaacaattatttaataataatactgaatatctaacccatgttcaaatttccccaatccaaaacatcttttgtaataatttttcaacttgaaacatttgtaatggtaggattttcaaaacaattttttagagtagtaaactggaggctgaggcagatggatcacttgaagccaggagtttgagaccagcctggccaacgtggtgaaaccccgtctctactgaaaatacagaaattagctgggcatggtggcgctcacctggagtcccagctactttggaggctgaagcaggagaatcatttgaacctgagaggcagagtttgcagtaggccaagatcgcaccactgcactccagcctaggtgatagagtgagactccatctcaaaaataaataaataaataaatagagtagtaaactgtttgctagtaatgaccaaaagatggattagtgacatgtcattgggtcaccttagtactgctgggtggtatatacaccactcataccaccaaaaaatgataaaaataacctcaataacaagaagggatacttattgaacccttattggaaccagagaccatgtcaggcactctgtatgtttgttccctaattcatttctttttttaagtaacaaataccctggaagctcccttaattcttgcaattaccctttgaagtatgtatgttttacagattaaaaaacaacaacatggctgggtgcagtggctcacgcctgtaatcccagcactttgggaggctgaggcggatggattacgaggtcaggagattgagaccatcctggctaacagagtgaaacaccgtctctactaaaaatacaaaaaattagctggttgtggtggcacatacctgtagtttcagctattcgggatgctgaggcaggagaatcacttgaacccgggaggcggaggttgcagtgagccaagatcgtaccactgcacttcagcctaggcaacagagcgagactccatctcaacaacaaagctcagagaggtttaataagtctctcagggtcactcttcaactaagagcagagttgggatttaaacctggttccaaccaggtgcagtggctcacacacgtaatcccaacactttgggaggctgaggcagtcagattacctgaggtcaggagtttgagaccagcctggccaatatggtgaaaccccatctctactaaaaatacaaaaattagtcaggcgtggtggcatgcacctggagtcccaactatttgggaggctgaggcaggataatcgcttgaacccaggagaaggaggttgcagtaagccaagatcgcgccactgcactccagcctgggcgacagagcaagactccatctcaaaaaaataaataaataggccgggagcagtggctcacgcctataatcccaccactttgggaggccaaggcgggtggatcacgaggtcaggagatcaagaccatcctggctaacacggtgaaatcctgtctctactcaaaatacaaaaaattagccgggcgtggtggcgggtgcctgtagtcccagctactcaggaggctgaggcaggagaatggtatgaacctgggaggcggagcttgcagtgagccgagatcgcgccactgcactccagcctgggtgacagagcgagactccgtctcaaaaaattaaaaaataaataaataaataaacaaaaaataaaaacctggttcggtgtgactccagaggtccttctctgagccttgctgcttgctacattattacactttgaatccattcctgtggcttacacaaatgaaccagggagaagagaaaagcatgctgtccaagaagcatagatgggtgtgcatgtgtgtgtgtgcacgtgtgtatgtatatgtgtgtgtgcatgtatgtggatcgatccattgcaagagaggatacttctaatgcactgtgcttatgtgaaaggaaaaaggaagtatccagtgctctgggtctgaactcttcaccagctctcaacctgtatacccagggaaagtgacaaagaatagggtcatgactaacagcctgccacattatgactctgatccctgaaaccccttctgtgttcctcccagtgtcattggcacccccttctatgtgatggagtactgcccaggtctcatctacaaagacccttccctgccaggcttggagcccagccacagacgagccatatacactgccatgaacacagtcctgtgcaaaattcacagtgtggatctgcaggctgtgggacttgaagactatgggaagcaaggtgagcaggaggccacgtctcccatgctggttgtttcatcactagtgcttctgcttttaggatctgaatcgttttgggtcgttttgagtattagcacaccaagcgtaaggcagacttagcttcttccttggaaatccagtttagttttaatggaggtgttgctgacttaggcatttgggccttcaataaatccctttatgaactacacagtctttcttccctgcaacttttttttttcattttttctttttttcccttaaatattctgctatccaattccctgcaacttttatctcactagaccatttaaattttttttctgatactgaccataggtatttaaaatgtatttttctccgttttttaccctttcccctaaatattcttttcaacaggaatatatgtattttttgagatgggggtctcactgtgttgcccaggctggtctcaaacttctgggctcaagccatcctcctgtctcagcctcccaagtagttgggactctgggcatgtgccaccgtgtccagtttcaacagggatagtttttttgtttgtttgttttttgagacagggtctctctctgtcgcccacactggagtgtagtggtgtgatctcggctcactgcagcctcaacctcttgggctcaagcaatcctcctgcctctccctcttgagtagctgggactacaggtacgcaccaccatgcccagctaatttttgtatttttagcagagacaggtttttgccacattgcccaggctctacccaaactcctgcgctcaagtgatttggcctcccaaagtgttgggattacaggcatgagcctctgcagccagccctcatgtagttcttaccacatgccaagaatagttctaagggctttacatattttattctcccaacagctctatgaggaccatctcaagatgaggaaactaaagcatagagatgttaagtaacctgcctgagatcacagagctagagaacaacagagctgggtttcatagcctggcagtctggctccagggttcatgtgctcagctaaccactgttgtttagccaaaaagtgatttatgaaaggctattaggaagcacagaagatctttttttttgagatggagttttgctcttgtcacccaggctggagtgcaatggcgcaatctcggctcacttcaacctccgcctcctgggttcaagcgattttcctgcctcagcctcccaagtagctgggatgacaggcacccaccaccacacctggctaatttttgtatttttcagtagagatgcgctttcgccatgttggacaggccagtctcgaactcctgacctcctgcctgcgttggcctcccaaagtgctgggattacaggtgtgagccaccatggccggccacaaggtctttaagaggaccagagatcatacttggagaccatatagctaggaacagcacccagaccacactaatccagccaaagagctggtgacttccaccttggggcagcaggagcatcatgtgggaaattctccagtcataggaacgtgttcaaagacactgcaccacccagtgcagagcatgacaaagggtttcactgcactggtttttttttccgctactttcagaggttgctgaaattgcacaccaagttctaatcctatttcccgcaggggactatattccacgccaggtacgaacctgggttaagcagtatcgagcttccgaaactagcaccatcccagccatggagaggctgatcgaatggctgcccctccatcttccccgtcagcagaggaccacagtggtgcacggggacttcaggtagatgtggtggcagggagagctgaaaaatgacagcaaggatgctccaagggggaattgagcaattggtcttggtgcaatttacagctgggaattattcctattacaaagcacctgtctgtgtgtggccttttcaggcagggtttctcagctctggcactgtgacatgttgaattggataagtttttgtggtgggagctactgtgcattgcaggatgtcaggcatcatccctggcctcaacccactcgatgacagtagcacccctccccacagagtgtgacaaccaaaaatcttcgcagacctggtccagtgttcccagggagggcagcattcctctgttgagacccactgtttgaaagtaaggcagagtctatggccataccaccctgaacaggcccgatctcatctgaaagtaaggcagagtgagggtgccactcacctcccaagaggcctggggatggacattctcactgggtgtaatgaaaggattgaaagagagtgacagggtctctgggggtatgtgatgagtctgtagcacggctaaaatgggaacttcagtatgcctggcgtctggcggcagtgtctagctttatcttatcatctcttgctgtgaaaactgcccgttaggtacttttatagggtagtgtttatagtgttttctgcttcgcagcacctggagacctgcttttgatgcaagcatgccttatttggcttgtcttcttgcccatctggggactcaggccttttattaaacaagactagacagtgaaggctaattttaaagacatttccgtttcttttttttttttttttagacatcgtctcactcagtcgcccaggctggagtgcagtggcgtgatctcagctcactgcctaccccacctcctgggttcaagcaattctcccgccccagcctcccgagcagctgggattacaggtgtgcaccaccatgtgtggctaacttttgtatttttggtaatccaaaaatacaatacatttttagtaatacaaaaatgtgagatggggtttcatcatattgatcaggctggtctcaaactcctgccctcaagtgatctgcccactttggcctcccagagtgctgggattataggcatgagccaccatgcccagccttaaagacatttctttgccttccaaatttgattggcctctcttcattggcttgaccggtgtccctcgctcccggcttcttccgttagccagccacctttggggatccccctgggtctgagagtggacagctgagctttctttgtcatgtggtcatcacgggagcttgaggaacctgcttctgcatcagagactgatggggccaagtgcttcccccacactgccttgaacgtggcatgcagttgggctgcatttgaccccctcctccatcttctttctccacttgggattctagagcacttgcctgacaacactttccttgccagccattgccatgtatttcctttggcggggaagacctcaggtggcctttgtgtcaccagcccacaacagctgctccgtggaccttgtctttgcttctcttggcacctcaacaatccacgaatgtgatcaagtatacagcaggcaggagatatccagtgcagtctgagcaccccctcccctagctatagtgaagtatgatgatcatttaggatgttgcctccaggaaaggcatcctctgattttagagagcgtgctgctgcttattgatcaacacagtcagagatagttctgtcttttgatggatagaagaacatttcttgctagtggagtgaatcagcggtggtgggagcataaactgctgcagctactttgaaaagtagtaggcagtggccaggcacggtgactcaagcgtgtaatcccagcactttgggaggcgaaagcgggcagatcacttgaggtcaggagttcgagaccagcctggccaacatgccaaaatcccatgtctattaaaaatataaaaattacctgagtgtggtggtgcccctgtaatcccagctactcgggagggtgaggcaggagaatcacttgaacccgggaggcagaggttgcagtgagccaagaccgcaccactgcactccagcctgggtgacagagtgagactccatctcaaaaaacaacaaaaaaagaaaagtaatgggcagtaacatggaagatgggaatatgctacaacccatcgtttcttgtaaagaagcatctgctgcagctttgcaccaagagactcaggtgaagatgtttgttttggtcatgcttgtaattataatacatgataaataaagtgtagtttggccatatgttggaattctatttagtgagtaaaataaaccaatttgctgtacataagtcataagtctcaaaaaagataatcgaagtagaaaaaagtttcaaaagggtaatatatcatttatgaaaatttaaaaataattgaaagaacactatatgtggtatataggtacaggtatagataagagaaatatagaaatgtctgagactgatatataccaacttcagggtagcagtaaatctcatttttaaaaaatctgaagcaaatgtaacaaaaaagcacgtacaatatctgttaaatctggaaggtggacacatgagttctgtcattatgtcattctctgtatttttctgcatgcttgatgtttactttttcttttaaataaagcatgcattacagacagccctggcaggaaacagaaagcatgaaagaggctatctggggagagttcaatatagggttatttagttcaatatagcgtggtttagaggaaccgctgaagaacagcgtggagtcccggggccagtaacagtgaggggtcagtctgacagggcaagcatgtgctgtggttattgctactctacaacaaactttgtcagaactgagtggctgtcaacaacgacagcagtcattttgcttatgaatctttgcagtctggggacaggacagcttatttcaaagtagggcggctgtcgggtggggctggatcttctgaagacttgctagcatgctggccctgggcagagaagatattaacagccgggctccttgggcctctctttctgtctctttgtggttcccacatggtctctccagcatggcaacttctgggtaactggactttttttttttgagacaggatcttgcactgtcacccaggctggagtgtagtggcaattcataggctggaacataactcactgcagccaccaactcctgggctcagtgatgctcccaccttagcctcctgagtagctgggactacaggcgtgcactaccacgctcagctaatttttaaatttttttttgtagagataggatcttgttatgttgcccgggctggtcttgaactcctgagcttaagcagtcctccgaaaatgtggggattacaggcatgaaccattgctctcagccctggacttcttacctgggggctcagggctccaaaatagtgtgtttcaagagacagagggctgggcagaagctgtatcacgttttctgacctagtctagtttcaggaatccctcagcatcacttccacgtgtcttatatctgttagaagcaagatgcttcactgggccaagcattagactctaccttttgtgggaggagtgtcaaaggatttacagatctgttttaaaaccatcacagggagggagtaattcccggaacccagagaggctagctctctggggaaggctgcagagaaggagctggggaaataaataaccaggccctttcccatctcctgcttttgattggctgagtccagctggaagccagagggcaagggagcctttggagcacacagcccagggagctcaggcacccgggcacagaggggatgggagggtggggagccaagcctaaagggcaaacagaccacgcagaatccaccctagccggcagttttcttagtgctgtctctattcctcctgcgacttttcaggctcgacaacctggtgtttcatccagaagagccagaggtgcttgctgtccttgactgggaactttctaccttgggcgacccccttgctgatgtggcctacagctgcctggctcattacctgccatccagttttcccgtgctgagaggtaggaactgctgctggaggatagtgggggagcaagccagttctccaagcatttgggagcaaactcagctgaagtagtccgtgattgggcgggggaagtgaaagtgaggtcctggtggttctggtgggaaacataactagaatgcagtcctgtcacatttacgggaaagtggatataggatgtgttttaagtgaaaagtatgcctgtataggtaccgcttatgcttttacacagctaacttctatttagggttttaaattaaaaacacattcattgtggctgggtgtggtgtctcatgcctgtaatcccagcacgttgggaggccaaggcgggtggatcacaaggtcaggagttccagaccagcctggccaacatggtgaaccctgtctctactaaaaatacaaaattagctggacgtggtggcgtgtgcctgtaaccccagctactcgggaggctgaggcaggagaattgtttgaacctgggaggcagaggttgcagtcagctgagatcatgccattgcactccagcctgggcaacagggcgagactccatctcaaaaaaaacaaaaacaaaccacatttattgtgaaaatactagagccaacagatagcaacaacaacaaaacagttaaaatcattagtagtcccagagataaccatttgctgacatttcagtatctatccatgtcatcttttcttctgtgtgtatatgtacatttcctaaaacaaaacaaaaatgtaacatgatctaatggcatgctttttttcacttcattgtatactgtagacatgttttcatgacattaagtatttcttctatagcataatttttaatgagagcatataattttattgtatagaattaagggaagacggccgggcgcggtggcccacgcctgtaatcccagcactttgggaggccgagacgggtggatcacgaggtcaggagatcgagaccatcctggctaacatggtgaaaccccgtctctactaaaaatacaaaaaaattagctgggcgtggtggtgggcacctgtagtcccagctactcaggaggctgaggcaggagaatggtgtgaacccgggaggcggagcttgcaatgagctgagatggcgccactgcactcgagcctaggcaacagagcaagactccatctcaaaaaaaaaaaaagaattaagggaagacatttgggttaattcctatttagatatttaatttgtttccaattttttagtattacttcccctacttccatgaaaaaaaggcagtgaacatccttgtagtaatatatttgcctatatataaggtatactcctaagattaatacctaggaatggaatatattacatgcttctaaatcatgaaaatgtcacaactggaggaaataagtgaattttttttttttttgagacggagtctcgctctgttgcccaggctagagtgcagtggcgcgatctcagctcactgcaagctccacctcccaggttcacaccattctcctgcctcagcctcctaagtagctgggactacaggcacccaccaccacgcccggctaaatttttgtttttgtagtagacatggggtttcaccgtgttagccaggatggtctcgatctcctgacctcatgatccgcccgccttggcctcccaaagtgctaggattacaggcgtgagccactgcgcctggcccgtgaaattattttatttgctataattatcattttcataatttggtgagatctttttatttttatatttatttatttatttgtttatttgtttatttatttttgagatggagtctccctctgtcactcgttttatttatttttgagatggagtctcactctgtcgcccaggctggaccacagtggcgcaatctcggctcactgcaacctctgcctcccgggttcaagcgattctccggcctcggcctcctgagtagctgggattacaggcgtgtgccacaatgtctggctaatttttgtattttcagtagagacagggtcttcaccatgttggccaggctggtgtcgacctcctgacctcaaatgatctgccctcctcggcctcctaaagtgctgggattagaggcatgagccactgcacccagccaattgtttttttttttttttttttgagatggagtcttgctctgtcacccaggctggagtgcagtggcgtgatctcagctcactgcaacctctgcctcctggattcatgcaattctcctgtctcagcctccctcccaggtagctgggattacaggtgcacgccaccatgcctggctaatttttgtatttttagtagagacagggtttcaccatattggtcaggccggtcttgaactcctgacctcaggtgatccacctaactcggcctcccaaagtgctgggattacaggcatgagccactgtgctcgacctgagatcgctctttccatatcatttttgatcaaatgactggttgaagataatatgcatccacccttaactgtggccagatggaattggaagctcccattccttcctttactgccagttgagtctgaaacctgtaagagccaatttgtgaataatgacttcatgcctggatccccagccatctaagggagcaagagccaatgcaggaataagctaacccatggaactggtcgtgaaactaatttgcaagggacatggcgattttcagaatttaaatatttgccagccacaggggcgtgtcacgtcagtgactacccatgaatggctctgtctttctcgcaggtattaatgactgtgacttgacacagctgggaatccctgctgcagaggagtatttcaggatgtactgtctccaaatggggctccctcccactgagaactggaacttctatatggctttttcctttttccgtgtggctgcaatcctacagggagtctacaagcgatcactcacaggtaatgggatggctgccctgaagagccactgcggggtgagtcacagcaaggaccgtgcctccacctggaaaccctctcagggccacagaggctttggagagaccgatttggccaggattctctgaggttcagttaatctaaccatttgtccataaatattttctttacaatatttatttatttattatttgtttttgagacagggtcttgctttgtcaccctggctggagtccagtggtttgatcctggctcactgtaatctctaccttctgggttcaagcgattctcctgcctcagcctccagggtagctgggactacaggcctgcgccaccacgcctggctaatttttttttgtatttttagtagagatgaagtttcaccatgttggccaagctggtctcgaactccgggcctcaagtgatccgtctgccttggcctcccaaagtgctgggattacaggtgtgagccaccatgcccagcctctttacaatatttaaacttgttttttaattattaaagtaatgcacaaagaaatttttccagttaaagcattcatgcacatgatcaaaatttggtcatatagaattatgtaaaattgtatctcacccttttcaacaccattcctcaaagataaatgttactgttaagagtttcctgggccctccagtttttctgtttatctgtcttctctctctcctcctacttttacacaaatgtgatcatcctatgtgtatttttcggtactttgattttaaaattttgtaagcttaagaatttctgtgaaatatgtgtgtgaccatttgcatatttaacaactatatgaggcaaatttcttggtgtgtgtgtgtgtgtgtgtgtgtgtgttgagacagtttctcactctgtcgcccaggctggagtgcagtggtgcgatcttggttcactgcaacctccacctcaccagctcaagcaattctcatgcctcagcctcccaagaagctgggattataggcacataccaccatacccgcgtcatttttttgtttgtttttagtagagatggggttttgccatgttggccaggctggtttcgaactcctgacctcagatgatccatccacctcggcctcccaaagtgctgggattacaggcatgagccactgagcccggccagtccccaagtctttaggtaaaacccctgtggtctttgacaacttccttgctcgctagtatgacaaaatgttccaggttcatcttgtctatccagcctacccaacatggtgaaactgtgtctctactaaaaatacaaaaattagccaggcatggtggcgggtgcctgtaatcccagctacttgggagactgaggcaggagactcacttgaacctgggacggggaggttgcagtgagccgagatcgtgccactacactccagcctgggcgacaagaatgagactctgtctcaaaaaaaaaaaaaaaaaaagacttgggagccaacctgaacaggctcccacttgctaacaataggaaactttgggcatcaccaaggatgatagctgaaatggatgaaacacatcaggtatgtttaaatccatgagtagtagccgggcatggtggctcaggcctgtaatcccagcactttgggaggccaaggtgagcagatcacttgaggttagggattcaagaccagcctggccaacatggtgaaaccacatctctactaaaaatacaaaaattagccaggtgtgatggcgggcgcctaaaatcccagctactcaggggactgaggcaggagagagaatcacttgaacccagggggcagaggttgcagtgagctgagatcgcgcctgtgcactgcagcctgggtgactgagcaagacactgtccccccaaaaataaaaattaaataaataagtccatgagtagtgatacaaaaacaaagagacaaagtctcattgatgacctcagaggttgccaggaaagcaacttattattctgaaaattggaaaatggggtgggggggtggggaatcaagcatttgtcctgtctttcctgtacaaatgatactgcaggctatccaaataatcaatgagggaatgtttctctctagagaagtatcctggacagaataatatagaatttgcatatcaccaatttgcaactcctaatgcattaatggatgtgggcaataagcttcaatgaaagccaacaccactgagagacagacagccagacattatatacctcctgatgcttccctcaaaagttacactgactctgcccaggtctccagtgctagctgccaactcatgggaaacacagggttcagagggacatgttcagcagcaccctgggcacagcactcacaaaatccagattctggaaaacatcacagggcaaacaactcagtttcttcaaacacttacatttcaaggggaggaaaagggtgaaaaaggaacctgtagattgagagagacttaaaagaaacatcaggctgggcgtggtggctcacgcctgtaatcccagcactgtgggaaaccgaggtgggtggatcacctgaggtcaggagtttgagaccagcctggccaacatggggaaaccctgtctctactaaaaaatataaaaattagccaggcctggtggcgggcacctgtaatcccagctactcgggaggctgagataggagaattgcttgaacccaggaggcggaggttgcggcgagccatgattgcatcaccgcagtctagcctgggcaacaaagtgagactgtctcagaaaaaaaaaaggtggggggagcggggagagacttaaaagatacgttagccagttacagtgttgggaccttatttggatcctttcttgaacaaattatttggaaaaaattttgatgatagtcactgaaacttgaattctgagtggatagtcgatgatatgaagaagttaacagttaacgattttttaagggtaataatagtattgtgggttttttaaaaaacatttgtttttagagttttgaaagaatcctagatgagatatttgggatttactccaaaaaatccaggacagtgggagtggggatggcagggaatgaaaccagactgggctggcatcgatcattgcggaaggcgagcagtagaacccgtaggcttgttattctctcctctctactcctgtgtgtctttgaaattttccaaaaggaggccagtcatgatggctcacgccggtaatcctagcacactgggaggccgaagtaggtggatcacctgaggtcgggagtttgagacccctggccaacatggtgaaaccccgtctccactaaaaatacaaaaattgcctgggtgtggtgatgccgcctataatcccagctacatgggaggctgaggcaggagaatcacttgaacccgggaggcagaggttgcagtgagcagagatcgtgccactacactccagcctgggtgacagagcaagactccatctcaaaaaaaaaaaaaaaaaggccaggtgcggtggctcatgcctgtaatcccagcactttgagaggccgaggcggggggatcacgaggtcaggagatcaagaccatcctggccaacatgatgaaaccccgtctctactaaaaatacaaaaattagctgggcttggtggtgtgtgcctgtaatcccagctactaggtgtctgtaatcccagctaactagggaggctgaggcagatgaatagcttgaaccagggagtcagaggttgcagtgagccgagattgcttcactgttcactccagcctggtgacagagcgagactccatctcaaaaaaaaaaaaaaaaaaaagaaaagaaaaagaaattttccaaaagcaaaacttaaaaacaaaaggcaaggagaaagaaggagaaaggaattcatcatgggatttgctagtgctgatggagtgtttagctttgcagtcagtgacaccccaagcttgctggcagcctgtgttctcagccaggttgccagagtcttctgagagaagcagttgcagtaggggaattgatcattcattcccaagtatatgagcctctactaaaagccagcactgtgctaggtggtcctggagatacacagtcatgagaaaaactgtccggagaaaaaccagtacccagagaatttctagtttaactgtacctggtctgataagcaggggatgctggaagcaggaatttctggaaacaatattttccctcttttaggaaaatacagtatcagctgtaagccactatttcccattttttttatagttttccaataaacactaaccagaaatatttacttaaacagaatggctgctaagtccttatggtgatgaatagtcctggtcacctctgatatttcctagccggctgccaagttttctccctgctctgctccagtgacctgggaaaagcttaatagactgcccattttagagtctccacactgagtgtcctcagcctgtctctcaggaagccctttgacatgtttttaagatcctgtgagccatcgttgtggcttctggtttctctcggcccagagctaaaacaccccacctgtttgccaccagacagaaaaatgtctgtttgttcaggcctttattcctcttatcttactgtgcactcctttccctccctctgggaagccagccagacacactgaggaaatggcttagttttctcatgtaaaaacaacaaaatccattttttgaaagaataatataaaaacgtatgatgaatggggaaaaaaccaactatacaaacataaatattacttctgtacatttgtcttctacaattagctttaaaatcatttttgtttgaacagctgagatatttggtactggccaggaaaactggagcttagagaaggggtatctgtttccaagacattctctctatggtgtcatttacaaaagacttcaaatcagcattagattgggaaggggatgagagagaccagagcccagtgagcagaagattaacagtatgtacctgcccagcccatgtgtccttctccttccttaataagtgggtgcagaaattagatttctggtagatggccactgaaattctataaagtgcttatgactgcaagttaagtggacaccagtgatgtggtctcttctgctggaactacattttggaaaatataccagaagcaatagatctaaatcaatccaagcttatacaagtgacttttttcagggacaaagtagcagtctcagagtgggagccaaccaaatagaagaaaattaagaatacacctcttactctgttagaagaagaaaatccttatgaataataaggaacataagggagtatctttcccttcaatgtgctgtgtgcagtccgaggaataaggaataagcccccactgtgtgtctgcaaggaagaggctatctggtttctgactgacttccctgggttaggttcatacctagcacccagaaggtcctcagtagagacctattgaggtccagtaggctaactctctgcagggtagcaaagaatttgctctgagtttgttcctaactctgtaaggaatagtttaaactatctttaacaccaaagctgcatgaaaatggctgtctcagctgggcatggtggctcatgcctgtaatcccagcagtttggtagactgagacaggaggattgtttgaggccagaagttcgagaccagtttgggcaacgtagtaaggccccatctcttatttaaaaataaataaaatatttatttttttgagacggaattttgctcttgtcacccaggctggagtgcaatggcatgatctcggcccacggcaacctccacctcctgggttcaagcgattctcctgcctcagcctccccggtagctaagattacaggcgtgcatcaccacacctggctaaattttgtacttttagtagagacagggtttcaccatgttgcccaggctggtctcgaactgacctccagtaatccacccacctcagcctcccaaagtgctggggttacaggcgtgagccaaagcacccagcctaaaatgaaatcatttaaaaaaagaaaatggctgtctctttagaactatcaatttatccatttattgggtacagtctcttggggacatggaagtgctagaagtaatccaggagagctggctgtgaaaaagttcactgtgaggagacattgtacacatagcaatctggatgtgtctcagatgcagggctcagagtgatggaggccatactgaaaaggccacatgctgagtgacatatgtatttatgggacatcctggaagagacagactacagaaacagagatcagtgggtgctggggatcaggggggcaggggttgagtacaaaagtacactggggaaatttccagatgatggaaatattctgtttttttttttttttttgaaatggagtctcgctctgttgcccaggcaacctccgcctctcgggttcaagtgattctcctacctcaggctcccaagtagctgggactacaggcatgtgccaccatgcctggctaatttttgtatttttagtagagacaggtttcaccatgttgaccaggctggtctcaaactcctgacctccggtgatccacccgcctcagcctccaaagtgctgagattacaggtgtgagccattgcgcctggccgaagtattctgtatcttgatggcaatggtagttacccaactatggatttgttaagacttgcagagttctacattaaggaggtgtatgtacaccactcctcaatttttttatttttatttatttatttttttgagatgggtgcctcactctctcccaggctggagtgcaatggcacgatctcggctcactgcaacctctgcctcccaggttcaagcgattctcatgccttagcctcctgagtagctgagattacaggcacacaccaccatgcctggctaatttttgtatttttagtagagatgggggtttctccatgttggccagcctggtcttgaactcccgacctcaagtgatccgcccacctcagcctcccaaagtgctgagattacaggtgtgagccaccgcacctggccaccttaattttttttaatggggaaaaatatgtttgtaaaaaaagtcttgatgcacattttacaagaagaaagagacgctgtgagagccaaatagtgagctgagtgatgctggtgttgattccctccagagacagtggtgtctagaagttggctcttcctttagtcagttgtggcattgctgttatcaattttgtagcaagggtggtctaggatgcaggacttcttatagcccactggcaacggcagaggtgatctggggtgttactgattaaatgtagtcttttaggaaagcagagatcaagagcagggagcaggcagacctaagttggactctggcccccagccccctaacttccagctcgtccaagtcacctccttctctaagactcagttttcttgcgtgcaaagtgcaggtgaaagcagttgtattgctttggggattcagtgagctatagtggctcttagcacagtgtttggtacttagcaagtgctcagcaaatggcaatagctgctgaagtgacagtgtcatcacatgttaacatccctatgatgggtcgtgtgggagtaatcactgtttttctttgattctgcttagggcaagcaagctccacatatgcggaacaaactggaaagctgaccgaatttgtgtctaacctggcgtgggatttcgcagtcaaagaagggttccgggttttcaaagagatgcccttcacaaatccgttaacaaggtcctaccacacgtgggccaggccccagtcccagtggtgccccacaggcagcaggagttatagctccgttccagaagcttccccagctcatacctcaaggggaggtctggttatctctccagagagcctctctccacctgtcagagagctgtatcaccggctgaagcacttcatggagcaacgtgtgtaccctgcagagccagagctgcagagtcaccaggcctcagcagccaggtggagcccctccccactgatcgaagacctcaaggtaaagcagccatggtgaggtggtaagaccccaataccatggcataccctccccgaccccaccgggctcacctgaaccatcccaggcagtgaagatacaggagctccgagttgaatgatctttgcttccatcgtctcagaaagagccagctcttcatgactcagtttccatctcttgctcttgctgtgcctgtgtcacaggcagatggctcaggtgtgactgcacagcccaggcagtggaatgcttggccttagaaagccagggcaggttaggcctatctgatgggtatttgaattatgtaaatttgaaacagtgctgtatcagctaataaatctctctctagagaacccgtaatatcacagctagagggccagatccactgtgagctgagtttctgtgttgtctcccagtgctgtcacttcagctgataaacagaaacacccgctgttccttatcacgtgaaccttggattgtgttagttttgaaattacttgagatcttcaggagcataatgcaatcatcatctacttttctttttttctctttttttttgagacggagtcttgctctgtgcaacttccgcctcccaggttcaagcgattctcctgcctcagcctcccgagtaactgggattataggcacgtgccaccatgcccagctaatttttgtatttttaatggagatggagtttcaccatgttgttcaggctggtcttgaactcctgactttgtgatccgcccgcctcggcctcccaaagtgctgggattacaggcgtgagccaccatctctctcttttttttttttttttttttttttgagacagggtctcgctttgtcacccagggtggaatgcagtggtgtggtcatagctcactgcagtctcaacctcctgggctcatgtgatcctcccacttcagcctcctgtgtagctgggaccacaggcacagccaccatgcccagctcctcatatcatttttttgggcacacgtgcatgtttggttgtctgccttgtttcctccaatccctttcattgttttccacggttcaaaataaaatgaaatcttccactgtggtttcctgacttattttccccatgataggagaaagccaaagctgaaggactttggaaccttttcctacccttagaggctgatcccgagaaaaaatacggagcaggactgaccaatgtggaatatgcacatctgtgtgagctcatgggcacgtccctgtatgcccccgaggtaccttctttaaagttttcctcagtgtgtgggaacatcctgatcttcataagaactcaatcctaaacagataaaccagattcagaagcactggcatgaacttgaacttttttttttttttgagatggagtctcgctctgtcacccaggctggagtgtagtggcgaaatcttggcgcactgcaacccctgcctcctgggttcaagtggttctcctgcctcagcttcccaagtagctgggactacaggcatgtgccaccacacctggctaatttttgtatttttagtagatacagggttttaccatgttggccagactggtctcaaactcctgacctcaggtgatccacctaccctggccccacaaagtgctgggattacaggcgtgagccaccatgcccatccaatttgaagcttgaaatattaatgtgagaaggccaggcatggtggctcacacctgtaatcccggtacttttggaggccgaagtgtgggggatcacttgaggccaggagttcgacaccagcgtgtgcaacatagaactctgtatgtacaaaaaaataaaaaattaatcgggtgtgatggtgcatacctgtagtctcagctgcttgggaagctgaggcatgggaggatggcttgagctgaggaagtcgaggctgcagtgagccatgatcgtgccacgatactccagcctgggtgacagagcttgactctgttttttttagaagaggacatgacagtcatggtcacgctccttttccttctcaggtatgtaactgctctgcgcctgacacgggcaacatggagctgctggtgaggtatggcaccgaagcgcagaaggctcgctggctgattcctctgctggaggggaaagcccgctcctgttttgctatgaccgagccccaggtacgtcgcctgggctgccacccacttgcctggccctgttgttgtcggccccacagggaacacgggctgtctgctggcgtctctgactggaatatgctccccactcaggttgcctcttcagatgccaccaacattgaggcttccatcagagaggaggacagcttctatgtcataaacggtcacaaatggtggatcacaggtatttggcctaaaatgcactttccaaatgcacatcagggagtctgtgctgttaggcgcgtctctcaatgcctgggaggagcctctgctttttcaagttgacacaaaggagattctgtcacttagcgcccccagcagaggcagctgggagaataggagggtaatccgtggagcacactgttctcagaggtggcacttcacagggcagggacgtcccccggtgcccacacatggacggatgcctccctgcacatgtgaccccaggaatctctccacttcctgctgttcattctgctttgggcagctccccttccttggtggcttcctggctcctcgatcaggtgtgttacatcctaagggctaatgacaatcctgacttttagggattgtccagtgttacttttgcagggcccctacaagtagccgtggagcttacctcccggagcccatacctccctggacattaagaatgagcatccccattttgcaaaggaggaaaccgcactcagacttaggtcccttgcctggggtatgagcccccagccagcaagtagagaacccagagtcaaaggttcacctgattccaaggcccgggcccagagccgttatgtgtgcaccacctgtgggagccgagccagctggcagggatcaagtagcggttttcatcctcttgtctctaaattatattttctactctatgtgatgcttttaaaaacttgctcttatgatgttggattcattcctcactgggacaaaacccaatttgctcttatttctggtcagcagtctgcagatgctcatctgattacatggagccttaaagagctctgtctgcttccttactgtgcctttcttgggccaggaccacgtgtgtagagatttgatggccctggtgtcagatgatggggtctgtctctctcctttcctggcaggcatcctggatcctcgttgccaactctgtgtgtttatgggaaaaacagacccacatgcaccaagacaccggcagcagtctgtgctcttggttcccatggataccccagggataaaaatcatccggcctctgacggtgtatggactggaagatgcaccaggtgagacctccaggggcgggtcacccctgggtgtgggtctggtccccaggaaacaccactgaggggcccctgctcttgttcaggacttgccacatcccacgtctgagggtatgatgacatttggagtcacatgctcctgcatttcatttccatacatgaatatcaaccatgcaggcggatttcagacaggcatttatggatttttttccctcttctaaacttagaaagtaatcaggagtctgtgacacaggaagccatacagggcagacgcaggaagtggaccccaaacctactcttccaggccccagtgtgaacagctgacctctaggccacagccctggtttggtccgctcccagtttggttctctgctaatagtgttcacatttttactttcagtgttttcataggatcactacattgtcacaaaccactaggagcttcagcttaaggtggcattattatgtttttataaaaggaatcacagaatagtcatttgccattataaatcagtgattcattttctgtgtttaacaggctgtttcctgccgtccttttccctttaaccatgtcccagtaagaaggctaaataaagggcagggacattgccagcagataacccagactgaggtgaggaataaacacatccaaggaaaatgactatggctattgctcacagtgatcgtttgggtctttcaggtggccatggtgaagtccgatttgagcacgtgcgtgtgcccaaagagaacatggtcctgggccctggccgaggctttgagatcgcccagggcagactgggccccggcaggatccatcactgcatgaggctgatcgggttctcagagagggccctggcactcatgaaggcccgcgtgagtgctttcccccgcacccagcactgactcagaaccaccaccttctgctttgctgtcggacttcaattcctacctgttttctgagtgcagtcctagcaggtgaagcaaggtgatgtccttgccaagaagttgcattcctgtctgctttgcatctgctactttgctgcagtttggattcagagcagaatggaccccactctgtcgaggtgacctgaagggaaacgccaggctctgtagcagcagaggcaaggttccaaggtgtaaaggtcatgctgctagcacattattaaaaatcagtctgggtgcaatggctcacagctataatcccagtactttgggaggtctaggtaggagggttgcttgaagccaagcatttgagaccagcctaggcgaaaaagagagactcagtctctacaaaaaaaaaaaaaattttttttttttttttgagatggagtcttgctctgtcaccaggctggagttcagtggtgtgatctcggctcactgcaacctccacctcccgggttcaagcaattctcctgccttagcctcccaagtagttgggactacaggcacgtgccaccacgcccagctaatttttgtatttttagtagagacagggtttcaccatgttggccaggaaggtctcgatcccttgacctcgtgatctgcccgcctcgggctcccaaaatgctgggattacaggtgtgagccaccgtgcccggcaaaaaaaagaaaaagttttttttgttttttttttttttgagacggaatctcactctgttgcctaggctggagtgcagtggcgcgatcttggctcactgcaacctctgcctactgggttcacaccattctcttgcctcagcctcccgagtagctgggactacaggcacccgccaccatgcctggctaattttttgtatttttagtagagatggggtttcaccatgttagccaggatggtttcgatctcaccgtgttagccaggatggtctcgatctcctgacctcatgatccgcccacctcagcctcccaatgtgctgggattaccggcgtgagccaccgtgcctggccaaaaagaaaaagttttaagtgccaggcatggtagcatgtgtctctagtcccagctactcaggaggctgaggcagaaggatcgcttgagcccaggagtttagggctgcagtgagcagtgatcacaccactgcactccagcctgggtgacagagtgagaccctgtctctttaaaaataaataaataaataaaaatcagacaccagggagatcccatgttgcttgtttttgtccctaggcttccatcatctggcctgtaccaccctcctccacagcacatccagaaaactttattcggccataatcctaccacccccaaagtttggaaacctaggttaaaagacagctgcttccaggacaggaattcaaattggtgattatcaatttcagaaaggtgacgcaaaccctgagaccaaaaccagtgtctcacaagaactgctattgaaagaacagaggcagtctgaattttttattaccgagcaaacctgtgatttacacccttttgagttaagactgaccagttattttttctttctaagtaaaacgctcctgtctatggactcaggtatggtgcttcagccccacatggaattaaattcagccttctggcagaataattggactgaatgagtcagacagaagtctccagaaagtgcatagcatgaacatggcacctccactgaagacttggttggagtaattaggaatctacaaaagatttgctacaaggaggttcaccacagtgcttattgaaatagcaaaattctgaacaacctataaggctaacaatgactgttggccaaataaaacacaagatggcatacagtgagactttaaatgatgctgtggaaatctattccttaacatggagaaattgctcactatatacacttaaatttaaaaaaaaagactgtggccaggtgtggtgacactcccagcactctgagaggccgaggcaggcagattgcttgagcccaggaatttgaaactagcctgggcaatacggcaaaacctcatctctataaaaaataaggctgggcgcggtggctaacgcctgtaatctcagcactttgggaggctgaggtgggcggatcacttcaggttaggagtttaagaccagcctcgccaacatggtgataccccgtctctactaaaaatacagaagttagctgggcatggtggcacatgcctgtaatcccagctacttgggaggctgaggcaggaggatcacttgaatccaggaggcggaggttgcactgagctgagattgcaccactgcactctagccggagtgacaaagcaagactccatctcaaaaaaaaaaattaaaattaaaaaattaaaaatagtagccaggtggggctgggtgtggtggctcatacctgtaattccagcactttgggaggccgaggtgggcagatcacctgaggtcgggagttcgagtccagcctgaccaacatagagaaaccctgtctctactaaaaatataaaattagttggacgtggtggcgcatgcctgtaatcccagctacttgggaggctgaggcaggagaatcgcctgaacccgggaggtggaggttgcggtgagccgagatcgcaccattgcactccagcctgggcaacaagagcgatactctgtctcaaaaaaaaaaaaaaaaagtagccaggtgtggtggcacacatttatagtcctagctactcaggaggctgaggtgggaggatctcctgagcctgggaggtcgaggctgcagcgacctgtgagtgtgccattgcactgcagcctgggtaacagagcaacaccctgtctgggaaaaaaaaaaacaaacaaaaacaggctgttagctttgatgcaaaataatgttttgttgttgttgttgttgttgttgttattgttttaagcaggctggccgggtgctgtggttcatgcctgtaatcccagcactttgagaggccaaggcaggcagatcacctgaggtcaggagttcaagaccagtcaggccaaaattatgaaacaccccatctctattaaaaaaatacaaaaattagccaggtgtggtggcaggcacctgtaatctcagctacttgggaggctgaagcaggagaatcacttgaaccccgggaggcagaggttgcagtgagccgagatcgcgccactgcactccagcctgggcaacaaaagcgaaactctgtctcaaacaaacaaaaaggctacaaaaccatatatagagtgtggctcccgtttttggaaaaaataagtatatataaaaaaactatagaaggatagaggagaatatccaccaaatattaactagtggtgactagatggtgggattctaggtgctcttactgtcttctctttttttgttctgaaaacaggtagtttttctgccatgagataaattatttgtgtagattgtttttagtgaaaaaaaaaaaaaaaaactaggctgggtgtggtggttcatgcctgtaatcccaacacttggggagaccaaggcaggaggattgcctgagtctaagagtttgagaccagtctgggcaatgtagtgagaccctgtctctacaaaaaattggaaagttagctagatgtggtggttcttgcctgtggtcccagctactcaggtggctgaggtaggaagattgcttgagcccgggaggcggaggttgcagtgagccaagatcacgccactgcactccagcctgcgcaacaaagtgagaccccgtctccaaaaaaataataaaaaaaagaaggaaaaagaataaataaaacaagaaaaaaaaaggaatacttagaaccttttctgatgccttgtgactttcagaatttaaaatcccccttgcagataaggccacccacggcggaaggccgggagcgagacggggctgaggggaccttgctcccattggagctgcagggcaggaaggggtgctgcggtcagcagagggcacccttcgcctgcgccgtgtgcagtgcctgcagtcactccctcattcccaggagtagccttgggtcagatgctggctcagatctataactgctcctgtctggtagccaggcctgcccagatgtgcaatggctggaataaagggttcttggaagcaatttgttacaggcaccctgtgggctgtggctggctgtggcacacgtgaaggttgtgtgtcagacctactccctggacatggcgcatggctgcacacaggcaccttggctgagaagatgcacagtcctggtttcactctcctcccctgccctgtcctgtctgcttccacccagctctgcaggccaccagcccccgcctctcgtggccacccccagcccagcatgtcctcagccgcacatctcctgtgtcgacaggtgaagtcccgcttggcttttgggaagcccctggtggagcagggcacagtgctggcggacatcgcgcagtcgcgcgtggagattgagcaggcacggctgctggtgctgagagctgcccacctcatggacctggcaggaaacaaggtaggggcaggggcacgagggggcctcccagaggcagagattcttcctcctcactcagcaaagcatgagagcctggcttcttgacattagaaactttatttcacctctacttggagctgtttgggcagtttttcaaaaattggaaaggcacaagaagagaggactggcctttgtgttttactgacctggtgagctgcttagtccaaggcagtgggtctgatggggccacagggcccctgggtggccctggactcccagggccattggtggaggtgttgggcaacctaagagtaaggcagggaaaagggaccctctgctggccttcatctgaatattgaattaacaaaaatagaagcttattttcaagtgtgacattagtcattcactaaggctctttttaaccttttatttatttattttttgagacagggccttgctctgtagccaggctagaatgcagtggtacatcatggctcactgaagcctcagcctcccaagtagctgggactccaggcgcaaacctccatgcccagctaattctttattttttgtagagaccggctctcaccatgttgcccaggctaactaaggctctttctaagtgcctgtgatgaccaagcacaatgccatgttgaccttgctttgtccagctttctgtggggcagcctccaaccccacccaagaccctcaaccatcagggaccaacccatgctcatgctcacagttcctggttctttgacgctggcgtgctagatatggtggaggctgctgggtgtctcccttgaacaccctgccccagggcagatcactgtagctcggtttcccagagccctgagtggccttggtccactgctgcttggaggcagagctggccgtgaccctgagcaaagcacaggaccctccccttatcccttcagtgtgtgctggctgtgttccccgtcatctgggaagacagccacattctgccagcacttgcttcgcatcttgtgacataagataatagttgccaacatggcgcccttcatccctgggtgctgtcaagccgtacaccaggcaggggcagcctcacccagctcacatcagcgagaccttggggcctctgttttggacggtggtgtttgacttcttgctgggaatctgatcattcttccaggctttctgccttcgggtcttttttgtggtttagtttttcgttttgtttttgagagacagagtctcactcggtggcccaggctggagtagagtggcacaatcttggctcactgcaacctccgcctcccgggttcaagcagctctcttgcctcagtttcccaagtagctgggactacaggtgtgcaccatcacgcccagctaatttttgtattttttagtagagactgggtttcactatatgttggccaggttggtctcaaactcctgacctcaggtgatctgcccgcctcggcctcccaaagtgctggaatcacaggcctgaaccaccgcgcctggcctgttgtttgtttttgagagggggtctcactctgttgtccaggcttgagtgcagtgttgcaatctcagcttaccacagcccccaacttcccagactcaaacaatcctctcacctcagcctcctgagtagctgggactacaagcacatgctaccacaccctgctagtttttgtatttttagtagagatgggggacgggggggcctcactctgccacccaggctgccctcgggtcttttatgatcgcatctcctcctccttacaggctgcagccttggatatagccatgattaaaatggtcgccccgtccatggcctcccgagtgattgatcgtgcgattcaggtgagcacagaccagacagttggcttatttgaaccatcaatactagatgccaaactctcctatcttcagccgcccagcctcccatagaccctggcagatgccctgtgtcacccactcaccatgcatgcaactttccttttcctcttcagaatgacccagcaaggtgggaggtgccatcgtacccccattttgaatgtgaggaaacaggcacagaaaagtgaagtgacttgtccaggtcactgagcttgcaagtagctgacctcaaattcacatgaacttgggttttcataagcccagagcccaggctctttcccatgcaggggggccgcctccttagatcctaacccccggccccagcacagggcagaaggcacctgcagagtgggcctggggagtctggaggccgtgggatggcaggtgtggccccatggaagccctctggaatattagtgattgtatcacataggtgccacagggaagtccgggaagatggttgttatgggccatcaagagcaggctatcattcctggggctctcggagacaagggctgacccagggccgcctccctccactctgtgtctgccaggcctttggagcagcaggcctgagcagcgactacccactggctcagttcttcacctgggcccgagccctgcgctttgccgacggccctgacgaggtgcaccgggccacggtggccaagctagagctgaagcaccgcatttagagccttggggctgcagtggctcaatgtcctggctggtccagctgtgcccagatctgtcactgatgtgcctcgaaagatccggtgtttgtggctcctgcaccctgctcagcagctctgtcccgggacagtcagggtggactcaatctttctggttctccacagaagacgtctctgcaagaagcctggagtctgtttcaggccaggaggaggggatttgctgagggccaagggggttctgggacagagtctggaaagctggtcttcaggctctcagtcccaggctgggcaggcacggtcacttcacttcagcctttcagtccctctctctctgcctgtgggaatctggacacattttgggaggcctcccaaggctgtgggacgtgcttgctctggcagctgcagggttcctgtctggcctccctggtgagcagaggggcggccacggcgggcggtggcctagagacccaggacctgggcgcctgggaaaatggaatgcaacccacattgtaaagccactggcatctgattatctccatttgaacacacagcacagaacaatcatttaaatgttattttggaaaggggttttggggacacagaagaataagtaaacacatctcggaggctttgtggactttctgtgtcatacaaagagaatcgagtggagaggttcccttcagcgccttcatgcctcctcctgcctgtgtttcctcgaggtccaggccatcatctcagccccatacatgctgggagcacagaggccacgggtccgataagtcccgagttggctgccttccctcactatgtagcccggggctctgtgctcatacatactttacccaggagctggcatgtgaggcccctgcagcctccacctgctccatagtcagaatatctgggcgaaggggaggtggtggcccattcgccattacactttggagcacaatctctcttctctgaggagagtggaaatgcttactcacttgcagtctgagctccttgagaaacccagcgacatgcagaggtgagccaggggcagtgaggccccagcctgctcgtctcataactcgtggtggggtagccaaaactcgtctcaggttagaccagacgggcaggaaccatcccccccggctgccaccttgcagaggtgaccctgtgggaactgccttccctgagaatggccagccaggatcagcaccatgaggggcccgtgaatgggctcctcagacccacatgcccaggggtctggggaggcaggtcccccttcaccacacttgagaaactgcttgttgctcaaggaagttaaaccccaaacaaatgcctgtcacaatgacagccacactggccaggagcccactgctaagctggcaggagcgcagcagctgagtgctccctcaggctccgggaggagaggttttcttcaaaaaaaaggaagtggtcgtggcctggcctgtctcatgggcctaagaatgtctttcgtggcctctgaggttaaccttgcctgttcagtaacgcagctgctgagaggaaaatgggagtcaggctgtgggtacccccatatctccctcagatcctctgccttgagggctagagaccccgggggccccaggaatgctgcctgcagacaggcaggtcccccccaggccctccacctctgctagatcattctgcccaccactgtcgagggagcctcagctctgggcccagcaggagtccaggccttggggaatgtgcaagtaaacaaaacaggacaactgctggcctttgggggtttgcatctcaagtaggggatggcggttagtgccccagaggcctgggcgtgtgatggggcaagcactgctggggctggaggctgaggggaggactctttccagaagaggtgtctcagccaaacctgcctgacaagaagaaagggcaggctgggcgccgcgggtcacacacataatgccagcacttcgggaggccagatggtgtctggatgccaagacctgtgctcgccaaggcctgatttcagataccgtcagatcattccacaacaatcctacagaggctgcaaagagacacttccaggcaacttgtctgggcagggccccttcaagacggcagctgggagtgacaccgaaagaacaggctc

SEQ ID NO: 5 - DNA, 66416 bp, Homo sapiens
  source 1..66416: mol_type = genomic DNA
aaggtacttctccgtgcttcagtttcctcttctataaaatgaatattggtcctagttcttcccccacaggaatgttatgagtaataagtgaaccgactttattaaaattcatggaccagtgcctggcccattgggagtgctctaaaaatgcttgcacttacttactcagtattagcaagtgcctccatgttagtttaaggcttactcattcagttttagctcactgaacttctaaaaaaatggatttcaaggatttcctttattttctttcaagctgtctgttataatttatccagaatctagctgaattacagaaggaagctttttgactactcaatttatgtgttgtggagtctgagctgaaggcagcaaccaaggcaggtttaagggtttgccaggggacctggggtcccttgaacattttaagctgttcaggaagaggaaagggtaaacacagaacaatcaagggctgttttgttccaggctctctttagaggcatgaccatataagccccactttctgctatattggaagccctccctgactgctctgataatgctaaatggaaatggctactatcttcttttccctacactttaggatatgtatcatctttctctcagtcaaccttacatcgtcagcatatagcagttctccataaatgtttgttaaatgcatgaatgaagctgggtgcagtggctctcgcctgtaatcccagcactttgggaggcaaaggtgggtggattgcttgagcccaggaattccataccagcctgggcaatatagtgagaccgcatctcaaattaaaaaacaaaaaaaaaaggaaaaaaatgcatgaatgaatgagtccaagacaaaggcactggaggaaaaaacatatatgaagagtggactctttctgtgatttaaaatgtgaaacctccccataacttttcaacacgttaaattttcatgaacaagacaactgttaaatattatttaaagatatgggagtaactaactgaacaaaaagcaaaatcataaaaactggctgcttctgaatagtgcaaggaaaagtaagaaaaggtgagtcagggatctatcctttttctgtaaaagccctctgcatggttttatttttaactacaaactatttaattattaactatgtacaactaagttaaaatatttaaaatgaaaaatcagtcaatttttgacctgctgtaagtcaaagcatcctgctgtgcttttgacctcatacagttgagtacagttgtttttttgtttttgtttttgtttttgtttttttaagttttgtgccaagagtcctgactaccaaactgtgttgacccaaagcttgattaacaaataaagcttggttaaccaaagcttggttaacaaataaacagaactttgaactttaataaagcagttctaatggacctagactgggttgggcaggcctactgactgctgcctgaaggttgctgtaaagggactaagtaaatcaattaactccacagttttcacaaaggtctcttgatatcaaaacttctttccttgcatgcttctctgatcctgtggagatgaaaattgacatccatagtcatattctaccaaaagaatggccagatctaaaaaaggtaatggtaattaatttgctgaattatttctgaaacttctccagggtttctcaatgcctttctcttctttgtggaattagatgtctagtttatctgctttggtggggggcgagggggttaaatcatttggtagttctgattttctagcttttaaaaatgacttttatatttattttgaaataacattggattaaagaaataagtgctttctcagaaacccttttttccctcaaatgaaccattctttaaaatatctggacaatttaaataaggcagatttaccttttcaaaaatcacatattcagctgctgggaagatacatgccaactacagaatttaaagttacaattttaagtagaagaccattaaaaatggaatgtgatcggtttcaaggacttctaaaatatatctcctttccaaaatgtttaaaataagttttagaagcaccaagagatagctttgtgaatttttttagtctattttaggacactgcctgaaacctttactgtttgatgttctttattctataaatctttgtcctgaagaactaggaagtaggtacatcaaaaaacccgagaataaatgacatgaagcttttgcacagtgacatctcctaagagagtattctttgtgtttctctaaagatggaaatttccttttgtcattaagaacttttgaatgaatataaaaagaggaaggtgaggaacatgaaagaaatgtaaaattggctagaggtttgttcaggcttaatatcaggttttacccaatcttcagcattctgccagtactttcacaccaccgataatgtttcaacttttttatcccaagtgagggaaaatgaattaacccaaacttgaattaaatgtggttcattgtgcaaatagatgaaactattttcttctcatagttgtctcattgaagaatgtttatcttaagtatttctttgtccattggtatcttaggtaagaggggtggtagaaactgtggattgaaaaacaaaatctttgaaagcctatcctatgcacagctaacgataaaagataaacctctcaacctgctcttcctaaaaggactctacatgtttacacaggaacatgctgttctgagtgctgttgtcctcatcatagtttactgaagtgtaaaccacttcacaatgttaatgatttcatgaagggaatgcaccagttactttgtgggagtgcatctgccttgtttagaagctgcatgcagtttcttacatcttatggcgcccaccactttctacccctcatttatgagtatttgcctgatgaatgatgcaatgaacacattgactaacttgtgatacaggtaatggaagcaatagattatactccctaatctgagagttttagaaaaatccaaattttagtatttggtattttaaaatagccataaactatacctagcaaaaaaaaaaaaaaaaaaaaaaaaaaccactaattcctctgttacagcttttttctctatttgagtatgaaagaatatccacatgaaatgctttggaaaccaccacggtggtctctagaggacaacgcccccctgtactatcccactgagaaagctagctagcatgatcgaccctccaagcagggctccaagctccagggcatacacctccttgtgcagacaggattttgaggcttagagagagctacagtctgaatgtgtatgtcccccccaaaattcaggtgaaaccctcatccacaaggcaatggtattaggagatgcagccttctggaggtgattaggtaatgagagcagagccctcatgtatgagattagtgcccttataaagtaagcccaaggaagcttgttcgccccttctgccacgtgagggcacagcaagaaggcaccatcttagaaccaggaagcgggttctcaccagatcttggacttcccagcttccaaactccctctcctttctatcaccagctattgctttaaagagggagaggaattttgtcccaataaaccaggtttcttcttctttttttatttttatgtatttatttttatttccataggctattggggaacaggtggtgtttggttacatgagtaagttctttagtggtgatttgtgagattttggtgcacccatcacccaagcagtatacactgcacccaattttagtcttttatccctcatctgcttcccaccctttccccgagtccccaaagtccatcgtgtcattcttatgcctttgcatcctcataacttagctaccacttatgagtgagaacatatgatgtttggtttttcattccaaaccaggtttcttcttatgtagtagtctcatatgctgcaagcagacagctgatacacttcatcatcaccatctacatcatttccatcattatagtcataacacttcgtacttccagggagagacagagggagaaataatttacataaaccttgtgaaatatgcagataagatttatattattcacttgacagatgagatgcttgagactcagaaatgaacctagaatcccagagctatgagaggccaccgtggtccctcaagagcctccccaccaccacacccatcttgagaaaactggcccaagagagtactgctgctggaataaccttgaccttcttgcacaatgaagagacagaaaagcagaatcaacacgcctgaagtgatgtttaattaatgatgataatggacggggatttgagaaatcttttcattttcgcttgctaataataattttagtcagagttacaagtagggttcttgaaaaaaaaacatatctgacgtataaagacaatggattcagggatacttgatcaaattgtttctgatgaatgaggacccacactctctgctgtcacaaacaggaggtggggcccaagaaacagtggtgaaagatgtttcaggttgatctgcaatggattattcacagcaacaatgaggatgatacagtttcagctttttcctccagcaaggccttactgacaacctactgtctgcccaatagtagggcttgcaaagattcttctaattataaatggagcaaaaaattctgaccttcaatttgaaaatcatatacttacaccttcttttgttagcaattgcacttcatcgatataaggctttagaagacaaaatcctagacatcatttgatttttagaaaatccttctgaggagataaatatctggtttcatcacccaggaggctcattattcacctcatggaggtgtgatgtcttcaagacattaacaatgtcattcagttcatccactttgattcatacatgcccatttcagaaacatatctcttgtatataaaactgaatttccttgaatgttttcaattgtttatttggcatgctcataaatgctgtgagacactggttattgtcagtcaaacactttcagattgtagatgcttcccggcatatgctcagaccaaaaccactcccagggtcataaattttagactccaggctcggctcaacctaggatgagaactgcggggctacatcaagcacagacctggagaagaataaagttgccctaaataagttgagtctttgcaaggggcctgtgaggtaaattggcactttatactttccaggaaagggagggagggacacagagggacaaaaggctcttttcttcatggctctccttagttctgaccccagggtattctatttggggttggaataagactgtcgccacaactgccacccctaccaccatccccactgctactatcaccatggctgtcactgctagcaccatcaccatcagccatcacgggtaccaccattgccaccatactcactacttcagccacaccactaccaccacctcactccctccaccatggcaattagtgcccccatcatcaccaccgtcaccatcagcatcattgttagcatgaatgaagccttgtccactggccaggcctggtgtcagcagctttatatgcactatctcagctaattcccctgaaaacttatgtccccaccactcctcttagcctcatttcattaacacacataaggatacagtgacttggagacatttcacaccaacaaagtcaagtgccttgtaagtgacttgtcgcatgtgggaggatccctctgctctgcctttcctacctccctatccttccccagatggaatacttctctacctgctaacatatgggttacagttccttacagaattacaagaaagtaacaaagaaagagagtgaggaagaagcgggagaaagcaggcagtagagaaagagggaaataaaaccttttcttctacattaaggataaaaattcaatggcaaatttctaatttaagagcacatagtcttaagttcactctaaagtgtaactgattaaggtcatattccattcctcccccaacacacctctcttggcagctttttccaggggaaaagaaggaaaaagtaccagggcattgaatgcatgaagggtgagagcaggggttgagggcacaagcaaaggagaggctggatgcagagaggagaaactgagctcccttgcctgcccagcctgcaaaaccggttctgctgatgtcactggggaagaaacagaagatagatttctaaaggtaatatgataatttggggctaggactcaagaacagaccttatacctgggtggaataagactggtatagaattaatccaaaccttaagaagctgttgaggcagaccccaggcacagacagagacacaaacacctctatgctgcaccatggcccaggcccagaccttcccctcagtctagtggtgaagggagctaggaaaggagtccaccaagacctgactccctacagacaacttccctgcaccacagcatgagaaccaactgctgtaccctggcctcatccagccacaagtgagaggttgagttgatgttcagtttgctttactcgttgacccatcaccgctgaccaactcagagccattaaggagctccctcatgtagctatctcctgcctccattccttccctctgacaccacactgtgagagccatgcaggaagcgtggaaatcctgaacactagaagatcctctgcaatctgaccccaggactaccttttcaacctccctcccaataccgcagcccaaggtgttaggtcagctccctcgccaaggcccccagagcacctgtgcatcacagtcacagtgcgtctcacacgcaatgatgtggcccttcaattccttgcctaccccagccttaacctcccaagactctgctccacatgggctggaactaaccttcacttttattttctctgccctagtaaggcttgtcatagatgggactccatgaaagcgtgaagaaggaataatgatatgatgcagtatgatatgatatgataaagtcaatagttatttgagtcatacttacctatgttttcaggcggtggctttccacagtttttatgcatgatccccaggcggaaatctattttacattatgactcagtacaaacatttatatacattaaatgggaagaaaaatgttatgaaaccattacttaatacacgggagacattctaatttattctattcctttccattcctttactctcttatgttttccaagaagcagaccctgagacaaggattcagatgcaagtagtttgctttggaggtgatcccaggaaacaccagtagagtgaggaagtgagacagggaaaacagggcagccagtgaaaggtttgtattccagagcaaaatgtgtgcctcatctctgtgttatcctgaccgaggggtggggtacggtgtgttcagtgtatttatatacaactccctcaattatctgttaagggcgttgggccaaggggatgcagggggctaatttcttagtacttctgacctactaggatggcttgatcaaagcaggttccaggagaaagccctcagccagtgaaatgcaggcgctggctgatggaggtgggctggcatgcacagaagtgtgaaagcaaagggatatgagcgggacaccaacagcatctgctacatacatgatttcctgttttaaaatgtttgagtccctatccactaaactgatatcacaatctactcatggattgcaacccacagtttgaaaagcagtgtatttcctaaagagtggtccttaggagctatgtactcctggtagcctgtgaaatgattttaggtggcacatgaacaatattttttcatgttaatctttattttaaaaattcaagctgcattaggggaaaagataaaaccagcactgctgagataacagtattttcttcttgtataaatatattgaaggaaaaatgtaagtgaatttaattgtaaatactaaataggcgatacatgggtatgggggaaatgggaaggcaatgcttgaaaggtggagctcaggatcttctgcacttagcatgccccttgattgcagcctggtctttgctctttgactctaactgtgcttctccccactgcagaggtttggctacggaggctgggtgcagctccaacaccacagcaaggtgagtttcttccaaagtatgaacatcagtagcactcagggagagctgagccatgggatacctcactgcaggctgggcctccagggaaccccactcttctgcccatgtattagctttgttgtagacaagggaacagcactgagatttctcagaataattgggaaaaatggaggtgacttcaaagagtagtatttaggaagataaaattggaatttgagaacacattaaaaggtctctctctctctctctctctctctctctctctctctctctctctcccctctccccacccccaccaaccagttttagcatttattgctctgcctggaggaagtgacctagtgctctctacaggttattacagtatattaaagctgaccaaataaatgggacagttaggtttgagcacaagctggaaaaattgaacactggagacaaaggggagaagacagtgttattaagggttgagtttggtaagaggaaaaagcaaaaagaagaaggctgtgggcaaagccctctagaaataacgagccccaagagtgagctgggagtctagatctgcccagggcatgggtctgacttcattttcagaggcatcatatgtcctctccgagttcagagggaatattcttgagcttccagctggcatgcagacatgactaatgcaggctctggaggacttgtggtctggaaatctagttaatgtgcagagttaacccaatgcagcatggaaaggttaggactccctttacatcaggtgctaaggggcagagatttgggcaccaaggatcagagaaggccttctggaggaaatgatgcccatcccacatcttaaagcaggcagggaggcttgcccagggaataaggaaaccatgttctaggaaaagaagaaagggaacaaaggcatgaaatattaaacatatgtaagctcagaattcaagcactcagctaccagcatttctcaaactgtggtcccacaaccagtttcaccatcacctgggaacttgggagaaatgcaaattttcaggccctaccccagtcctaccaaatcagaactctagaggtagggcaagcaacctgttttaacaagcctcctggtgattctgatgcactgtcaagggttttttaattattaatttttttaaggacaaagtctcgctctattgcccagctggagtgcagtgatgcaatcacagctcacttgcagcctccaactctcaggtttaagtgatcctcccacctcagcttcccaagtagctgagactacaggtacacaccaccatgcccagatcattattttattttattttttagacagggggtctcactatgttgtccaggctgacctcgaactcctggcctcaagtggtcctcccacttcagcctcccaaagtagcacattcaagtttgagaaccactggctctcacacattcattcactgactcactactttttattgaaacttgttttgtgtcaggcccaccaacctagacactgagaatatgctggtgaacaagatagacatagtccctgctctgatagtgctcagattccaggggtcacaagtcaacatgatcaattcagagaatggaatataaagcagcgatgtgatagagagcaagaggctggctggtctgtgacctggcaaaggcttcgaggatgagaagggaacacttttccaagtgggggaacagcagttgcaaaggccaccaagtggtaaagagttgatgtgttcaaggaacagaaaggagggcaatgtggctgaaatgcagtgaaagggggagatagtaggaaatgggctggcaaggtaggcagaggcccagccacatggggacttgcagggcacgctaaagagtctggattgcattctcaaaacaatgcaaattcttcggagggtcttaatggctttaaaagaccactttggttgctctgtggagaacacatagaggcagacaagagtagggagagtgaaaaagaggcaaaaagatggagaggaagccagaaacctcatcagacagggccatgaaggatttaggggtttaggccccaaaatgagcttaggtctttgaacttgatcctgaagacagtggggaaccactaaagagttttttggggatacagatagatagatagatagatagatagatagatagatagatagatagatagatatagatagagatagagatagatatatatactttaagttctgggatccatgtgcagaatgtgcagatttgttacataggtatacaagtgccatggtggttcactgcacccatcaactcgtcatctacattaggtatttctcctaatgctatccgtcccctagacccccatcccccgacaggccatggtgtgtgatgtttccctccctgtgtccatgtgttctcattgttcaactcccacttatgagtgagaacatgcagtgtttggttttctgttcctgtgttagttgctgggaatgatggtttccagcttcatccatgtccctgcaaaggacatgaactcatccttttttatggctgtatagtattccatggtatatatatgccacattttcttttcttctttttctttttttttttttgagatggagtttcgctcttgtcacacaggctggagtgcaatggcacaatcctggctcaccgcaacctctgcctcccgggttcaagtgattctcctgcctcaggctcctgagtagctggaattacaggcatgtgccaccatgcccagctaattttgtatttttagtagagacagggtttctccatgttggtcaggcaggtcttgaactcccaacctcaggtgatctgctcgccttggccttccaaagtgctgggattacaggcgtgagccattgcacccagccagccacattttctttatccagtctatcatcgatgggcatttgggttggttccaagtctttgctattgtgaatagtgctgcagtaaacatacgtgtgcatgtgtctttatagtagaatgatttataatcctttgggtatatacccagtgatgagattgctgggtcaaatggtatttctggttctagatccttgaggaatcgccacactgtcttctacaatggttgaactaacttacacccccaccaacagtataaaagcattcctatttctccacatcctctccagcatctgttgtttcctgactttttaatgatagccattctaactggcatgagatggtatctcattgtggttttgatttgcatttctctaatgaccagtgatgatgagcttttttgcatgtttgttgggcacataaatgtcttcttttgagaagtgtctgttcatatccttcgcccactttttgatggggttgttttttttcttgtaaatttgtttaagttccttatagattctggatattagccctttgtcagatggatagattgcaaaagcttcctcccattctgtgggttgctgttcactctgatgatagtttattttgctatgcagaagctctttagcatttgtcaattttggcttttgttgccattgcttccggtgttttagtcatgaagtctttgcccatgcctatgtcctgaatggtactgcttaggttttcaagaattttaaacatcactgtctctgaggcagcccatcctcaccttcttgtgtgtccactaagtgccaattcaaacactgtgcttcacttctcccattcaaaatgctagttcctagaccaggatctgatgctctaagctggcctcaagtctctccgagggaaaacatgatataaatggagctgacggcaaagcagctaggaagccccagctgcagggacaggcagctgtgatttttttttttctttcttactccatgtccctgtcttcagtttgtccttcaatagtggatttgaatggccttcatttcattttgttttaatatcaagaaatttcataaacttagtagccaaatctccaaaataaaacaaaaaggaaatattttccagtcacatctactgacttatttccagcaaaatctgatacaatggtaatcaaataggacaaaagagtaacacactccctctctctcaaaaacaaaacaaagcaaaccaaaacatacccagtctgtatttttcataattacagttgtcagggatttgagtccatagaaaacaatatgcaaatgtaaacaacatgcaaatgtatacaattatgcaaaataggctgggagcaatgagaaaatccaggatttgggatttgaaaataattcttactctcctatgttcctttagtgaagaaatgtgttctgcccccaggattgacttaccctggagatacctgttctctcaaagttctttccaaaacatttctctggtttgctccatttctcttcttaactcttggtttttcagtgttccccaaacaaattgaggggtagtcatttgtcatggcaaagccttgctcagaagtgaaaaacattatttgtcttttgattgaatatttataaaagtgtaagtagcaggccagtccttggtttgtatgacaacctgccaggatctgcatggggtgggagcagaattgtgccctgatggcaaagacacctgggagcattttaaagcctccaacccaggagggtagacacaggcccgtttcaaagccataggtcaacagcacctagaaacacacactgagttcatcccagggccttgggaacacacacacacacacacacacacacacacacacacgtgaacatttacatcacactttcagcatttttacacacataattctgtcggactcctcactgttatcaactgtatttgtatcccccgccccccaaattcatatgtcgaagtactaacccccttaaaaaatgaaaaagattgcaaaacaaaatagtagaatgcactgcttatggcaagagtaaatattgtttcatgaatcttctttctcagtttgtgtctgtacaaatagatatatatgggtattctgaatgacaatgaaaaatagatttcttttttttttttttctgagatggagtttcgctcttgttgcccaggatggagtgcaatggcaccatctcagctcactgcaacctccatctcccaggttcaagcgattctcctgcctcagcctcccaagtagctgtgattacaggtgtgtgccaccacacccagctaattttgtatttttagtagacacagggtttcaccatgtcggtcaggctggtctctaactcctgacctcaagtgatccacctgcttcgtccccccagagtgctaggattataggcgtgagccaacaggcttggccaaaaaatagatttcttaatgtggggtcacagccaaaactggctgaaagccatttatcttgtccaataccttcaaatgtttttaagaataatttattattattattatataagtaatatttgactaaatgctcctttttagattcaagccattagagataaagctacaattttcttggaccagcactccctgttctcaaaagttcttcctttctttaaaataatttcaacttttattttaagctcagaggatacaggtgcaggtttgttacctgggtgtatcaagtgacgctgaggtttaggggtatgattgaacccgccacccagttagtgagcatagtaaccactggaaacaatcagtttctcaggccttgtctcctccctcctggccccctctggtagtccccagtgtctactgttgccatccttatatccatgtaaacccaatgtttggcttccatttctaagtgagaacatgcagtgtttggttttctgttcctgtgttaatttgattaggataatggcctccaggtgcatctgtgttgctgcaaggatatgacttcattattttttatggctgcatggtattctatggtgtatatggaatatccatggaatattatattttctttatccagttcatcgttatgggcacctaggttgataccatgtctttgccattgtgaatagtgctgtaatgaacatacaggtgcatgtgtctttttggtaggacaatttattttcctctggatatatacccagtaataggatcactaggttgaatggcaattttgttttaagttctttgagaaatctctgaactgctttccacagtcagatactccactaatttacattcctaccaacagtgtagaagcattcccttttctttttttttttaggagtctcactctgtctcccaggctggagtgcagtggtgtgatctcgactcactgcacctccgcctactgggttcaagccattctcctgcctcaggctcctgagtagctggaactacaggcaactggcaccatatccggctaatttttgtatttttagtagagacggggtttcaccatgttggccagaattgtctcaaactcctaacctcgggttatccacccgccttggcctcccaaagtgctgggattacaggcgtgagccaccatgcctggccacaatcccttttctctgcagcctcaccagcatctgttattttctgactttttaataatggccattctgattgttgtgagatggtatctcattgtggttttgatttgcatttctctgatgatcagtgatgtggagcattttttcatgtctgttggtcatttgtacatcttctcaaaattaattcctattaacagtttggtgggtatttacttctcctatggttttactgaaataggaatgcacctttggaaataacagagtattattagtgtgttatacgtatggtgtttaaagctggatgaatcgggttccaaatagaaaacaaacggcacacttaaattagactactttgaaaagagttcataaagagactatttataaaggtataaacatgaggaagtaacagaggtaggcaggggttacttagatcatgcggggtcttacaggccaggttaaggagtctggatttcaccttcagggaaacgggaatccattcaagagttttaagtggggcagtggcaagatctgagatggggatttgtaagtttactctgaccactttgtggagactaggttgaaagggagtcagaatggaagcagggagatggggctggaggctgagaaatcattcagggagagaggatgagggtgtggaacaatgagcagtggaggtggagagaagtggaccagccatcgtaggcaatattctggatagagaatcaatggtattaggaagtgaattggatggtggcctatcaggcagagggaagcaaaaaaatgatgtagtctccaggcaataagcaaagtaacgtaggcttgaaggatagaagccgccaacccagaaggaaaagcaggccagggaccaagaagaaaaacaggctgagcaaatcgagtttgggttggttgaagtagggcctcccgggggagctgtccttcagaacctgggaatgtgggagctgcagtgactacagaggttgcttcctgatgacaaggtctgggccatttctgccaactctgcacctcgagcccaaccagcatggcagctggtgtggtctggagggattgctcgagtgggcactagggggatggggaggagaatggaaatctgatggtgaaagactgagtttaaaaatacatttctggctgggcatggtgcctcacgcctaatcccagcactttgggaggctgaggagggcagattacttgaggtcaggagtttgagaccagcctggccatcatggtgaaaccccgtctctactaaaaatacaaaaattagccaggtgtggtggcacgcgcctgtaatcccagcaactcaggaggccgaggtgggagaatcacttgaacccaggaggcggagattgcagtgagccgagatcgcaccactacactccagcctggggaacagagcgagactccatctcaatctaaaaaaaaaaaaaaaaaaaggaaagacaagaaaatacatttctgatgatacatgcagtatcagatatttgaaataccagccatatttgggcttgtttggggatagtattagaattagaacttaaaagtcagaagttcacaggttaggttccctaggaatcagactccaagatgaagttctggctttaaaaatataagaggtgtatttaaagtgtgttatctggatagtaatagttgcatggaggaattgtttaaaaaaaaaaaacttgattttcttttgagagtttaggaaaaaatgggattgggctctggttgtctaaattaaagcagcttgctcccattacttggttattagtttagtttaagatcttggttaatgctgaggtcagtgttaaaaaccaggacccaagaaatccctgtttcctcctccagcagcaagtgctgacagacacatccacagccttgcctgaatgtaaagcgacagagatcagggattgattccttacaatggctgtcagctctcaaaattccagctggaaaaaaaaaaccaatgagaactgggggcttattatacgggcacagctgctctgcagtgatttttactcagaaagagttctaccgacttgctaccgttcatttttcttaccatggatctagcatgaaggatgtgaaaaagtgaagtttggtgagtctgcttctcctgccatgtaatgagaggcactcccagcccctaaaagatcaaactctttaggaaattatagtaattaactttagcctactacatagacacccatcaccaaatattagccttgtgagatggaaaatggcttcataaaccacagctctataccagctaagcatatggccttggacaagtcactgcacctcatggacttattggtaaaatgcaagggctgaactaaataatctattgcagctttaagatactctgctttgtttgaaatcaaaacttactcaggcatctcccacagaaacccaatttcctcccttgcagttgataatacatggtaaaatctggctgttatttattgagcatgctctctggcctggtgctaagttctttacattctatgattgaatcttctttatcactcagtgttcttaattgcaaacaacagaattcactctagttagtttaattagaaaaacagctcccagagttcctgtgagggccagagatcaagctctgagggctgtgctaacatgatcaatgcccacattcacctggtgagctgctccaacaaggatgcaagtgttgccactcccagtcatggacaggatgctcatgctaatgctgccaaggctggagactagaagctttgcctctgctgctccagtcatgttcaacatcttagacaacacccctgtctacaggtggactctgcatagtccctacttcctcacattgctcacttccaggtcaaagttatatgcacaggtgggtgcatataattggcaaagcccagagcacatgctaatgccccattacaagggagactgggaaagcatattttggattctacctcaagaaagcagaatttataattgtgaacgttacttcacacataggatgtgttccaaggatgttggatggccacaagcatgacaagtataatgatccacattttacagacagaaaaagtgaggcttaaactcagagggcccgtaacttcaccagtcagtgctgctactaagtaatttaatgagatttaaacccagagctgtctgaatgcaaagactgtgctctttggcactctgctatactgggtattttatagtgattaagctttcccagcaaggagcaaaaataaataaatcctccaatttgccaaatcaaagtttgtttctcaacttttttttttcaccatcacccctctcctctcccttcttcaccaaatgaaaagacatgtgttcctatatcctatttgtgcaatcattatcagtcaggactcttggttgcaggcaacagaaaccaacaatcattagtgtaagaagaaaagaaatttgttgaaatattttaagcccctcaagaactacaaagtatctgtggaatcaagctcagaaaacttgcagaaactcagggaattcccatgattgaagccacagccaaggcaacaccacaggaacagcctggcaaggaggctgctgccccagctggatactgcccccagcaccactgccaatagccactgtacatggccactgctggaatcactggcagaataaattcaactcttcctgtttttttgcatcacgtaatgcaaaaccaagcattgattggccaagcttggggcagggagagcaagtatttggccttctgcagaagaaggctaggccctgcctccaccacgactgctgcaggagattccccaacctaggaagtggttcagatgctggcatggtcaacggaggatcagagctgaagcacatcaatcttggtgtcctgatgtcagagacccagctctgctagtgtgtggacacctgtcacaattacacaagtcaacttgctcactgacctgttccccatccctgagaaataaaatgtggatctgaagtcttcctcatatatgtgcaaaatgaacaggctacagcacttaaaggtgaaaagcatccagacttcttcatgcaggagatggagtagaaggatgtcttgtctatggagtagaaggatgaagccttggatgcaattcatgatcaagccaagaggaggaggaggagagcagaggactccaccaagcagagctcaaagcctttgatcattgcacacccacttggacattctatggggcccaaaggtaaccttgaggccctgaagcaccaccaaaggtggtgtgccctcaaagcagaggaacactgtctagcccctagttatacaacattaataacaaataaccataataacacttatgtgtcagatactccactaagcgctttatatggattatcttatttcatgctgacatgatccctttaatgtaagtcacattaattttttaaggtaagtcattatcatccctattttaaagataaacaaactgaagcttgaagatattgtttaacttgctcaagaccacatagtaagtggcagaacaagaatttgaattcaggcaattttatttccagggcctaccctagttcttccccttttctttaggaatcacaaactggaggcccaacgtagatgccactgccatgttctgcacaaccatttagtttggtcccctgctctgagtattaaaaagttgtgtattccataatggctgtaccagttaccaaataagagcatacaagggttcctttttctccgcatccttatcaacacattatcttttgtctttttgataacagccatcctaacaagtatgagatgatatctcatttctcaatgattagtgaagttgaacattttttcttatacctattggccatttgtatatctattctgagaaatgtcttttcaggtcctttgccccttttttcacccagttatttgttttcttgccattgagttctttgagttccttatatagtttggatggtaactccttatcagatatatggttcacaaatattttctcctgttccataaactgtctctctactctgttgatcgtttcctttactgtgcaaaaggtttttagttcctccagctttgttctgtttgctccaaattgctttgactatttgagatcttttgtggtttacatgaaatgtatggtttttttttctatttctgtaaaaatgtcattggaattttggggggcattttattaaatctatagattgttttaggtagtatggacatttaaacaatatcaatttttcaatccacgaacatgggatgtttttccattcgtctgtgtcttctttaattttttcatcaatgtattatagttttcagatctttcacctttttggttagattcattcctaagtatttttaaatactattttaaatgggattgcctaatgctgggagcagtggcttatgcctgtaatcccagcactttgggaggctgaggccggtggatcatgaggtcagaagttcaagaccagcctggccaacatggtgaaaccccgtctctactaaaaacacaaaaattagccgggcgtggtggcgcatgtctgtaatcccagctacttgggaggcaaaggcaggagaattgcttgaacctgggaggcagaggctgcagtgagccgagatcataccactgcactccactccagtctgggcaacagaacaagactctatctcgagaaataaataaataaataatgggattgcctgatatcttttgcagattgttaacatacagaaatgctatgggcttttatatatcaattttgtattctgcaacgttacccaatttattagtttaacagttttttggtggaatatttagggttttctatgtataaaaccatgttgtctgcaaacaaaaacaatttaacttctttcattctgatttaggtgacttttgtttctttttcttgcttcattgctctggctagaacttcctttatgatgttgagaagtggcaaaatgagcccccttgtcatgttcctgatcttagagaaaaagttttcaacttttcatcattttcaccatcaagtatgatgttagctgtgggattgccatacatagactttattgtgttgatcaacaataaagttcatgtatggcaatcccacagctttattccttctatacctaatttattgaggttttttaaagtcataaaaggatgtagaaatttgtctgtatctattgatatgatcatatgttttcctgagaaaaagtaaaaatagaactactatatgatccagcaattctacttctggctatatatgcagaggaaatgaaaccagtatgttgaagaaatatctgcattcccatgttcaatgtagcatcattcaaaatagccaagatatggaatcaatctaagtgtccatcagtggatgaatggataaagaaaatgtggcatatatacataatggaatactattcagcctttataaaaaggaaattctatcatttacaacaacatgaataacactgaaggatattatgttaagtgaaataagccagacataaaaagacaaatactgtacttatatgtagaatctaaaaaagtctaactcacagaagcatcaagaaaaatggtggttaccacaggctgaaggggtggggagagattgagaaggtcagaggatatgaaatttcagttagacaggaggaataagttcatatctattgcacaatatggtgactatagttaataaaaatgtattgtatacttgaaaattgctaaaagaatagattttaagtgtcatcacctcaaaaaaaataagtatgtgaagtaatggacattttaattagcttgatttagccattccacaatgcacacatatatcaaaagataatgttgtacagcataaatatatgcaatttttatttgtcatttaaaatgtataaaaattattgctgtgtacccaggcaagcatgatgcctggtggaagaagtagctcagtaccaaattttgtgcttgctaccagactgacttctttgcccacctcctcccacaggtattgacactagtgggccctgctctgtttgacaaatcatacactgccattatccatatattgcttctccataaaatgagagggttggactaggtggtctatctcaaaggttcttttcaattctaaatgttatagaactaccattttccagacgctgggccatcctcttgtatctagtagccaggggttcagatcagcaaggtgatcagccattctcagtcaggcagcccagagaaacataacctcaaccttgctatctctgtgtccagccattgacgcccacagagcacaccccttcaactctaggccaaagaaaagcatgaggaaagaaagctgatttttgttaaattactgatttctacttccacaaggattaagtaaaaatcttttcaaatattagggaagaaatacgttctaaagcacatgaggaaagattagtccaagtggtcttaggttgcattttagtaatgtgggttttctgccccagggagaagcaaagttgttgaaagatgggaaagtcttcagagtggtgcgagagaattgctgggatccagaagttcgtattagagaaatggaccaaaaaggtacgatgagaagtgctaccaatgttagcatctgatgtaaaagcaatgtctgcccttaaagtttgctgacaactttatgtgatggtaacttctgacccccttttctctgccaggacaggctgttccagcttcactgtgggagggacagggccttccactacaatgcttttagagtgtggattcaaaatgtttcatatgagttataccctgttttaaaatagaatgctatatcatgaaaaagataaaaatggcattttattatttttaaaaattagttcaaatgtatagtatttacttattataaaatcaattaaaatagtaaaaactggaaatcacaaaactaagaatgacaattgcctgcttaataacacttaagatccaatttctttctgtagtttgtctcggtgcatcatacacagaacattcccactgacacatcagggttggaaatggaagcagttaaaaatagttaattgtgtaatctcagaatacactacaataaaatcaatccagaaatttgaaagaagagaattaggaagtgttcgtttcaaagctgaattgctaaaaagctataagaacatcttgcactttttaccttatatctaaaaatcaaacaagtcctcacaatttaaaagaatttcagaaaaggcacagtaacagtttgggaggccaaggcaggtggatcacctgaggtcaggagtttgagaccagcctggccaacatggcaaaaccctatttctactaaacatacaaaaattagccaggcatgctggcgcgtgcctgtaatcccagatgctcaggagacaaaggcacaagaatcgcttgaacccaggaggcggagtttgcagtgagccgacattgcaccaccgcactccagcctgggcaacaaagtgagactctgtctcaaaacaaaacaaaatgaaatttccaagtctatctaaagtatgacatgatggccacattatgcttcacctgtgactgcctggttgactgtgccacctgaggagaacatgctccaagaaaatgcctgagccttccagacacatgtgggctgtgtccatgggctgtgatggggaactgaccaccactgacattgtcagaactaagtgtttacattggtggaagatttcaaccagaaaagaaacaattcaaacacacaaataaaagagcagtttagcactaccaccttcctaatcaaagacaaattgtaagaagttcaaatatacaaagagatggcaggagacattttattccaaggtctgcaaaaaaggaatcaaacggtcagcctaaagtgagtaggtggtctccagcatgttggaatttgttgtagatacctttgtccaggttttgctttatatattttttaacaattaaaaatagagccaggtgtggtagttcatgcctataatcccagcatgttaggaggccacgtcaggaggatcccttgagcccaggagttcaggatcagtctgggaaacacagtgagaccctgtctccacaaaaaaaaaaaaaaaaaaaaaaaattatctaggtgtggtggcatgcacctgtgatcccagctactcaggaggctgaggtgggaggatcacctgagcccaggagtttgaggctgcagtgagctgtgattgcaccactacactccagcctagtggtggagcaagaccctgtctctaaaaaaattttttaattaaaaatatatttaagtggcatttaaattgaactttgcagaaaacctgcagcacctctgtagagtactccacagaatatagcatatatccctctgttctaaaagtatattggagtgggaggagagctggagaaagaacatgcttccctgacctacagcaaagagcaaggttttgtagtaaatgtgaagctgcagcaaggacctgccttttcaaggagaaaactagtgagcatgagacttgaatgactggtgtcagaaaccactacttacggctgcacggtaaacgaagtgtgtgtgtcaactttggtttttgttgtgtgttgcattccttggctgtccctgagagaacagtcatgaccaaccctcattgagtatttactttgtgccaggcactattctaagaacctaacatgtattaactcatttaatccctacaacaaccctaggaagtagaccctcttgaagacaaaagattcttggcatcctggatgctggagtcaaactcagggtcccattctgggtatttcagatcatgggactccttctaggatcacttaggagctgaattaaaggggcagggaaggtggctgagagacatgctctgttgtgcataacctaagacagaaagcctgaaaaagtcttgcttaaataaaatttcacaggaaggagggcagaaataactctttggaaatggggtcagttagttttccttgaatgatctcatttgtgtccaatctttacttacttccctagaatctggggctgggggctgaggggggtccagggagaggactgagagggacgcagggagggagagcaggaggagtttagggtggaggcttgctgccgcttggccttgggaaaggaaggagtgcccagcctattcttctcaccagctttgcccttctttgtgtccatgtctaggagtaacagtgcaagccctttccacagttcctgtcatgtttagctactgggtgagtgtgaaacctcaagccatctccttggtgttgaaggttcgtgttgagctcccaaaaagtgaacagatgcctcaagtttggacaccagtaccactaactgcccccaacaactgtcctcccctttagcgatcagcagggtcccctctcaggcctgtcttcttagccatgtctttgctccagtacggtagccagtagtcacatgttgctatgtgacttgcattatagtttcactgtacagtggtactagaccagccttaatctccaccagaacttacctgtctggtgactcattcctgcaatgccttgccggggaactgacaagctaatatcttctgagacgagaatgattttgaggtaggaataataatcatgacctaatatatcacctctccaagggaaaaacacaattcagaagggtaatcctgaagtgggatgccctttcccaagtgaataaatctcaagcactaaaagtttcaggcatgatttccagcctgtggaggaaaatttttgtacgtagccgggaatgtgctagtccctgctcatccaagcagatactcactctcgtgatttaaggagcagtggaaatatcacctgttcatacatacttccgtgatctgtgttcataaatccagtattagtgagtgactcagtctttgcctgttcctgcgattgcattcactacttaaaagtgccctgagacctcaaaatgcctgaatttatcagattggctaccactctgattagacaactgaggctgcaggagaggaccagattcctggcagtgggcagtggggtgacagaggaaagtaaacagtgaagaagggagcattaggaaaaccaacagtaaacttcaactgcctcagcattttgccaaggacagccctgaatgtcacagccaacaagaaggacagagaggaggacaggcaggggcaggacaagtcagtgagccagcctggcggccctcaatggggcatgacaaggaggtgccttgatggtggcctggggcccttggccaggcccgacctcctgggaggtaggggggcattaagatctttctgcagttggcagtggcccatgctcattccatctctagtgttgggataccatgccagtaattgtgttcttcccttctgattctggcctcaatttttccaatgaatcagcaatatacctgcagttttctttgctttacaaagattggcttctcggttgtctgtggccagcacctttcccaatctgtgcctctgttttctgatgtggtaaagccactgaaaatgacaaatattatagccatgaggaggcactgttcagagtgaatgtctaaaagaagtaggttttcaacaatgcggttttccctttcctgtctccaccaggccaaacctgaggacactttaaacctgtgccagcttttaaacaacgaccttgccagcaccgttgtgagctaccccaggaggttcgtgggtctggggacgttgcccatgcaggcccctgagctggcggtcaaggagatggagcgctgtgtgaaagagctgggctttcccggggtccaaattggcacccacgtcaacgagtgggacctgaacgcgcaggagctctttcctgtctatgcggtgagtagcggggctgctcagccaacgccagccgcccagtgcctgggccgggggcaccgctgggtgctggcagggaggaggtgaagcgtcaccccactgggaggggagagcggtgtccacgacttgtttgatgtaggtagaaggtgtggaaatagcccccgcaaaggagtgggccattccaaagaggaactggtggaagggttcctaggccagcactgagttaacagtgaaatctcttttctttccatcccccttgccctccttttaatctttcacttggaagacaaaataccctctttacagccactgtgcaaaagaatcgtgttaatgacatacaaatatatatatatattttggccaggtgcagcagctcacacctgtaatcccagcacttcgggaggcccaggtgggcggatcacttgaggccagaagttcgaggccagcctgaccaacatagcaaaaccccatctctactaaaaatacaaaaaaattagccaggcgtagtgccacacccctgtaatcccagctacttgggaggctgaggcatgagagtatcttcaacccaggagacaggttgcagtgagccaagactgtgccactgcactctagtctgggtaagagagcaagactccatctcaaaaaaaaaaaaaaatctgctttggaaaaaaaatactaaacatttttcaaaattatgaaataatttggaagaaattatcgaaaatacagaaaagtataaagatgataacaaacattacccataatccagcctcccaaagatgagtagccactgttaccatacatagttactttcttgatatacatatatctatattttaatgaacctgaaattctgttacacatgtgattttgtatgctaattaaaaatttccaacataagtgaaaattcttttaatgcacgatttttaaataactgcagaatattccaatatatggctatgctttgatttatttaaccaatctgtaattaagatatttttaagtcatatattttggaaatgtactttaaaatacctaataaaaaataataccatgaaaatgttaacatttgatgaaactaggtggtgggtatagggatgctcattgtgttattgtttatactttctatacttaaaatatctcatggtaaaatgtatgttcaaaaattcagtgccattcatttctgaaatatccaacttcaagtgtccatagttccacagtcatctccatcagtcttcttcttcctcctccactttcaactctttctataaccaaaccttctcatctcagtaccaggattcatgatgcataattctttactcaattgcattttttaattttttatttccctcctagaattataataatattgctttctattattttcattataaatgcaaaatctttaataatgacttaaatagatgtttgtggactcaccaggcactgtgactactgatcatttactcatttagtatttactgaggtctaactacaggcaaaaaattttccatgtttgtatctatggcgactgcccaccagtcaggagattgcctgttaaattgccttctaatgacttgaaagatttaatgttcctcaatatactgaactccctgaagcttactggctgcagtggtttagctgatgcagtgaatgttttctagaaactttaatgagctttgaaagaggatttatttacttatgcatccaagttgtttcagcacagtgtgatcgagacttcagctgcaagtcattttagcattcattggatttgggtttatgaattactaagggacttaggaagcaacagcagccggttgaggtccacatggatattttcatttgtgtgactagctcgacccatcaatccttctaactgggctgttttgaggacatccagtctctgaagggattcaggagcacatcctgtccccaggtgacttatgatgtcctgggggtggcagcatatttgtttggttagcaaggtttgcctgcctctctgctctctagtttgcgtcaataatgtgctgaaatgaattatcatgagccaggttggctttgtcatctcaaggtgatcctggtactccaaaggtctaactgtcccctttatctcctagacctccctttttagtgagtaaacccaatcatacatgctcaggtcagttttcagttgcaaaaacaacttcgttattggtataaggcagactgaatggtagtgccaactgcccagctccaccatctatcagccacaaggcctaagtaagttagcttctatctgccttagttttcttctccataaaatgagggtagtaaaagtgcgcatctcacaaaaaattaaactagttaataattataaaattcttataacagcttgggcacataataagttctcagtcaatgttaattataattgtgagagtataacttctttttctattctctacaaaccccacatatagaaggagatcaacaatatgttaatttgaactgaacagaaatgagggtgggaggagggtgaggatcaaaaatctacctattgggtacaatggttattacctgggtgataaaataatctgtatgccaagcccctgtgacatgcaatttacctatataaccaacctgcacatgtacccttaacataaaagttaacaaaaaaataaaaaggaaaaattttaaaaagaaaagaaccaccagaggcacatagaataaacttgtatccaaatgaggagtcaaatcccactgagataccatgaccatgcacctttgccaaacccaaaccatcccaagaggtcaatattttctttccaacaggcacctattatcagaaaccaattagcttctctctctttaaaaggcttatatctcttctgctacccaagacctgttgaattaaaagtcctttcttcaacttacccttttcctgacacttccagaatcccttgttgtcccagaattgcttttccattttaaaaatgcttatgtacacaagtcacattgcatcagcctggttagcacaaacatttatgtatgagggtaggatgaatcactccagaacctcaatatatgtggtgaggaattattctaagggaaatctcttttgaatcttgacgagcactaatattcaatgcctgttgaggagacttcttttaattaaactttttgttgcataaaggtcattccatccagatggtatttccatttctcagaaggccctggagcatgcctatgacattcatgtcagtgcctgtctggctaaggcactgacctcttccatttctgaggtcatctcactcacagccaactgttcagagactcatctgggcttctggggatgggtgaatgcctgtagaccccagggattccacccagtgctgggctctgagtaaccaggtggcttgggtcaggccagccagccccagcccagcactgagcctctggctccagcacatcacttcttcactttccacaaactctggtttccaagtggggaaaaggagggggcactctcgccctgactccaaggatacaatctcagcagtccttccaaaagtgtagaccaagtaggagccagaaggagccaaatgtaggggaaattttcccctacatttcagctgtgggattagtccttgagcattttgctgtcagccaaaacatttgaatgatggatatttcctgacgcttgttttaccagatgatatattaagttcatcaacctcaatggtaaatctaccaaccccctttgttaattccaagtgtcccttttattttctaagcaggagaagtttgtcaatatctcttctatatagatcataaaacaacttaaaaagcattttagtttatttgtgcagaccaatatagactcagagaaaagcagtttccccaaaacagtacctggtatctgctcactcatcaaagtaaccctctctctctctctcattgcttctttgaaggcagccgaaaggctgaagtgttccctgttcgtgcatccctgggacatgcagatggatggacgaatggccaaatactggctcccttggcttgtaggtttgtgtctgtgtggggtctggaacagaggaccaactcttgggtttttccaatcatctatggaaacctattatgtcaaatagggaaagtatgaataattaacaggattatgagtaatagcagctatcacttactgagctcttacttggattaatgctatatatatatatataacctcatttaattttaaacatatccaataccatcataaataaatcatatatttaatctatgagtttgacattataatgatcattttacagatggagaaactgaggcttggaatttttaggtaaggtgtccaggtcacacagttaatacatgaaaatgtaatttacacagatatatctgactccaaagccagtcttgctacacagactcccaaagaggcttcaaaaaatgtaaccatacctgtctagtaaattttttagacgatgataatagcatcagctcatacaaatgagaaccctagaattaaaggtagaaggtcaacttccaccacccaaagatctgaaatcttatataaaagatgacccaggcttgcaatttgcctgttatctgctcctctcttctgccctttgcctcctgcactatccatagttccacgaaagggtagaggagaaagctccatttgctctatccaatctctcatcatcagttgtggtaagaagagatagagaacagatgtaaaattctggagctataggtgaaaaatacagctcatctacaaacccaatgaaaacttggtccccaaatgaaaagtgctggatatttttttctttttttttttttttttttgagacaaggtctcactctgtcgcccagactggagtacagtggtgcaatctcagctcactgaaaactccacctcccaggttcaaacaattctcctgcctcagcctcccaaatagctgggattacaggggtacaatgccacgtccagctaatctttgtattttcagtagaaacagggtttcaccatgttggccaggctgctctcaaattcttggcctcaagtgatccacccacctcagcctcccaaagtgctgggattacaggtgtgagccactgcacccggcctggattttctttaaggggaccattgttctttctctcctcagcccaactagtacaattagtaattattaagtaatcgaaatggcaatcaccatgaagaattaaatggggcaatatattggaagtcaaaaaccgggattttagtttcaatttagtctctatttcactgtattgcctgtagtaaatcactttacctccatgggccgtggtccctcatccgtaaaatgagaatgctggtccagatttctccaaaggcctctttctgctcatgttttatatattcctgtgattgctgttggaaaccaaagtatttagtaaggaggcttcctactcatcccctaccaaattcttgggcaataattaataggatgagataacccaagatgcccagtgccatcaagcttcaaagaaaaatgtcacccttattcacaaaactctgataagtcccacaagctcatttatttatttatttatttatttagagaccgagtctcactctgttgcccaggctggagtgcagtggtgtgatctcacctcactgcaacctctgcctcccgggttcaagtgattctcctgcctcagcctcccaagtagctgggattacaagtgcacgccaccacgcacagctaatttttatatttttagtagagacagggtttcaccatgttggccaggctgttctcaaactcctgacctcaagtgatctgcccaccttggcctcccaaagtgctgggattacaggagtgaaccaccgcacccagcccacaaacttatttatattgcaacaggagagcatctgcatatagagtcatttcatcatccatttatgcaacacaaatacattgattccttctagcatgccaggccctgtccgaggcactgaggatatagacacaaacaaaacctctgccttcatggagcttatattctggttagaggaaagagattataaacaagtatatatatatatatatatatcacaagaaaacaggctaattttggaattttattctggatgcaaaggtggtcattagtggattggaggattcccagcagagaagtgtcatgatccaattcacattatgaacgtaactctgactgctatatggagaatggattgtggggttatggttcaagtaattatgggaaagtagagtcacagaactagaagaaagtgatgccatccatctctctgccttcaggaagctctacccacaaactgcttccagatgggtacaaatccatcatgcttccagaattcccaggcagctgggtgccaggggcgtctctgcctgtgaagcagtgaccagccccgggcagaatgagcatcctgtgaagcctagctccgcagcctacagagtcaggcttccccagaaggtgcagggcacagctgtggagcggtcagatttctgagtcatggtctgaaaagcagtcaatggcaatgtagcttggactggctcctcagggatgaaggcattagacatggaccagctgcttctcctaggagcacaaagcacttgaaataattcattttaatccagttattttcaatctcagctaccagaggcagcaaagattttgcaggaatgaccataatgatagttaatatttagtgagcccttactaaatgccaggtgctgtctgccaatcctcaaaacaactcactggcaggaactcaccattttacagatgaggaaattgagagagagacagctaatatttttgttgagcacctccattgtgaagttctgtccgggaacttggccgacatcattatttgcaaggctccacaacagtcttgcaaaatgggcaacacagacgtcatcttacagatgaaatgtgggctcagagccattagataacttgccagaggccaggaggcagaaaactggaggagctagggtccagcttggacttggcacactccatctgtcccactgcatcccaaactgaagtcgggggaattagggcaaaaaccaagtcctctggctcctcaatctctctagccattagatgactctcccttcaagtggcaagtaggaagtttcacgtggttctccttgccaaagtaatgtcctatataatacagccaaactatgccagggtacaagggcctcaagtttctttgcactgacaattccccagccactaacatcactgaattcttcttggtggggtgatcatccctgaaccttgtgactatttcctctttcaggaatgccagcagagaccaccatagccatttgctccatgatcatgggtggagtatttgagaagtttcccaaactgaaagtgtgtttcgcacatggtggtaagaccctatctttattagtcagctcaggctgtcacaacaaaatcccacagatggggtgactgtaagaaaacagaaatttattttctcacagtcctggaggctagaagtccaagatcaaggtgctggcagggttggtttctagtgagggctctcttcctagcttgcacatggccaccttcctcacatggcctttggtttctcctccttttcttacaaggacatcagtacaccagtcctgttggattaaggccccaccttatgacctcatgtaaccttaattatctccttaaaggtcctttctccaagcacagtcacatttggcattagggcttcagcatatgagttttgaaggaattcagttcgtaacatccttccagccatcattctagtcacatgatggtttaggaaccaaattctacttttgtaggcaagtttagttttgtcattgttttttttttttctgttttttttatttaaatccctctagttagatcatgagctctccagtctacaatagtccccactattcttcattgtttacaaataggcctatttcattcttttacattgtctgcctggtccccataggtagttgaatttgtgacccttcaacagacagacacacacacacacacacacacacacacacaatcaaactacacatgttactcgctaacatgcctttcctcctcaacagcatagagaagacatctttccaggtcaacaaatacagagcttcatcattttttatggtgtcatgtatggccttatatttcatggatatgccatcatgactcagatagcccccgactgataggttgtctcaatattttgctattataatcacactatatttgaaaactttgattacatatctttacacacttgccttcactcttttttttttttttgagacagagtctcaccctgtcacacaggctggagtgcagtggtgcaatctcggctcactgcaccctccacctcccaggttcaagcgattctcctgtctcagcctcctgagtagccatggctacaggaatgtgccaccacacccaactaatttttttgtatttttagtagaggtggggtttcactgtgttagccaggatggtctcgatctccagacctcatgatctgccatccttggcctcccaaagtgctaggattataggtgtgagccattgtgcctggcctgtcttctctctttaagatgaatttctcaaatctgaatttctagatgagttaatgccatttcttccatcatctcccagcattcagaacacaataggtcctctgtaattactgttaatcagctggcctacagtaacttcttgcatataacatcaagactaaaggaatcctttacaatcaacactagcccctcagtaatgggttttacttgcaggtggtgccttccccttcacagtgggaagaatctcccatggattcagcatgcgcccagatctgtgtgcccaggacaaccccatgaacccgaagaaataccttggttccttttacacagatgctttggttcatgatcctctgtccctcaagctgttaacagatgtcataggaaaggtaagcccagtctgccacttggatggcttatggggagcagaatgctgcatcagcaacccattctctctcctttggcctctctccaaaaaagggatggaagaaaggtattagatgaaaggagagagacagtgaggtttgggattaggtttgctcacacaggggattctctccagggtctccctccacacagagtacataacactaagaaactattatatatgccagagaaatcccagatcatctacatggctgggtattcccccagatcagctcctcttccttagcgacatccctatatgcacccaaaatgacacatggcaatgtagtaagcaggaaaggggcacaagtttcaaagtcaaattgacctgggttaaaatcctggctctacctttcactagttgggtaaattgtgaatacaactgtcctcatccactacatggagaaaactggaacattgaaagtgtggaaaatgcatagttgggaaattgcgctggacagggagtcaggggaagatgatgaagggtcttgtgtatcatgccctgagatttcttcctggaataatatggcttttgattctctcatttaattaaaacaccagcatagtggtactttaaagcgcacaagaaaaagtctttcctctgatgtagtctcctcgccaatctctctgttggtggcacacccaccctttaagtattctttaaaaatgctaactcagcaagttcaagaatttctagggaaaaggccatagtgaaaagtctaaaatattttgtatttcaattccatcttattaacagatatctatagaagatttccacattttcccaagggaaaaatctttggggttaaaagtatatagacatatttaaaaatttgcaatatggtacttgagtttagactctaaggtttaaaaaaatcatgtcgagcaaaaagaggcccatcatttgaaagttgcaagtagtggtttatctccagaatggacactttatctcatattaatgctgactgtttctctggcttgagaaaataaccagaatataaatattaagcattttagcttggtaatcaattatgtggttgagctgtgcctctgagttgtttagcttttgtgtcacccctgcaaacatggatggttagcaattggttgtgactgttgattgtttttggtttggatggagagtgatgagaaggcatgtaagcagaagacttcacagggcagaaactgaaagagactttgtgggctctggacattgagcaatggaggaaaggaagagggaaaatcatgtggaattgggggaagggctgttcttattacatcccatcaagcctagtacctccttactagtattcttggaaattgaaaacaccaggagaaaacaccattgccaaatccaaagcccattttctaagggatactatcagcaccttcagcgagcacccagtgcaatacacattggccaggggacaggagcagaagaggaaaaatatggcaaatgcttcatgttaaccagtggatggactagttggtgagcacgtgtgaatatattcctattagggacctccagaaaaactcagcaggtactttacaaacttcttgatgctgagatcttacattcaaactgtgaaagcttgagctataataatttgggcatcaaaagcaaatgtgaccttattttatgtgatctcacaggcaggtgaatccaggacatagaagcggtatatattaataatttaggattctttttaaaatattaatacttcttcattctagtcatattcacattagcaaattcgcttttaaaaacaatccccatatcagaatggctaaggaaagtcctagctagacatctgggctagagagcaacctggccagatttgagcaagaggacaaaatgccgtggagggaggtctctagaaagaaaataatggaactgatgaattatttgatctgtctgagagttggaaacaattattgccagacatttaacagatctgttgatgcattaggaacaaatgcaggatatacatagaaaattaagctaatgaaagaaaaggaaataatcaactccaagaaaacaaaaaatctacatgagggcagataatcactgtatattacttgactcagcagtgagcaatatttgtagtcataatagggtaaatattagtactggtttaaatgaaaatcataattctattaagaaaatagagtaagaaagaaattctcaatgatcataatgggaaatcagtaaatactctctaaagttagtaaactaagaaacaatagtataagcttattatctgggaatataaaggtaattatcaaacgatgcatgctaaaatggtaaaagtggctgccttaggggataacagttgggaaagtgagtcagggtttcactctgttacccaggctggagcgcagtggcgtgatcacagctcactgcaacctccacctcccaggctcaagccatcctcccacctcagcctcccaagtagctaggactacaggtacacaccaccacacccaactcttttttttattttttgtagagacagggttttgccatgttgcccagcaggtcctggacttcagcaatctgcctgcctcaacctcccaaagtgctgggattacaggcatgagtcaccataactgacccaaaaagtgtttttaaaaaagagctgcttttgataataaagatattttagtaatatttgattgtttatgtataaactttactttgataaatataaattttaaataacatcttaagaatacacagatacatgtcatatataaaaaaccaaaaccattattgagcacctgctatttctaaaaccctgtgctatttggtcagaaagtatttaaatggcataatctcttggttgcataatctcttggcttccttccacctctaaaattcttttgcttttaaattctttgctttgatttttaaagacggatacaaagaatgcaggttatagattatcagtctaacactgtgagaaatacaaaaaaatggaaaactatattgcctccctatattaacatgatcacagaaaatacacttcactatttaagtggatagatttttgagaggtcggtcatacgctcattatgagtatatcataattctggctagatccattggtaacctaccgctgcataattacagtcatgcatcacttaacagtggagatatgttctgagaaatgcatcattaggcaatgttgtggttgtgcgaacatcacagtgcccttacacaaacttttatggtacagcctactacacacctaaactatatggtatatagcctgatgctcctaggctacaaacctgtacatgttactgtactgaatactgtaggcagttgtaacccaatgatacatatttgtgtagcgaaacatatctaaacataaaaagggtacagtaaaaataagatgtaaaagatgaaaaatgtatagggcacttaccatgaatggagcttgcaggactggaagttgctctgggtgagtcagtaagtgaatagtgagtgaatgtgaaggcctaagatactgctttatattactgtagatttcataaacaccctacacttaagctacactaaattttttaaaaattttctttcttcaataataaattaaatttagcttactgtaacttttttactttttaaaattttttaaactttttgactcttaataacacttagcttaaaataagaacacactatacagctgtacagaaatattttctctttatatcctgataatctctcttatattaaagagaatttttttttgctttttaaacctttttgttaaaaactaagactcaagtatacacattagcctaggcctacacagggtaaggatcatcgtcactgtctttcacctccacatcttgtcccactggaaggtcttcggggtcaataacacagctggagctgtcatctcctacgacaatgccttcttctggaatacctcttacaggacttgcctcaggctgttttacagttaattttttttaataagtagaaggaacacactccaaaataatgataaaaaggataacatagtaaatacataagccagtgacatcgtcatttatatcattaccaagtcttacatactgtacatcattatctgtgctatacttttttttctttaagacagtctcactctatcactcaggctggaatgcagtggcatgatctcagctcactgcagcctccacctcctgggttcaagcgattcttgtgtttcaacctcccaagtagctgggattacaggaatgcaccaccacacccagtgtatttttagtagagatgggtttcacgatgttagccaggctggtctcaaactcctgacttcaggtgatccacccaccttggcctccctaagtgctgtgattacaggcatgagccactgcgcccagtctatctgtgctgtacttttaataagactggaagagataggtttgtttacaccagcatcaccacaaacacttgagtaatgcattgcacataataatagtagtaataatgcatcacattatgatggctataatatcactaagcaatagaaacttttcagctccattataattttatgggaccaccatcacatacacagtctgtcattgaccaaaacatcattatgtgatgcatgactgtaattaccccaaaacttagtggcttaaaacaagccacataaacaataataaacatttattatctctcatggcctctatatgttaggaatttagaaatagcttaactgacccaaaatctctcaagaggtgagacaggcaaggtgtcagtcagggctgtagttatctaaaagcttggctggggctaaaggatttacattcaaggtggattttacccatgagtggcatgtcagtgcttggttttggtgggaggcctcagttcctctccaggtgcacctcttcacagctgcttgagtgtcctcacaacatggctgctggatgcccccaagagtgagtgatctgagagagaaatggggagagatggtaatcaagacaggagggagggagggaagaagaggggggggaaaagagaaaaagatagagagagattgaacacacaccagagagaagctatcctttttatgacctagagtcagaagtcatatagtattaattccatcacattttattcattagaagcacgtcatttaatctagctcacattcaaggggagtagaattagatcccaccttttgaagggaggcttatcaaaggatttgaaggcatattttaaaactacctcattccactctctggccacaaattatttatattcctcctaaatgcaaaacaccctcacccctaccaagactgccccaaaagtctcatccatttatagcatcactttaaagtctaggattttgttgcttagatgaactggtgtatgaggctcctcatgtatactttctccaaatctgaagaactgtgaactgaacagacaagttcctttgttcctcacacactcaatataaaatggcgagacaagcataggatacttgctatcctttccattccaaaaggggaaaacaagagcttcagaggaggtcactagccactagcaagtctgaaatccatcaggcacatattggtagttcctttattagaactcaaagcatagaaaccattcaacaaaaacattcttttcgttttgttttgtttttgagacagggttttgctctgtcatcctggctggagtgcagcggcaccatctcagctcactgcaacctccactccccagactcaagggatcctccagcctcagtcccctaagtagctgggatcacagatgcatgccaccacagctggctaatttttgtatattttgtagagacagggttttgccatgttgcccaggctggtctcgacctcctggactcaagtgatccacccacctcagcctcccaaagtgctgggattacaggtgtgagccactgtgccaggccaattcaacatagctgttgcttctacattctcagtcatctttccttttccataaaagcctgtgtttgtggctgagcagtttgtacagactgcttaatgcctgtacatgttttatagtccaaaggtttactttccttttttatatctgttcctttcagtccaagctggtggtgcttctaatacaattcctttaaaaaccaaatgagtctttcatgaatcttattaagtttcacatcattaggcaaaagacttagccacaaatctctgagaaaagcccttctctacctttgggtttctgctaaggtggctgagagacaacagccttaagcttctgagaagccctttttgtttgactgaatggctttttgaggcacttcctaaatcttttgaggttataacaaagacattatagtcacatcttggcttaatttttagactctatttttctgattatgccctggatttagtttttgccagaaatccgtatcttaactttagcatcatttgctataggagaggctggaaatattcaaacccaacaatccccatagtaccagtccatggctcaggggttggggacccctgttgtagttgacagcattgctaaatttttgccaccaccatagcaaggatcacccttcttctagtttccaatcacattttccccattctcctttaagcctttactgcaaccttctcacaggccattgggcttctaataagagtctttacaaggacctttggtcttttattattctcaaagtccttcctacttcctcctactaatcagttccaaagccactcccacattttcaggtttttgttatggtagcaccaaatttccaggaaccaaactctgtattcgttacatgctgctgcatcacaaattaacctaaaacccagtggtttaaaacaagaatgcatatttactatctcattcattttctctgggtcaggaattcaggaaccctctggcttggcaattctggctcagggtttctcttgaggttcaataagatgactgcagaccaccaatttcttctttctttccttccttgttttattttatttacatgctacttacacaaacttaaccctaaactctccaccagttttgtaactttcctctcagtacattcagacgcatagactaacactagtccattaattctgtgttcttaaagaaatatcttcaggagccttctgatgctctaattgggactgagttgctatttaaacctgctgcacatctgtcatcctgaaatctctcttcatgaggatattctcaatctctctcattggattccttgtttgctgaatctcatgattttcccatttcttggttttactccttcatcttggtggacaacatccttcaataactttcagagaaggaagtatggaggatgaacttttcaaaaccttgtttatctaaaaatgtctgtattcatccttcgcaatgacctaattgtttggctaggtaacaattctagcttggaagtcgtttctttccctcagaattttaaagtcattgttccattgtgttccagcttttagaggtgctgttgggtaatgcaatgacatcctaatttttgaaatttgtgtaaaacctgcttctctcttctccttaccacaacttcaaagagtctaaggatttctttttgtcctgaaatttcacaatgatactacttgatataggtctattttcacccattaccctagtcatttggtggatcctttcattctgtaaattttcttaaattatgtgttaatgatttccttccctctgctttttctctctagaattcctattgttctaaagtagaacctatttttgttttctgtcttacataccacctctttgaactttcgttttactttctgggagatttttttcaactttatttaaaaaggcttctatttagttggtctcttaatttccaaaagcttattatttttcttgttctctgaattttttttaatatcctgtccttgttgggtggatgcaataccttttcttatctctctgaatatagtaagaattttaggaagtttgattatccctgcaagtcttcctccaggtggcttttttgtctgttttttaaagtctcggtctttcatattaaatgctttcctcatgtgtctatactttttgagcatgtacaatgttttagtgcctgactcttggagttgttagggcaagacagaggtaataattgcacagcactgtgaatgtgctctatgccgatgaagtgtacattttaaacagttaattttgtgttatgtgaatttcacctcaattttttttaacgggcctgtttctgcaagttagactttccgccaccccaaccaaaatatctattcatatgttattcactttctttatttatttagagacaaagtctcactctgtcacccaggctggagtgcagtggcatgatctcagctcaccgcatcctctgcctcccgattcaagcaattcttgtgcctctcagcctcctgagtagctgggattacaggcatgagccagaacacctggctaatttttgcatttttagtagagacatggtttcgccatgttggccaggctggtctcaaactcctgacctcaggtgatctgcctgcctcagcctcccaaagttccgggattacaggcatgtgccactgcacctggcccttttctttatttttaatggagaatctcgaaattcttgttctgtaaaatagaaagtatttttattttgtagtaaaagaaacggttcacttttaggagcaacactgtcagtttttacaacaataagcagagatatgatcttgtcttgggcatttgatctgtgagtaagaagatgaacctaagctggacatcattcaggcccaatggataaaacttcaccatcccccttctgtacctctacatctttcatattcaggactactctattcaaggggttctgaagggcaagggtgatccaaaagcactgaaaagtgatttatcattaaagaaagatttgaatatacccacagctattgtaggcagcagaccataccatacgtattagaaatatttccaacatggcttaaaacaaagaatttctcaggctgcgcataatcccaacactttcggaggccgagatgggaggatcacttgaggtcaggagttcaagaccagcctgcccaacatggtgaaaccctgtctctactaaaaatacaaaaaaaaattagctggattacgcctgtaatcccagcactttgggaggctgaggtggttggatcacttgaggtcaggagtttgagaccaacctagccaacatggtgaaaccccatctctactaaaaatacagaaagtagccaggcgtggtgacgggcacctgtaatctcagctactcgggaggctgaggcatgagaatcacttgaacctgggaggtggagattgcagtgagccaaaattgcaccactgcgctccagcctgagaggtacagtgagacttggtctcaaaacaaacaaaaaaaggtgggggagggtacctgcctaattcccacctaacttgacatttaaatttgtttgaatacttaggcttccaagtattttggttacaagatattttcctgtgtactggaatcctcaatagagtaaaaatacttttttgaagcctgtaaccttcctttctgtcttctcaagaagttgtggtaagcgagagagttcaagtcctggctctactactagttaggtggtgaccaaatatcaagtcacttacccttctcagcctcagcttctacaactctaaaatggggatgataaccaggcagagttggtgtgacgagttaacataatactatgccaaaggactgtataaatgtcaagagattttcattacctactccagcactttacaaatagtaggtgttaagttaatgtttgtttaactgaattgtataatgatcttgggaatataaagctaattttactttgcattgattgaattaaaccaggctctttctctgggaaattatgtctcagggaacaaactaaatctctggtatgctagaatttttggattaagttatgttataacagagtatgctgtatttactgcaaatgctactaatgagatatgctaatgggaagataattaagtgttccttttccagaagaaaaaatgaaactttctcccacaattagaaccattttgtaagccacatctttgtgtttgcagaactccctaaaaatgtgaaaaagttcatgcatcccagcaggtgagaagtttatttcttttccctgacaggaatattaatcactattattatcagctcagtaagtccttgacctcatagggagatgtgtgcagctgctggctttggagagggaaatgtatgttggagcaaagtgttgatatccactgctttactgcctaataaggaaagccagcacctgtccagaaggtagaattccaggattccagatgaggcagccatggtacctaaaatgtccatcattagaattattccttggggtttaatacagtctttagaaatgccctactaaaatggagatgttgtcaaatgctacattagcacagatatctttaaaaactggtgcatgattatgacggataccaagggaataggatctgggatcacagacaaaaaaaaaacagaagaaatttcagcttttgggaggccaagatcagatatgttatttgggaacctaagatgtgaggacagctttgggtatcccaaggagctaaggttaatggaaatggaatcaacagtcatccaaggccatatcatatgactccttaacccaggattcctcatgtaattcatttaaaacataatcaatttgcagttatgaaataacaggtgatagaactagcaatagaaaaagtcatttttttagagacaaggtttcactctgtcgcccaggctggggtacaatggtgcgatcatagctcactgcagccttgaactcctggactcaagtgatcctcccaccacagcctcctgaggagctgggacacaggtaccatggctggctaaatttttgattttgtagagacaaggtctcaccatgttgcccagactggtcaacataggttgcttctggctgaaagtgatcccccccacctcagcctcccagagtgctacaattacaggtgtgagtcactacacccagccaaaaaagtattttaacccaagtatttattaggcatcaatcaacaggagactggcattactcaatagagtatgtgaccttcatcctacaggatcatatactcttgaagaatctcttccctcccattttttcttgctactatctcttctccctctgaacaagaaactcaataaaaatttcatttccaattttgtatgcctatcgctttctctcttgcgaaattactgacaagtcagaaatggtcaaagatttaccagaagtttcaatgagatgtacagacagataacaggtatgaaaaatgaaaaattcacaagccaaatacaagtacatacaattatctacttgtacataattacaagtagataattaacctcctacagggaggagttgtgaacaatagttactaaataataattcaacattgccaaactctgagtgtgatgttctgcaatgggcatccaaaatcaagttaggaaggaaagcagggaagtgtcttaaccagaaggacaaattgcagaagggtgattttcatttctgcttcagaattatttgctttctccatattaaaatggaatataccccttcttaaaatatatttatatccaagaaggccataatactggaaatggaagaattccagactagaaggcaaaattaatttctagacttcattttcatgttaatgtagttgacaaatgtagtgaaagcaagggacttttaaatattatgttgtgttttggaattgtaaacagctttagcaagaggagtttagaaataaggacaaatgaacttccagtgaataccaagcagacaattcagaatgagatcagctgttgccacagatgtaagtagacataactttgggactttaggactattatcagcaggtgtatttgtttggtttcatacagcaatgagtacagaaatctaaaaataagacttgttagtctaccatggccttcctctaaactgtattatatactttcccatattatttcatataaatgtatttataaaacctaggaaaatcttttttgggggtagaaatcaaagtgtcatttatcctcaaatagctcaaatttacagtatttaaaatatatttaatatttcaggcctaggccaggcacagtggctcaagccagtaatcctagcactttgggaggttgaggtgggtggatcacttgagctcaggagtttgagaccagcctggccaacatggtgaaaccctgtctctacggaaaattcaaaaattagccaggcatggtggtgcacacctgtagtcccagctacttgggaggatgaggtgagaggatcacttgagcctcggaggcagaagttgcagtgagcggagatcatgccaccgcactccagcctgggtgatggagtgagactttgtctcaaaaaatatatacatatatatatttatatataatacatatgtaaatatatatttatatataatatatatataaatatatatattatatattatatttatatatatatttaaatatatatatataaatatatatgtaaatatatatttatatataatatatatttacatatatattatatataatatatatgtaaatatatatatttatatataaaatatatatgtaaatatatataatatataaatatatataaaacatatgttagatatgtgattttttttcaggtctagttagtcagacttcatctttcatatattcaagcatgcattccttcaacacacacacatttgttaaagtagctgtcatattgattatgaacatgtatcagagttttattctaaacttgtatcaaaataagaaacatgctcaaaagtccaattcaaagaatccttcttacaaacacattttatagagaaaaaaatcagcagataaattattaaactagattttttaaagaaggaaaataatatccagttaaggatgacagcctctttgccttattggttaaaggtcttaaaccagtttcaagagtaataatcagtcgagtgggtttcccgagagggtcttttaagctcattactctattagaaaattgctcaagtattttatcaggaaaagaattatttcccgaggaaaagcagctagtcacatcagaccacaaagttctgcccccacaaaggttcgggacccctttatttctcacatttattgggggctgcttatgccatgctttaccttctaggcaatggaaaactattgacagggtttaagcagagatatgccatgatcaaatttgtatttttaaaagaccattttctccactatttagtattgactgaagtggatgagactggaattccaggaataggatggccttaacttttgaaaatcagtgtaattcaccatattcatgaaataaatagtatgatcattttatagatgaataaaaagtacttggcaaaattcattacccattcattattattattattttttttttttttttttttttggcagagtctcgctctgccgcccaggctgacgtgcagtggcgccatcttggctcactacaagctccgcctcccgggttcacgccattctcctgcctcagcctctcgagtagctgggactacaggtgcccgccaacacgcccggctaattttttgtatttttagtagagacggcgtttcaccgcgttagccaggatgatctcgatctcctgacctcgtgatctgcccgcctcagcctcccaaaagtgctgggattacaggcgtgagccactgcgcccggcccatgatttttaataaaacaaaactcagcaactaagaatagaaaagaacttcctcaatctgatagagattgtcataaaaaaaatcatagctatccccatacataatggtgaaatattaaacacctccctaagatggggagagaggcaaacatgtccaccctcacgccttccaatcaacaatgcactggcaatcctacccagtacaagaaaacaagaaaaagtaaaaaggcatacatacaaagaagtaaatagtctctttggcagatgacatgacataattgtttatgtaataaatttttaaggaccctacaaagcagttactggaactaataagtggctttagcaagattgcaggacataacggcaatattttaaaaatcagttgtatttttatatactagcagcaagcaattataaattaaacttttaaacaattcaatttataatagtgttttaaaaaaatactcagaaataaactgaaatgatgtgtaagacctctacactgaaaactataaaatattgctaagagcaatttttaaaaatctaaataaatggaaagttctatcatgtttatggatcagagaactctacgatgttaagatatcaattctcctcacattgatctatagagtcaatgtaatccaagctaaatctaaaaatctaaaatgtatacagatatacaaaggactagaagagccaaaataatcttgaaaaagaaaaataagttaaaaacttgcattaactgacctcaagggttactacagaacaacagcaatcaagatagtgtgatattggcataaggaaagacaaatagattaatggaataaactaaagaatccagatatatatccattctttttctttctttctttctgagacagggtctcactctgtcacccaggatggagtgcagtggcacgatctcggctcactgcaacctgtgcctcccaggttcaagtgattctcctgcctcagcctcccaagtagctgggattacaggcatgcaccaccatacctggctaatttttgtattttgggtagagatggggtttcaccatgttgcccaggctggtcttgaattcctggcttcaagttatcctcccaccttggcctcccaaagtgctgggattagtcatgagctgccgtgtgcagcccagaaatatattcatccttatacggtcaattaattcttgacagagacacgaaagcaattacatggggaaaggaaagccttttcacaaatggtgctgaagcaagaatccatcatatgggggggaaatgaaccctgaccctatctcataccagccatacacaaaacttaatttgagcaagattatacaactaaacaaaaaagctaaaacagtaaagcttcaagaagaaaatatagaagaatatctcttcaacctggaagcaggcaaaaatttcttggacaagatgcagaaagcaataaaaccataaagaagaatttgacaaattagacttcatcacattaaacactttagctcatcctaagacaacattagcaacatgaataagtaagccacagaatgataggaaatgttcataaagcatatatatgacaaaggacttatatccaaaatttataaagaactactaaaactcatgatgaaaagtccaacaatcctatttaaaagtgggcaaaaggcttaaatggccactcccaaaaagaaggtaacaattagccaataaacatatttaaaggtgctcaacatcattagttcatcagaaaaatgcaatttaaactatgatgagaaaacactgcacatccactgaatagccaaaaacaaaaaagactgagaactcaactatgagcaaggatgtaaaacaaccagaattttcacacattgttagtagaatatactcctatcctatcacccaacagttttactcctaggtatttacctaagagaactgaaaatacatatccacacacaaaaatacagcttgtataaaaaagttcttggcagctttattccaaatagccaaaaactggaaaaagtgttaaatgtccatccacagaagcatggataaacaaattaccatatatctgacaaaatggaatactactcagcaaaaaacaacaacaaaacagaaaagaaaaaaataatttgctgatacacactacaacatagataactcttacaaaaggctgaatgaatgaagctggatcccagagagtgtatactgtatgactccattcatatgaagttcttgaagaggcaaaactagtctacggtgaaaaaaaaagacaagttattacctttagtgggagaactgagaggagagaatgaccaagaaggagcatgagggagctttgtggggtgatgaaaatgtgctgtattttgatagggatgtgggcaatgccagtgtattctttgtcaaaaatcagcaaattcatcactcaagaatttgtgttttactctatgtaactattacttttaaaaaagacattgaatgctagctagtagatttgctttttgcagtggtgtgggttaacaattctgaaaatacttcatgtgcattctaggctcatgcaaatgaagaaacaacatgagtaaaatggcaggtgtctcactgttggataaggtaattagaaatctgaagagtaggaagaagatgagaaggtaccctgcagtgtttggattggaaatggatatattggtataatacatggtttttaatatagaaagatatggaaatatagatatgtgtgtgtgaggcaggtatttccacatcagtagcagttatcacttacagcgcccagatcttggtttctagttaccattttccatcaaaggaagctagtctgcttggagaaaaggctgtttccaagacagagaaagtataaagtgagctagaacattttgtacctgaaagtaaggaagtacggtcagccctctgtattcacaggttccacatccacagattcaaccaactgaattgtccaacaggtcaaaaatagttttaaagataaaataaaataacagaataacaaatacaaatataaagaataatacagtataacaattgtttacatagcaacattgtattaggtaatataagtaaaggatgatttaaagtatgcaggaagatgtgcataggttatatgcaaatactacatcattttatatataggatttgagcatctgaagactttggtcttgagggtaactgtactcaaagaatggtggggaaatagcataaggatacaggagtcaacctgaagaggtgattcacattgagcaaacctgagatgatctggctatcaaaataaacagtgataataatgaattataaccaattggataaaattaagtccatgagtccaaaatgatataaataaaaagaatgaatatattaataaataggtgaacatatatatttaatttacataagttaatgtgtttgtatatatgaagaaatctcttctttataatgaatatagaaataacaatagttagaaaattattactgaatgataataccagtggatgaaagttggaaaaggacaagatatttaaatgatctcaaagtggctccccacaaattgcttattaatcatgaagagaaaaaaatggtgatttcacattagagaaacccagcaaacaccaacttaactaaataatcaaaattaccaatactaagacaaaccgacatgatatgccctgatataatgcactgaataagactcaatatcacttcggtagtattcctatcccaaatgcgtaatttgtacacaatcacgaggaaacatcagacaaacacaaactgaggacattctataaaataactaatctacaatcttcaaaaatatcccagatgaagagtgacaaaaaaggccaactgatccaaattaagggaaacttcagagacataacaactaaatttaatatgtgatcatcaattagatcttcgactaagaaaaataattagctataaatcacattatgggggcaattgacaaaatttgaatatgaactatggataacgaaataacactgttatcaatgttaaatttcctgattttgagaagtatactgtggtcatataaaaagtatccctttttttaggaaataaacactaatttatttaggagtaaggagccatgacatctccaactgacatatagctcaaagaagtgtgtatatatacataaatatctatgagaaaatgataaagcaaagatggcaaagtataaacaattgttaaatctgggtgaagattacatggaaggttcctgaattttcttgcaacatttctgtcagtttgaaattctgccaaaataaaaaaaaattccaccacattcattaatcagttagtgaataaaaaataggagttcagactagtcaggaaaccataacatatctgtataactattcatgttctttgctcaatttttaatggggttatttgtgtggtgttttttgctgagttctttgagctccttataaattatagatattaataccctgtgtcaggtatacggttttcaaatattttctcccatactgcaggttgtcttttcactctggtaattatttcttttgctgtgcagaagctatttagtgaattaagttccatttgtctatttttgtttttgttgcttgtgcttttgaggtcttagtcatgaattatttgcctagaccaacgcccaggagagttttccctaagttttctcctagtatttttatattttcaggtgttgcatttaaatttttaacccatcttcagttgatttttatatatggtaagagataggggtccgagttcattcttttgtatgtggcaatccaattttctcatttattgaaaaaggtgtcctttccccagtgtatgtttttgtcaactttgtcaaagctcatgaatagacacacttcaaaagaagacatacaaatggccaacaaatatgtgaaaaaatgtttaatatcactgatcatctgagaaatgcaaattaaaactacaatgagatatcatcacatgccaatctgaatggctattattaaaaagtcaaaaataacatattggtgaggaaatgcaaagaaaatgcttatacactgttggtgggaatgtaaattagtacaacctttatggaaaacagtattgaaatttcacaaagaactaaaaatagaactacaattcaattcagaatcccactactgggcatctacccaaaggaaaagaaatcataatagcaaaaagatacctacacttgtatgtttataacagcactatcacaatagcaaagaaatggaattaatctaagtgtccatcagtaaatgactggataaagaaactgtcatatatatgcacaatggaataatattcagccataaaaagtatgaaatcatgtcttttgtagcaacatggatggaactggaggctattatcttaagtgaaataactcagaaacagaaagtcaaataccacatgttcttacttacaagtgggagctaaataatgtgtacacacagacatgaagtatggaaaaatagatactggggacttggaagggtgggagggtggatggaggtgaggatgagaaattacttactgagtgctatgtacatcattcaggtgatggttacactaaaagcccagacttcaccattatgcaatatctccatataacaaaactgcacttgtaccccttacatgtattttttttttaaaaaatcgggtataactggaaaacagtgtaactcatttagggctccagcagaaaataagatgacatacatgaattgggaaaactaaactagtaaagggaaattaataaagggattattgacaaagttgtgaaaagctccattactattccaggccaaaacttgaagctagagaggctctgtaaaaagggcctgtgctgaagtcttaggtttctattgctgtggaaaaaataaataaataaataaataaataaataaataaataaatccctgtggacaggagctgagacttctagttggaggctagatgactccatggaaggcgctaggtaattaagtactttcctttcattctacaatctcctgcctgtgttgctcattaactaaatccatctggaagcctagggtcaagggagtccattgtatacttcatacaagtcagtctccaggggacaagtaggagtgaagaaggatggaaagttgatctggaagagcaagcagcagatatccagaatgaaggtggatcaaggtgggggagaggccaagagagcaaaagcaagaatgagagtgacagaatagaaatgaacatgatgttgagtaaatacttagatgacaacttcaatattagcataacatgctgagttttaattgcctgtgaagcagccaagtgtggctgtccagcaggcagtcacataccagagcttgaagcttaggatgagactgactgcccaagcagcacaaatagagtgacaatgacagagaagaagtaagtagttaacacttagatttgcatttttcaccacccatttacttttgattgaatgcatttgattttttctttatcactcactgaaactgcatttaataaagctgccaaatccaacagacactatccagtccttatctttgtcttcctcttgtctcttgtgaatcattacttattaaataccttttcttccaatatatcacactgcattttttttttttttttttgagacagggcctcgctctttcactcaggctggataatcatagctcactgcagcctccatctcccaggctcatgcaatccttccacctcagcctcccaagtagctaggactacaggtgtgtgccaccacaccaagctaatttgttttattaaggtctcactatgttgccaaggctggtcttgaactcctgagctcaagtgatcctcctgcctcgccctcctaaagtgctgagattacaggtttgaaccactgtgctggctacatatttttttagatagtacttctttctagttctctttccacctccctgtctctctctgcctcttttgtaggcattttccccctgtcctccatttctgcaatcactccacccaccatgttgatgattcctatgattctatccttagccctcctcataaaccacggaggccagaaggcagtggaagacaaatttaaagtactaaaagaaagaagaaaaaatactgtaaccctgtaatgtgagaactctatttcaagcaaaactatcctttaagaatgaaggagaaattaagacatttctagatgaaacaaactgagctaattcatcattagtagacctgccatacaagaaatgccaaagggagttctttaggctaaaatggaaggacactagacagaagaagtcacaaggaaaattagaaaacattagacatgaatagaatacaaaaacacaacattctaaaacttatggatgcagctagaagtagtacttagtgaaaaatttatagctgtaaatgcctatattaaaaaagaagaaagaccttaattcggtggcctaggacttggccttgagagctagaaaatgcagagtaaactaaatcccaagcaagcagaaaaatatatataaatattagagcagatataaaagaaatagattatagaaaaacaatagggaaaatcagtgaaaccaaaatttggttctttgaaaaaatcaacaaaatcggcaaacctttagctagactgaccaacaaaaataaagaaaaaagattcaaattactaatactaaaatcacaaatgaaataggacggcagtactacagaacttacagaaataaaaagaattataagtaaaaatttgagcaactatatgacaacaaatgaaataacctaaatgatttatgaaattcctagaaagactaacaaaactggctgaagaagaaatagaaagttcaaacaggtctatattaagatactgaattaataattttcaatcttcccacaaagaaaagctgatgaccagatgtcttcgctggtgaattctatgaaaaatgtaaaaaagaattaaaacaaattcttcaccaatgcttcaaaaaatataaaagagctcaataaacaaggagtggaagggaacatcctcaacctaataaaaagcatcatgaaaaacccacaactaacatcacacttaatagtgaaagactgaaaggctctattctcatcacttctattcaacattgtactggaggctctagtcaaggcaattaggcaagaaaaacaaagaaaaagcatctagattggaagagaaggaaaaaaattttctctacttgcaattgagacggctttgtatctagaaaatcctaaagaatccacaaagaaactattagggctaatagattcagcaagcttagagagtacaagataaataaaaaattaattgtatttctatttgttagcaatgaataatccataaatgaaattgaggacacaattccatttataatagcatcagcaagaaaaacatttgtgaaaaatatagccaaaaaaggcacaaaatatataccctgctgtaatccaagcactttggcaggccaaggcgggtggatcataaggtcaggagatcaagaccatcctggctaacacagtgaaaccacatccctactaaaaatacaaaaaaattagccgagtgtggtggcatgcacctgtaatcccagctactagggaggctaaggtaggagaatagcttaccaggaggtggaggttgcagtgagctgagactgtgccactgcactccagcctgggcaacagagtgagactgcatctcaaaaaagaaaaaaaatatatatatgttatatatataatatatatataacatatataatatatatatatgttacaaaacattgttgaagaaaattaaagaagacctaaatgaaaagacattccatgttcattgattcaaaaacttaatgttgctaactggcaataccccccaaattgatctacagatccaatgcaattgctatcaaaattccagatgtcttttttttttggcaaaaattgataagctgatccaaaaattcatatgaaaacgcaagggggccaggtgcagtggctcacacctgtaatcccagcactttgggaggccaaggtgggtggatcacctgagatcaggagtttgagaccagcctggccaacatggcaaaaccctgtctctactaaaaatacaaaaattagctgggtgtgatggcgtgtgcctgtaatttcagctacttgggaggctgaggcaggagaattgcctgaatccgggaggcagaggttgcagttagccaggatcgcaccattacacttcagcctgggtgacaagagtgaaactccgtctcaaaaaagaaaatgcaagggatccagaatagccaaacaatctagaaaaaacaaaattggcacagtcacattcccaacttcaaaactttctacacaactacagtaatcaagactctatgggactagcctaaagacagacataaagatcaactgactttcaacaagggtgccaatacaattcagtgtgataaagaatagtcttttcaacatatgatagtgagataagagtagatatccacatgtaaaaaaaataaataaagttggactccttctttacaccatgcaaattaactcaaaatggatcaaagacttaaattgaagaactaaaaccacaaactcttagaagaaaccataggtgtaaatctttgtgactttgggttaggcaatagtttctttgctatggcaccaaaagtacaagcatccaaagaaaataatagatgaagaagacttcatcaaaatttaaaacttttgtgcttcaaaagacaataccaaggaagtaaaaaagacaactcaccgaatggagaaaatatttgcaaatcatgtatctataaggctctagtattcagaacacacaaagatctcttatagctcaatgataaaaagataacaaaatggacatgaatgtacacaagggatcttagtagacatttctccaaggaagagatacaaatagccaataagcacatgaaaagatgttcaacataattacttattagagaaatacaaataaaaactacagtgagataccacctcatacctactgagatggccataatcaaaaagatgaataaccaatgttggcgaggatctggagaaactggaaccctcatacatgctggtgggaatgtagaaagctgcagccatggtagaaaatagtttctcaaaatgttaaacatggactcaccatatgcgccagcacttccactcttaggtacgtattgattcaagcaataacatgggtgaaccttgaaaacattaaactaaatgaaagaaggctacatattatgtgattccatttatgtgaaatgtaccaaccaggcaattctggagacacagagggtaaactagtgttttccaagggctggagggagaaaagaatggggagtcactgctaatgggtacagggtttattttggaggtgacaaaaatctgtggttatataagatgaaaaaaatttttttaaacattctataattagtggaaatgattacacaaacttatgaatatactaaaacccattgaattatacactttaaagggggtgaattttatggtatgtgaattatatctcaaaaaaaaaagaaaaggggatattctgacccccaagccctagtcctactccatggaggaaattaatgttatttgtttcttagataccattcctgaaatagactgtatatatacaaacatatatttgtgggtctataggtaccttattgaaaacagaaatcaaagcatagcagacacattgttctagactctttatttctctttataacttcaagatcattcttctttacactgtaacttggagattattccatttcagcatatgtaagtattctttattcttttctatttggagatattctgtaatttaattggccagtcttttgctgttccaaataatgttgcaatttatttctttgtatatctttccagcacaagtgtatgagtggaatacattttgagaagtaaaatttctggtttgaatttttattttattttactttgataaattgccattattgacataatatctttctcacttgattatgagttccttcagaaaaggaaccatgtctgttttgttgacaagggtacatctaaattctagcacattgtctgacacagtgcttaatatatttgtagattgacaagcctacgtattttattgtataaagtgtcaaatggaaattcaaagctatactgttcaaaaacttatgatccagtttataggaattgtttataggaactgatccagagataggggattttctttttctattttttgtttttgtttttgtttttttttttttactttttatcgagttatttgttttttatgtttcctttcctactctgttaatagtatgttttgaaaaactgtggaatcaattgcaatgtatcattctaagaaagacagaatcccttaatttcatctgaatatatatattttagtaaataaatatcaatttcttatatttcagtattctatatttcagttatttaaaaagagagagaatggggttgatttgcaacaaagagacctaatagtgacacctgctggaaaaaaaaagtcagaataaaatttgaaccattaaatctttttaaaattttagacaagttttatgtttctattaatcaggaaaaaatgtgttatttttatgacaggaatgtttgtaataagtaaacaattgtttacaggaggctctttcatgttttacaaaacaacagagaaatatatattttgttttttaggataaagtcattttgggaaccgattacccctttccactaggtgagctggaacctgggaaactaatagagtccatggaagaatttgatgaagaaacaaaggtataatgtcttttacttcacggctttcttactgacttttcctgctctaattgggtttggtttcagagcactttgatatataaaaacaaagaacagaggaaccattacactgaattccctaaaactattactctatctccataaatagctaaactattaaaggacaaaaaaaatgacaaagctgaaagtcagcctagtacaactaaattcataaacccaagaaagaaagttgtatagaaggatatgacaataaaatatgcctgcatgttagatagatcataggaaaaatgtctaaattttttctatattacttctgttacaaatctaccaatctcaaaagttgtaataactctagttatttagatgatgaaactaaagtcttgattaaaaggatccaaggaatcagatcctttaagtaactagactttattttttttcccggcgtttgacttttaaggcaggtaaatgatactaatatgtgctataatgctaccattacctagtctaccccttagactcctaaaccaagatgagtttaaaatgagatgcagtgtcttcagtttccctctcctttgccactccttccacacccccatcctccaaaaaaataagttcttcctaagaccttcactgcccatcactcccaggagtcagggatggccaaaaataacaatatgagaatatataaactcttaataaatcttacaaaacttttagttgtaatccttttgcataattcttggctttcttctaaactagaatccaaaagttaccttgaactctccctgccttaactattaaagatattgttcatcaaatcttctcaataggcttaaagtacattaacagatgccaagaaaaattcattcttcagtatactagttacaagttattaactgggaaaccttagactattttatacacaaagtgtcccttttggcactaaaagtcttgaactgttaaatattacctactaaatattgttaaatatttacccacttccttcctaaagtaggaagctgtcataaaggcattttttatctttttttttaaacaacaaaggttgaaaatgaaaaactttctattaaccaaaattaaacagaaaccagatgacccacatatcctgattaaaaacttaatggaataatagtaattattattacatgccttttattgtttattcttatgtgcttatcactttcaagttttttctgtaatcttgcataaaggctttatactaacacaaattcacaatgatattctgtacaagggtactcattgtaacgctgtaatactgaaaacaatctttaggggaatagttaaataaatcataatatatccacacaatggaaattatgccaccataaataaattagaaatcaatttccaagatacattaaattttaaaaagcaaggtataaaacaatttgtatagtatacttccatttgtagatccaatacctcttttgtgaaaaagaatctttatatgcctgaatataagtatttgcttatggagtataaacataaaatatctctggaacataaacaagaaactgatcaaactctgggaagaaaaaggcactaggaatgaagtatctattttagacattttgaattttgaaccatgcgaaggtaaataccactaaagaaatttaaaataaaataaataaatccatttgataagtacattggaaggtatagcagtccccccttatcctcagttttgccttctacagtttctcttaccccagtcaaccacagtccaaaaatattaaatggaaaattccagaaataattcataagttttaaattacatgccattctgagtagcatggtgtaagcttacactgtcctgctctctccagcccaagatgtgaatcatccctttgcccagggtctccatgctgtatccactccctccccattagtcacttagtatcatcttggtgatcagatggactgtcgccatattgccatgcttgtgctcaactcaccttattttacttaataatggccccaaagcacaagagtagtaatgctggcaattcagatatgcccaagagaagctgtaaagtgcttcctttaagtgaaaaggtgaaagttctcaacttaataaggaaagaaagaaaaattatatgttgaggttgctaagatcttactttgtaagaatgcatcttctatctgtgtaactgtgaagaaaggaaaagtaatttgtgcacagtatatataggattctatatagcatccacagagggtcttggaatgtatccttcatagataaggggggactgctgtatataggcagatgcattctaccatgaagatgtggagaaagaaaacaagacttgggagttgagtgacttgccaaaggcaatataactggtgggttatagtgtatggatgcgatcccaaatcccttgactccaggatcagatctccatccaacactctgaagggtacctccctcaaaggatacatggtactaagctatcttaaaaggtaaagtacatggttcctcctagcagcaatagtcacttctgaaatcttcctctagaggaggatggcctaagtatgtattggggaagaaccctgagtaagaggtcctgcctcaaatcacccacttttcaaggctgtgtaagaaccctgaagtggtcataatatagaaggacacattaatggtatggatgtcacacaaccccatatatttcttccatcctcagctacatacctgtcctttgcaagctggataaacaaatcagttagggtatcacaaagttacttcttaaatctcttctttcagcagagttgatatagtttatagctggggagtccatttcttatgtgaaaattttaagatgtacggatttgtaccctcatctgagacccttcatttatatcacttctcttgctctgaaaaagcttaacttttatttagggccatgtgaaaacaacaacacatatgtctagcagctgggggatggctagatgacttttgagcaccttttgcagccctcttgtcccacagacctaactgtaccttttctctgtatttgcccccaaatggtccttaagatccaagctgttagagggtccagtttccaaacaagggcacctcctaaggagggctctcccctttataagtctcttctctccccctacaatcaagtttcagatttagatttcaaacagcggggcaaaacataggtcaagaggattttggtaagagattcactgtataacctgctagtatttttctctcatattggggagctgatttttttaaacctgatcaatgtagtacttaaaagtacttaaaaaacaaccaataatgctttaaaatattttcttttcttttcagaataaactcaaagccggcaatgccctggcatttttgggtcttgagagaaaacaatttgaatgactgaatttactacaaaggcaaactttcaaaaggatatctcatttttgtttctaaatatgtatcaacaggtatcaacaaaatcctattttgaactattttactcagaaatgaatgtcccaaatatcctaaattattcataataaaaatgatttgtaagtgttttcattctgaaaagcagtacattatttcatgtgcaaataaaaaatgattttcccagtgctcttttaattaatctggagaaatacaaaataaaatgtcattaatgatttatatggagaaagattcatcctagaagacttaggtaggttgtccattttgaacaaagatatgtgaattggactcaaataacctgttccatctgcctttaacacctaccattagcccagaactgggctgggaatgctttagcctccacaaaataaataacatgaatataggatatccataacctcagggagcttccagaccaattaaggaggtaagagatgttcatggaataattactaagctatcaactttgagtgtcaaagaagtttcgttaagcggaattcactttggtctaaaactgtggagcagatcttcacagagggtggaacatgagagtccaggagatgaataaggaatttttagggttagaggatgggaaacaggaaggcaaaactatgggaacacagctgtggtttcagactgaatgagacatccattttaaaagtttttgtctataaatttactcctaccagaagctcttttgattttaaaataccgagcagaatgtatgaagctaactgtggaaagttaatagggcaataccagggtagccttgttttacccatttcatttatggtcccacttgggctgctgaaaaggaacttggtcctgggatgggtgatgaaatctatggttcatctgcctctggctgaattccaaaatcaagcatggattcattcattattttcccttccattcatctagaaaatcaagagttgagtattgacatgtaatttgtgctgacccctctccagaataaagatgagatctaattcttacttcactatgctcacgccattattttcactttatatagttcattgccccacctccttctcaccccaccccccaccatttctttctaggattttactcacccaccatctgcttattgctccaatctgcccaaaaaggaaaacaaagttgaacaaagcaacaacatgaaccatatgttattttttccttccccaatctttggggataaagtccataccttttcaaatattctatatttgagcactctgaatacagcatttaatgattgttttattataaaaagtaacccaatcactttattcaatatcatacacacacatacacatgcagagtgaatggatatattcatattcacatgttttctatgtgccaggactataggaatgctccaggcactgggggtatagatgtaaacaaaaaagataaaattccttttctgacaaaacctacaatctgaagagtgagaaacataaataaggtaaggaagaagaaaaagaggaataaaaggaggaacagaaggaggaaagaaggaaggaaatttttcttatactgataaacactatgaagaaattaaaacgaaaatgtggtagtgactaggagaaagatgggggggtaaaacgttaaattg

SEQ ID NO: 6 - DNA, 132494 bp, Homo sapiens
  source 1..132494: mol_type = genomic DNA
cgccccggggccctggcttatttcgtgctgtgctgggttctgctgcaaagtgcccggtgcccctgggaggcggttttcaggtgcctggtttgcccaaagccacacggatgagtggctgagccaggactgaactagggagtctgatgcggggcccaacttcaagtgaagggtgtgggtgctttggggaactggtcccctcagtgagcccctgggctcaggcactgctgtggccagccctgggccttctgctagctgggaagggtggcctcctcattgctctgaacccagggcaccattctggcatgggtcatgggtggagctgggggccgaggctggctgaggccagccccggggggccaaggggcatggtggcgtggcagaagcttcatgtggctgagcttgtccctcccacctccaaccccctcccagacaggaaataaccccgtcagccgtgactggggcccgggacagattcccaagctcttggctggtgtttctgcacatctggagccgagtcctcgctctccaggggccagagggagccttgtgcgaggccgcagctgttgacgggccagtcttctccaggcggcaggacagatgttggggcttcagggacagactgaattgggaacattctcccagatgccacttctgggtgtgcttgattggagggcctccttttcagccatggatgcaggtggggtcctggtccctgtagtggccttggctgggccagatgcacagatcaaccctgctacaccgataccctcaccacacacgtgctcacagatatgcagacagatgcacacgcacatgcacagatatgtcagtgacacgtatgcccacagcttcacaccaacggcactgacacacattcgtgctgtccctcagacccctgccctataagccatcccagcagactcctgcctgagtggctgggggagtttccacgtcaggcacagagtcctggcgccagctggggggctccttcagacaggattttggggtgtctaggcagtttctagcaagaggctgggtcagggtggggctcccacacgctgagccaggccacatttggctcttcccacaccatcacctcgctgagtctttcccagcagccccaccctgttcataggaaagccacacaggctcagagccggcatcctctgcaagccagacaggggggttgtggggtgctggcactcccaccaggcagcgtggccctgagcccacatcctcccagcatctgggctgcctatgaggtccagggagccagggtgtctggggccaggacaccaaaccagggacccacgggaaatgggcattcatagccagcaagtcaccagccggacaccaatcggtgtggctgtgcctgaggttctagggtacatgcaggtgctggtgctgggagggctgagactgtccacgggagccccaatgtcccacaccccctgggaaagcagcccccccaagacaaatgaccacccaggacacgtgggtccagccaagcagcagctttattagtggtgctgggttcttcccataccctacagcgtgctcggaagcattcccgagggtttctgcccaacgcctcccggcgctcgggacaacactgtgtagcattgatactggaatgatataaataaagctttggtgtgtaggtttgcaggagagagtacaggttaacactgtgatacgaaaacttcagacaacaccagctctcaatgtgaattgggtttttggccaaggggggaacttctaagtgactggacactgggcccgttgccatggctactcgaggcaccagtggcaggaggagggagtctagggctgaggctccgcgtggccctgtcgcttcgccttcatctgcaggtaccgccctttgccttcctcaaagcgcttcttctcgtcctcggtctcgggctgtggaccacacacagagacaggcaggttagggtcactgcagaaccagtgccgtggccttgtgacctggcctggggccctgccccccacccgtgggatctgccccacccctggtgcatgctgagtaccacgcctcggccccgctggcctcctgggactgccgggtagcccaggcatggggctcatgtcccacctcgctgatgggcctattgactgggctgggtatgttcagccaagatgctttgaggggccgcaggagccacaggtggcagagctccatagaggagacactaagggcatggcgggtcagaagcagtcagtgaagtgccgagccctgtgacatcctctcaccacctttcacagcaggtgacctccaagcccagggcctgtttgctactggacttcggtggaaaatgcacttgataatgaaacatgggagctgaacggaagtggaaaggaagagggaccctgcattcgctgcactcccaggaaagctgcacacagtcaccaccccgcagagaagtggggaaagccagctgcacacggtcactgccccagagagacgtggggaaagccagctgcacacggtcaccgccccggagagaagtggggaaagccagctgcacacggccattgccccagcgagaagtgggcagatgctgtgctgcctatggccttgagaaggccccgccccgtactgggagcaataggcctgctttgttgggagggagccctgtcaccacgctctggaccgtacactcaggaggcggcaccttggaccccagggaccccatctcattggtctgggggcagagccaactgaacaggtgggatttggcccaagacggggttctgcccaggacggtcctggttcatgcctgtcgacgggctgcgattatgaacggcaccccctttcactctgtcttgtggcccctgggcaggtgccacccctggagtattaggtggtcacttctgatgtcccatctgtcccaacgccatgttctgactggccccaccctggctgggaattcaggtttaatgagctgtgctaattcctctgggacatttcatcgcaacattttgagggtgtctgaaagccaaagagatggggcagttgcccttcatttcatccacaatgacaccaaactgtacagctatttttgggcctaagtgtttcatagacaaatggtatattggcaagagagagcgcagtcagccagaggatgtaatgtcaagttataccaaatgcctcctcccctcagctctctccaaaatcagtctctaaatgtcaccaggtgtaaactgtcaaaacctcgccggcctggagccaatggaatcttcgggtatttaaagaaataggtggcgctccttgcagcggtcctggtccccctttgaagagtcttcggtgtacacaggaaaactgcttttccaagacactttattgaagaagtccctcccgctgctacggtttgatctctggctgacttttaaaaataaaatttgaggctatgcaatttgacctgaaacagtccagggaaaatgaaatgttctttctcagttccagcagcacttctcagtgggcaagacccctgagcttcctgggcttggagggcacagagcgcagcccctgcagatgacaagctcccctgaagacatacatggctacatcctgctgggcacagctgaagacctctgtgcacactgaggcagaatgtgctagatcagggcttcttgaacttttaagtgcatctgagtcatctgccagtcttgtaaatgcagattctgatccagtgggtctgggagctgagactcacttctaacaggatcccaggtgacacaacgctgtggcccgcggaccacatctgtgtagcagggccctgccccctttccatctgccgctgccccaaatggggcacatctgaagtggccaagaatgcaaggtcaaagccaccaggatgggatataggggccttgtcctccccttcccctgtggaattgcttggtgatgtggagggaagctgcagcttcttgtctgcctgcagcggcaaggccgaggctcagcagaggagcggccgcccacagcctggcttcctgcctaccttgaagaccctgtagcaggcagagcaagagctgtagggtgggcatggggtcccagagctgggcgacaaggcaacaggacctggtggggttggtactgggttctgctggctttggagtggctgtggcagccctgggagacatcgggttgggagcaggagagctggggacgggcaggctggatcgcactcaggcgcctcccagtctgaaagcctggcccctcggctcgggtcctccctctagctggtggagtatctgccctccacagagaggaaagacggcaaggagcttggaaagaaaaagaatccttgaaagcaggagagagcgagcctggcccaggaaaggcagctggagtgagaagggacacagctgaagcccccacccagcccacaggagccaggtccggcctgaggagaggcaacttcctgggaatgtgcagatgtgggagactggcgagaaacttggtccccaagtgcctgagtccccagccacatgctctcaggtaccagaggaccaggaggggccaagagaggtggcaaatggctctgcggagccaacgccaccagcttaggagctgttaccatgggtgtcctggggggctggtgggaatggcccgtccaaggccagggccctggagaggggctgaggaagggctgccaggtcaggagatgcctgcctgcctgcctgcctgcctgtctgtgtctgcagatcctctgggctccctccccaactccactgggagatgatgcctctctgatggtctgtaccaggcaggtttggggatctatgcactaaatggcctcttacaataaacaatgcacactgggatgaaggttctgaaacgtctcaaatctgtttaactttcgcctttctcaaactgagctggccagggatccctttcataaggaaccaagctctgccccgcctctgggatgggctgcttcaggcagaggcttgcccaccttgggacccaaccatgctgtgtgcccttcctgggatggtctcttcattccgcctggaaaccagcccagcatcttcaaccctggagccgggtgtgaatcctgattcaccactgactcacatcgactcctcttttgtaaaatgggccaatgtccacctcacagcagagttgcggggaccaaatttctccctgcagcccatgttcaaccaggcattaaaaacaacacagtgaaagaagccggtcacagggtctgcctatcacccatttacacgagatgtccaggagagacatatacacagaggcagaaagtggattggcggttgcctggggctgggggaccagtggtggctaaggggtggtgcttctttttggtgagataaaaggttttgaaatagactgtggcgggggatgtccacctctgtgaatagaagaaaacctgctgaatcgtatcctggaagtgggtgaacagaacggcatgtaattacatctcagtaaagctgttaaaagagaaaacctccacagttgagagctctctgtggtgggggagtagtcagggctgtcaacgcataagactggccctgagctaataactacacaggaattctttcttctctttacttttgcgtatatttgaccttttctataattaaaaagctagaaaagcaaaaaactaactagacctagatctaggaaaaccagcccctcctttcttccctaggcaccaatgatctccaggccccaaagagacggggacttggctttacaagcggtgggctgcgggcagagctgagggagccgtctgggctgtgcacaggcgcgattttccccactccccgccaagaggcgctaagagctaactcaggaccatgctccttctggtccagttcataggtgtgtgatgggccccaggccccacgcacgcggcacggcccgaacggcagggagatctccgcccaagagcgagaaaacctccagggcttcatacagcccggtcctcacctctgccagccacacgcagcagtggagcggagccctcgagtcccctaacgatctggcctccatgaccacctgggagtggaataggagtaacttcctacagctctcggcatctttaccagagatgtgaccacagccctccagccgccgagggcgtgggaggaccacccaactctgggtctgcagaaggcactgcagacgagagccctcccacccctttgcccccacatgggctgtgcacgtggggcagggactacagcgataaggggatattccctgcgcaacccatgcttagggcgcggcaggctgtgcacatcagggtcttcccaacaaccccaccaagcagcacagaaatgattgtccacttttaccaatgaggaagtgaagcacagacaggctgagtaacttgcccaaagtgacacagcgggtaaggggagagcctccatttaaacctgggcatgggggctgccctccaggtcgtcctatgccgagggacttttaggggtgggactcgtccatgggaagtgaggaaggcgatggacctgcagcgtgtccacgatgaaccagggtcaggggcttccctgcctcccctcacctcaccccggccctcggcacagcctaggagcacttgctgagcttggcctcccccaggcgggggccctgccctgccctcagccatattatcccaaaccactacagctgctcccaccccagcggccaccaggccatcgagcattcccaatgccacaggccgagggctgtgactgcttctctcgaggtcagttaatacacagcctgaggcgggcacgagcccaggtgcaggtcattctcagggtcggctccaggctgagggagaatctggtgcccagcaacgggccccaaggcggctctgatgtggccctgctctttaatatttgcagcaaactcatcagccaggctctgccctcagacaaagcaaatgctgtctgatgatggatggatgtgtgggagcctgagagcctgtgagggccccactgctcttcccgtctcccgggatggtagtatctgctggatgttccaggctctgagacagagtccagaccagcccaggagcctcaacgtcactgcgtggagtgcccgcccataagcgctgccctcccaaggtgcgggcggccttcctccctgagtgcccaggggcgcccttccagggtgaaggtttatgaagatggcagtcaagggcagggatgtcccaggtgcctgaggacccaggctcaccacccagggggaggtggaacaaagggccgcggggcggtgtctgtcccatggtaggttacgggctcactgctggtgggcagccagcctccccaggtcatggctttgctaaatagttctcctacccaagtgacaaaggggccaccctgtcccgctgggtgagaagctgacagagcaagacagatgtctccagcacaaggccccacccacggcccggctgctgcctcctcgcagccatctccctccacccagcaaagtaaataaatgcatacgctgttggctgttgctgtttttaatggagggttgggggtgggtggaggacgaaagaacgctctgcgggaagacagatgtctctctcaagtccccgaggctgctggtgggggaaggactggagcctctggggcactggccagtggtgccagctgccgggcacccacctgtggcctcaggcaggctcctccgagcctctggggctccccaagaatatgccagagagaaaggatgaggtggcaaagggcagctcagggcacatgacccccatgtatcccgggcacctgcctgatggaagggatggggcagcatggccaggagcaggactctgagtcccacgggcccagctgtgtggcccagggccaggtttgttcacctggaaacaggaactcaacaaagtgacatggcaaagtgcttcctatggtgccggtgcacgtgagctcctacgtgtgtgtgcacatgtgtctgcggtccctggtgcatgtgtgtgtgtctgtgtggtggtcctgctgtcctcagaaatacctgaggccaagtgcagcctgggaactgctccaaggactgtcctgctggtgtgtggctgccccaaaggagggccagatggcccggggtcaccttaacgcagcgggccctttaggatgtcacacccacacatggggacgcaggggtggggagggtcccaaggtagcaggttgacagtacgctccctccctggtgctcagggagcaccgcctggcactcagcaccaagcccctggctcccctgcagcctagtggctgcctgggcctggggtctgcatctttttcctccctccacttagtgcttcctgccactgctgtcttctgggctctcttccactggaggggaagcctgtggctttcagagccaagtgctgcaaaccaaatgttttccactttgcattttctgtgcttggagaacacacatttggaacatggtatggaggacgagtgactaagttccaccctcggtaaaatcaatagcttgtcctttttgtaattaatgaatggcgtaaaaagggtttccagtggtgatataacaacttcctgtaagcctgagggacacagaccttcttaattaggaagccacgtagcatgccctctccctgttataacaggagacaagaggggtcttgggataatcacaaaagcaatgaaaacatctcattattgaggacactcagcacggccgggcgaggggccttgtgcatggagaagccagcaatgatgagcttagcaccaggaccaccagcctcacaagcacctgtgcccccagggtcttgctccacctgaggaccttgccttagcggagcctgtccgccatccgctgtggcctctccgccatccgctgtggcctctcccagcagctgcaggcctgggttaattacctcctcctccacacccacccaggactgcaccagcctccagcagaaagcagccggaagtctcaaataatgagatcattgtggagagtcataaacaccctcaccaggggctcccctcacccagcagcaccggctcagactccgaaagaactgcccccaagtggggccaagaaaggaggcgtaaaggccaacgggaggctgctggcggaggcagggagatcgtcaccacaaaggggagaaaaggcattgggacttgggcctgggtggtggcctctcaggagcccctcctgcaggcacggagtgccgtggtcccgggacgctcggctcacagctcttgtgccggagtgtggacatggcggtccccaccctacaacaccaataatgatcatagctgtcacctgctgagtgcccactgtgggctaggcctgggccagaagccgcgtgctcatggcacacctctgctgtgcgtgtgcccactctgtgctatgccctgtggagcccttcctgtcctgctggaggccagcaccatgcctggacatagcaggggcacaggaggtgtttgctggatggatgaatgaatgaatgaatgaatgatcaaacaaatgaagatcaaaaaggcttaattctaaatagggatggtctttatgttaacaattcaaaaccagtacttctgctcaatgaacactggcatcatctgtccccaatcaattccagggggctcagaccatggagggtctgaacaggagcctgcaacagtgacaaagatgagatgagagtgtccagcacacctaggcttggccatccccctggagatgggccagctctgtggccatgctggggacttgcttctgatcctgcacacacaggtggggagggctctgcatcctttctaccaccgtgtggggcacagggcctgtttcttcctgcacctttgcttgcagggctcaagatgtgtgtctggccgcaaagagcctttgccaggacactccacaccccttgctgagagcgccgagccaagtgggcggcctccagccccaggatactccaggcatgaactcgccctgctgaaaaactccaagtcccatggccaggacctcacatgggcccaacaacctttccaggcctccctgacagatctctcgctcaccttccgcagcaccctgggtctagccgggatgctccctcggttcactgaatcctctggaaatcccacccacgggcctctcctggtacagcccccctcctggcagtgctcactctgtccgtgtcacaaatctgacagcagtggggacagagaggccccaaggctccatcccacactctgttgtatgccccccaggcctggctctgagcagagccttctgtaaacctccagggggagaacatgagcagctcactgtgcccaggtgggtttttaaccccccgcagccggttaggccacagtggcatcagaagagctacctaccagtgccgctcagaagggccagtgtgtggctgtctggacacagtggatctttcagagatatatgcagagcagaaacatgaaaggtggctggagaaagagtctgggctcaggcagagggaaggcgagagccaggctggaggggagggctacatgctctcatctgcgccaacctccttctcagcacccatgctcgggttctaggcacatgggactcactggccaccggatgttcctaagcgctaaccaatgaggcgacaggggcagcttcaggatgcaggtattttcccatcacaagactgactcccgctaaatgcaggcaaaaggaacagagagcacgacactggattctgagcctcatgaatattccagtccatgactcacgcctgtgggctggcagcaaggtgggggcaggaggggggcagggcttccctcactaatggccaaacgcggcaggcggttcaccaagcccttccaggaacacaccgtcaaccttctgcactccagtaacagctgaatttcctaaattagtcaacaattaaaaaattattccaaaagtccaatcttggccaaacaaacaaaggaagccagtgtaagagcccgcacacgggcgcagcggtgcccatcccagggcgagtgcagaggctgcgcgcggccaccacacagtgcttccgcccactcttttgctagtgaaattctctgggagtaggtgcggcccctccctgccagcaggagcctgtggcaacggggtgtctaggatgtcgaggcagcagagaccctagggccctgccccgtgacaaaggccccacgtggggacctctttctctgtcctacatcctgggaccggacctctcttcttgtcctggtccggcctggacacggtcaggaatggccacctctgctcctgaggcttcttcgagaggaacggggcccatgcgaggaccccaggcccctctgcacaccgtgcctgggggtcaggcaggtcctgggggtggggagcagcaggcaccatcatggaaagcttgccccatgcttcctcctaagtgcaaaggggcgagggaccttccaattacagcatcactgagaaggcacggagagggaacttggggtaacagcctggcgacggctcaagacagccacagccaagaggcatctccagcctgctctgtctgcagcccccacatcagtgcgtcacaaagctgtggccctcagcactgcatggcagacaacttccagaaggctgcagagggcctttcagctgacttaagccctggggcccatcccgcccctccagctgaacagcaggtcaaacagtgccctccttccggacgctccagcccatgccacgctgtcctctcggctggcgcggggcttacccggcccctgcactcatgcaggtgaaccagctgaggccaggagaaggaggtcatagggcagcagcagaagcgaggtgggcaccatgttccagagccttctgaaagttgtgtgggtctgtgctgaggccacgcctcacataaggccccagcagaggcaaaagaatcaaactggagtggaaaactttccactaaaatgtgccccaacccccacactccacagtggcctgtggaggttcagtcacctgcccagcactggtcctgagatcatctggggctgaagcaaaggccctgggctgagcgcggtgtgggtgggcggcgcagtgcaggtgggcagcgcgttgggactcccagggtttaggttcttgcacagaagggttctcaggcagggctcctcccaggaccccacagtagggcctggctgggagaaagcacagtggcatcgatgacagcagtgagcggccccctttcccagtcagtgaagtcacagatgggcctgctggccgtgcgacccctggcgagtgactccctgcctggtgcccgcctcctgtctggggatgggaagcatctgtgagcagacacaccagctcgcagaggggttggcgttccctgaagcctccggcttcaatgacctgtacccaggcaccacccaagaggaagcctcccctgcccctccagtcccttgcccacccaggagacaggcagcagcctctgcatccagctgccctggcttcctaaccagaaaacaaacctgctgagaatggcccccggcctggtagggctccctcaacctgaaggagcccaagggtctcagggcctcttctaggtcggggcacgtcagagcggacaaagctcaacagggtgcgttttccctgagttcttggaactcccctggctatgcatgaggcagctctgaaaggcaaggtaaagatggccacagctaggccaggcgcggtagctcacgcctgtaatcctagcactttgggaggccgaggcaggtggatcacgagaccagcctggccaacatggtgaaaccccatttctactaaaaatacaaaaattaataaggaatggtggcatgcgcctgtaatcccagctactcgggaggctgaggcaggagaatcgtttgaacccgggaggcagcggttgcagtgagccgagatccagccattgcactccaggttgggcgacagagtgaggctccgtctcaaaaaaaaaaaaaaaaaaaaaaaaagatggccgcacctgccttcattactgcctcccacttccatccagaaaacatttcggtggctaaagactgaagctcggagtcctgggctggccacctcgggagatgtgtgttcatgagcaccagagagaccctctgggatgggctccctccagtttggaagcctgctttgcaaagaccctgccctgcataatgtggttgcacagttggagcctcggctaatctggggacacatcccctccccagtgtgcccaggaagcagtggggtcacggcgctcactcagccctgacagccatggaacaggctacaggcttctccctggtcaggggcctcagcgagcccctcaccccgccctgtctacacctcctcctcaggcccaggctgggacccacaagttctcagccccaactccctgggcctgtagaggctacaatgcccacgcctgcaagaatcagaggcaagtacagcccccacctgaggtgccagggacgtcctccgcttcagcagacacacggctctgaccctcctgcaggctgaaaagccttcccacatctgtctgctgccgcctgcgtcctgctgtccctccccacaagccacttctccagcccccttcggcccaaggtcagagggcactgccacggggaggcctgcctctacgcgctgagttggcctcttctaatacgagaccgagaccgggaagtgctggcagctgcccggagcgggtgcggcagcccccagcataaaatattcatggagacgcaactccaagcagagaggctgcatccgtgtcagccaggccctggggaagggagctaaaaatagacaggaggctgaagaaagctgacgtggggatgagggaggcgactgggagtaggaggaggggccgccagggcacatctggagggacggaacgcacatgcaggttcaccgcacggagcacacacgtgctcccagcccagaactcgtgctcatgtgggcagtccccaagtgagagctgaaaatccctctccgggcagcctgccccgccagtggctatttctatcaacatcaacattgacatccatgggccccaggacacctcagtgaagaatcaaagaccatctttaatgagtgagaaataacagcgtagatcaacatgacgcggccacacccaggggatgggctgccattccctccattcaagctggcgcccttccctgcccctctgcagccccttcccccagggctggccctcctcctgcactctgaccacccccccccagggtatggagttctggaaggggcggccccaggactgctccccagctggctctgggaaggtcacaggcgcggccccaaaagcctccgtgaccgcaggctgctatccacacaagggtggaccccctcaggttggactctatagggagtggggaacgtgaggcacagaggtcccctccctgagagcccatggatcgctggcccctcgtggtcactgcactggtctccctgaaccagctgagtgctggggtaggtgcagtggtcctgaccccacaaccagtgtgcacagcccagctgggggcagccgggagagggaaccgtcattggtgggcaaacaccaaccacgcctgcagccgctgccaacctgggaggatgccccccactatcagctttgaagggctgctattgggagatgccccagggcaccccatcaacctgcactgaagcctgttcaaagcacaggtcacccagatcctcctctactttacgcccatatgcgtgagccccatagactcccaccagccctctctccccagccctgccccgtcctagccgggtggcctcgggtgtgtcactgtccccaagctcccccgttacagacagtggctctgcgcctttggccctcgccgttcccttcacctgaatggtccccacaagacagctcctgcccttcctccctgactccaggcctccgctgaggctttccttgggaaggaacatatttaaaattgtacctgtcccccggcacactccgatcccctcattccctgctgtcttcttcgtgaccctggacaccattcaacttcctctatcttcactgtttgtttactcctccctctgagagggtgtgaggccccagggagagcaggtgaacagcagcagatgatgaaggccccccatcttcacccaccccacatggtgggcaccgtgtccatcaccaccgtacagatgaggaaaccgaggcacatagaaagtgcgtgcctaaggccacacagctagtaagtttagagctctggctgacccgggcagccaggcgcctgctcctggatatgtgagcctgacagtccacgcagcgtctgcagtggcggggggtggttgggagggggtctggggtggcggaggcgacgcttctctagagcggttgtgggtgcccttctaaggaaaaaacgtctgagaagtgctgtagctccaggaggctctggggagggtggtccagatgggagcagcaggtgcacaggcgccgggcaggagtgagcttgctgcacccacacccagggcatggaggagccaccgtgcatttcggtgggagagggagcaactcggattttgatgaccagtttcctgggctgcagggaagggtcacattgagagcaccaggaacagaggaaggagcagctgaggactgagcaggggccccatggggacggggcagtaagagctgttcgggagaggagtggagcggcactgggtgggcgtgggcatggggggagtagggaggagccagctgggttcccagacttccagagcagcacagaggcggagagggatttttttgcgggtgtgataatgagttccattcaggacaaactgtatttgtgatgcttttgggaaccctgttgaggggcagcactggccaagtcaatttgggagtcaatacaacacacaggcgatgctcgaggcacagaccatggatctgaccaccccaggagagaagggccacaggttaggacatgtcaaagccaagggttcggggaccgtgtggtggccggggaggctggagtatccctacagacactacagggtcccccatccagggagcgcaggcttcactgagggcctggtcagctgtgctacagacagggagcggacagcagacagggcgtgtccttgcgtctgtccatgctgcccgcagagggaagacagaactgggaaagtttgtccaggaggcaggaagaggtagggggcggggaaggagagagcttcggaaatgtgcctgggtcaggtgggggattcagcatcaggacagacagcagccacgctgaaaagcgtcatgggaggggcgtcgggtccatggggagagaccagagcgggcccaggtgggagtggagcccatacttcatggccgagaaaagcaggcaagtttggagaaggcgtgtccaaggtgaaaggagaaccagacacagggctgaaggtcaaggacagaggaggctggagcctcatagcagggtcaggggctgaggaacgactgcggaccagcccaggcgacgtggagggaggacaccatcctgccaagggccgatgggtggcacggtgggccagggcaaggcgggtaggcttacaagtaaatggggaggggtgggggcagatgagggaggaaggagcaggcagcagagccagccctgatggggcaggagggtggcagcctagggtactttgccacagaagaggctgtggggctgaaggcatggagcagtcctcgcaccagaaggggagcatgcctcgtaagccccaagtcaaagaggggcctggtcacgagagtcatgcaagggtgggtcacaggcattgtgttagtgccgtgctgggggcacccaccactcactttccttcctttcagcctggccgagtcctcctcatccatcaagtccaggttcaccatcagctcctctactcagcccacccgacctgggagaggccggcacccaactccagcgaagagctggcctggagttggcagcggagggtactcgctgggcctgacagctcacacaccacacctggcgctaccaccacgggccctggtgaggcatgagctcctccactccaggaaggggcagggctgggagaggggcttggaggggcctcagcctcgactgggaaacaaagcagctggggcgactcggcggccctcctcagccatgtggggaagcgacaggccgtgctccaggctctgagaggaatgggttttcagtgcatgttcgccccagagatttcagtgcacgctcctctccgggaggctgagcagcaaatgcttgcggatctgcgtggggagcagacgccgcgggggcaggggcctcgagaacctctggaatcaggggtcagcctcgcagggccgtggtgcctgcctggccacttccatgagaacgccagctcccaagaggcctgcgggcacccgcctgctcccagctgctctgttcccgcatcctcgctccccggaggggcaggaagctcctacagctctgctttcctcttgctcccctcagtgacagacacaagagctggttcaaagagaaatcaggaccaccccaaaggctgcagagcccctggggtcagccaggatggggaacctctgttcttatgacagagacagggaagctgcctctttgggccgcgcgaaccctgtcgatgtctgtgaccctacagagtccatgccaggcggagaaccaccagctctcaaacgtggcagagctcaggggatgtggacacctgggggcagcagcccctgtgaacgagtgcgtgtggcctgcacacgcccaccccacctgccctgcatgaggaggagaaaggccaaggggctgggaccctcagcccagagcccaccagcctggcttggtctcatcaggcaggacctgcaggccaggaccacctggagggagcccacccctccagcttcccagcaggcccttcagcagaggatgggggacccagggcacggtcctcatccccctccagcattcttacacaatgccagggaacaccaaggcgccacactcagaggcgacctggacgcccaggcagcagccatgctaaggcgctcttaaaggggtctgtctctcttgtcctgtctgcccagccccaccccacgggccctgggagtacagcccaaaggcctacccgctggttatgaagcgttccttctcaaggcctcaccggatcagccccgcagcccgaggtcaccggtcacggcagtggccaggcccagccctactctgacccctactgacaggacaggactcatgcaggcacagattccccctggaggcccaaacacagggaccctagggctgcctggcagggaggggccgccgttccaaggatgcgcactcaccaccagctggggcacaggcagcgacctgccttcctggctcagcgacacgtaggtgaagaaggcactggcggcccggtagcgcttctgagagctgtccacaacagggtcggcgtccaccaacacctcgatctccatggacttattgctcgtgaaggtcatgcgtcccgagatggtgatgacgcagcctgtggagaagggagggcgggggtcagggcggcctccaccccacggctgggcgggggacactggcgtttctgtggtcagcaggcagacacttggttaggggaagcagtggcttggctgactaccagatgttcaaataacagaatattagaatgtgtcgttagttgcccatgaatgtttatctttctagtgagcaggtttatctacgctaaaattcagcactgaaggattttggtggccatgagttcaagcccccgcccaggcgggctctctcctggccgggagtggcagcacctgctgaaaggcttcagagccactgtgcccccacgggggaggccgcagactgccttccaggagctgtgggtgtcggctggctctgcccttccttaggtcagggccaaatctgcaaactgcactgtccattcattggccttgctggtgcccaccggagccacagctgccccactacactgctccaagcaccaagacagaaccttgtatcaccttccacagccattcccaccctcaggggctccagtgacacagggcagctgcccgtgccccttggtgggattgaatcttatgtgactgcatgccaagcctcccttctggccccactggtctcgcccacgggaccaaagcttcctcctctgggctgctggatgccacaccccttggccagagtcctccatgctcaaagcaccagccccatttctctgtgaatcatgacaaagtccaaagtcaccagttcccatacattgttcccatgtccctctctccccctcaaccctaaccaacctctctgtacgccccacgctccccagggcacgacagtccatcctggcagaagcttcctgacccagagctgctcttctgcccccaccaccctccccggcctgggctccatcctcctacctggcctcaacataatcccttaatctcagggagctcagctcttccctataggcaggcatgagacaccctgcctgggggatagctacgggatggaaggactcaagccaagagctgacctggggccccgggaaggtgtcaccatcgatgtcactggccaccaggctgcagaaacccccggggacttccggggcaagtgctgccctgcggtcagaatgccctcccaggcggcccagcgtggcctctattctgggccaggctcaaggatatccctgcccgactctggctgctgggacttgctccccaggaaatatatctggcttcggggactttttaatgtggcctctggaacccccagtgtcctagctgcaccgagaccagcctcacaaggcaggtttagagacccagagtgagaaagcggccaggtggtggctgttggagggcggttagcaggccagaggcaagagcggttattccatgttaaaaagtatcagaacgatccatgctacattcaacttcatacttacagggagcacttcgtgccagtgctgggagaggaggaaggagctgtgtggtcagcgccagcaggcattacgtgagctgtaaggtacagagtcccatgcaaagcgcccgcagtcacaagacgcaccccgggaggagggcaggccatgggtcaggccccagctaaggagctagaagtttcaacaggtcagacctgagggtctcccagcatctctgcctccttcctcacaatgcccagcccacatccctcaccaacaattgtgtataacacttgggagtcacaggccaaaaagcaggaacaagccctttccatgagcagaaaccaacaagaacttccctgtggccacggtgtcacacacgggggccacccatgagcgtggtgcctggaggagggcaggttccaggggtctttgaacactggctcttagttttgaggagcaacagaaaacgtgtttttgtttttgagatggagtctcgctctattgcccaggctggagggcagtggtgccatcatggctcactgcaacctctgtctcccaggtttaagcgactgtcacacctgtcacttaaatagctgggattacaggcgtgcaccaccatgcacggctgatttttgtatcttttgtagagatgaggttttgtcttgttgaccaggctggtctagaactcctggcctcaagtgatccaactgcctcggcctcccaaattgctgggattataattaggtgtgagccactccgcccaggctccaaaaacatgctcttggtgttgcccatgaaggcccaccttggccactgctgccacggccagatcctggctgctcatggcttaattgctgtgttagaaatctgaagaaactcctaacagcaatcaacaatgactttaaacaactaagtaggttgattataaaagcattagacgtaacaacaaaaagaagagaatgctgtctgggagagcctcttgtggtccataatacaattaacacttcataaatgtcaggaaaattttcaattacaaccaaaatctgagaattttcacccttcagagagcaacatcattattctaaacaagacacaggctataaggttggctagcaggacaaagtgaaatactttaaaactggaaacctaactggatatagtggcacacgcctgtggtcccagctactcgggaggctcaggcgggagcatcgtttgagcccaggaggtcgaggttgcagtcagctgagatcgcaccactgcactctagcctgggtgacagagcaagaccctgtctcagaaaaaaagaaaaaaactggaaatctgatgtggtcactggctgggacttaatttgaaacctagggttgacagacgaatcacaagtcccagtcaccaagagagagcccagtttccaggggccctggtttagggtatcccatctcctagaccctgggctcagaaggcacatcccacacatgacaccaaggtctcacaggcagcctctgggaagggactgtcccaggggacctcggggggaccagctcccacccccagggctctgttcctgctctagcccttcctgaagaattccagctacagaccgggcgcagtggctcatacctgtaatcccagcactctgggaggccgaggcgggctcatcacttgaggtcaggaatttgagaccagcctgaccaacatggtgaaaccctgtctctattaaaaatacaaaattagccgggcatggtggcacatgcctgtaatcccagctacttgggaggctgaggcaacagaatcgcctgaacccgggaggcgcaggttgcagtgagctgagatcatgccattgcactccagcctgggcaacaagagcgaaactccatctcaaaaaaaaaaaaaaaaaaaaaaagaattccagcattccagctacaggcactttgtcaaccccaggatggcggctgaggcgcacaccaaatcctctccgcctcctccaggtcacatagaggcccccctgcagcatcgaggcctccctggggacggaggtccatccaggtggggttggggtgatgagcgactggcctcagcctctacaagggcccctagcctgccccctgctttccacaccccaccagagtggccttctgtgagctccctgaagctcctggcccccgtggtctctccctagaaaagccctcctcttacagctatctggttcatcttctgaacctcggctcaagcatcccttctccagagagctgcccagggcggctcagccccctccaccacaccccctctagaactgtcctccactcctgcagagccaacgaccccatttgcattggcacacttgttggcttgtctatttcactgttgtctgtctgtccccatctagcctggaagtcccacgagggcagggctgggcccagggggcccaaagcaggtatccagttgacaggctggacccctctggggacccacgagggctggggtgtgggtcacatgtggacaccaggtcaccacagactcaagctggccagagccccattagagccccaggtttgcatcctcctgaagtggatgctgagcagcccagaatcaggagtgcccaggagcatggccagcagccccttccaagccctgctggccggtacttccttccagtctcaacttcagtgccactcctggaagcagcctgccctggagccccacacctgtccacctcccttcctccctgcaaaagggtggagagcctgggggcagtcacgtgctggccgtcacctgcccacggggcagcacagactgattccgcccttcctgctaattcctccatggcgcagccatgtgctgtcattcctcccactgggtcagagcctggaccatccaggctgccggccaaatcatgaccatgcccacaggtccctccaccaaatgtggaggcgggtgaggctggtcatgcatcagagagctgaagacagcgtgtccaggtggctctcgggagccctgaacctgacaggaaaggcagaggcagggcccgacaagcactgcctgcagacctggcgtgtcacacggaggtcaggatgcttcagggtctcccagcaatgaggggagctcaggcctccttcccacaaagtctgccttgattcagccctcccgccaggcatgagaagggcaggaaggggggtccgcacctgccttgtataccagtagtgtctgtctgtatcctgtggcgaacctggcactaggcaaagttgggacattgcggggcccatccgaggaaggggagagagcctcaaatccacttccacgcacctgtctcagaaaccaaagcaaacacaaccccaagcagtgccagtacctgccataacaaggcagccaagactcggagggctctgtggggtcaaaaagacctcttggtcctgacaatcagcccacgagcggaggtgctgccttgggatggctccaccacatcacccgtccaaatgcacctgcagtcaaggtggctggggtttatttaaaagatgggtgggaccagcttgaggtgaaaaatggattaaccaagaacagcatctcccactgagcgggcggatcagtgcccacctaggagaggtgtggatgcttgtttagttctggggaaggcggccagaaggggagcgcctggtcctctctgagcctctgtagcaggtacagcagccagggccctgatgaagccagatattcatgacaaagtgtctcatcaggaaaggcagggctcttcgaggccctggagcaaatacctgtcaaggccagtctccggaggctacgaagccatgcgggaggagccctgagttccatggctttggagtcagatgggcctggatttaaatccaggcttggccactgagcagggacaagccaggagactgcactgtgcctcagtttcctcatctgcaaatgctttccccatgcacccagcttcagagaatgcaggggagcagcagacccagccacgacccactcacagtggctctccttcatcaggggctccacaggccacctgggcattttgggggtaacttcctccacatttttaaaggagacacagtcaacccatgtggttctatccttgctctgaggctatactgatgtcaactgcccgcattcattatgtcacatgacaggcccaggacagtaatttggggtggggcctgagtgtgccccaggggcaccgctggagaggcttgcagggggtaaaaggaatcataccacaaagtaacaagaagctaattttttgtatttttagtagagatggggtttcagcatgttagccaggatggtctcgatctcctgacctcgtgatctgcctgcctcggcctcccaaagtgctgggataacaggcatgagccaccgcgcccagcttaacgatgcattttcaagctgcctgagagccaggagttccggcacaagtgcacggggaccaggtgcagtcactccgcagtccagggcaggcctcaaaggtggctgtagccgcatgtaatcaatgagggtcaagcttcatcactcacactcgaggccctgacggggcggatgccaggtggggtttaggccaggtcgctggggacaccaaagcatgggctcagagctctggtcccagagaccagctgctgggcctgccctcccagtcccacctggaaccagctccatggctgtgaacagcttccttaacccctcggaattgcagcttccaaatgggaaaaacaaacagagatagcgacagtccctgtctcactgggctgtgtgagaagtaaatggtatgaagcaggtggcacaatgcctggcatcaagtgtgtcatattaggtacagttaaacgtatcggtgcctgtagtgggctgaattgtgaattacagccgctttctgttttgaagtagttgttgagcctgcctggagtggcacagcccgtgagcgctggcaggtaccccagcctgactcccccagcagacgggcgtctctccaggggcggcagcagccagatttcagcagtatgccagggatttggaaaagaaaacaaaataaaaaaaaaatagctgttagcaagactgagaggttgccaagtgtttcagagtttaggaaaagctcagcatttatgctccaaaaagagctgtggctgttaactttcgtaagaaaagcctggaaacagtgaactgacttagtatttcttacataacacaccccaaggccttttctagaagactccttatttttcaccctaatagtggagatcgtttctccccaagaaaacgtcaactttaggttttctcaccaagtgcttccaaaactattacactgaaggcaacgatataactttttcacaccagctacctctggacattttaatgtctcaactgaaaaaaaaaaatccacacagcaagtgaccccacagctcccattaggggctccactgcttgcctggggggcggaggctctcccactctgtgggtgctaccgggctccacgtgccttcccctgtgctggtcccctgggtgcgggctccagcctgtcgtggccctcgcgtccccagcaccaactccgttgctggcctgggaactccacgcgcctttggtgggtgggcacttcccatttcccatgagatccagtcgcacagatgaagcggtccttccttcaccccaactgcctggtgagagtttaacttgccacacacctgctaaggaccccgtaggtgcttggccgggctagttggcgcaaaggtgtaaggggacagctatgacaagtggcagcctgtcctagcagacctgaagtgccagctggaggggctcaagctgaatgtggcatgtcacggggagccacggaggctgtgagcagaggaatagcaggtccctagcgtcaaaaggctgtgacaatggaggtggcactgggttgggctggtgaggggtgagggtaacagaggtggccctctgtggtctaggcaagtgtggggcatcctggaagagtctggttcataaatgccaaatttgcagccaacagagctgggcccacggcagggtggcagtggcctccatggccgcgggtgaggcctctcccagccacgacaagtgccccaagttcgtaagttcctcctaggcacacacccttcgtggctgaaactcaaagttatcttctgaacccctgggccaatgtctggatgaagcaaagctgtccgtgtaacttcctgacagacaccccacccaagcgagggcaagccacagccacagggcctggcacttggtcaatatcgcataaaaggtcactctcccaaggaggcagttttacgggaggctgaaggagagaaagcaaagcacttcctgccttaaatctggagaagccaccccacaggtctggcgtctccattccgcattcccactgttttctggttattttattttatttttttttgagacggagtctcgctctgtcgccccggctggagtgcagtgacacgatctcggctcactgcaacatctgcctctcaggttcaagcgattctcctacctcagccccccgagtagctgggattacaggcgcctgcccccacgcccggctaatttttgtatttttagtagagacggggtttcaccatgttggccaggctggtctcgaactcctgacctcaggtgatcagactgcctcggcctcccaaagtgctgggattacaggagtgagccaccacgcccagcctgtttttgttttttaaattgagacaaggtctcactctgtcacccaggctgagtgcggcggcacaatcacggctcacactgcagcctctgcctcctgggctcatgtgatcctcctcccttagcttcctgagtagcccagataatttttaaatttttgtagagatggggcctcaccatgttgcccaggctggtctcaaactccagggctcaagtgatcttcctgcctcagcctcacaaagtgttggaattacaagcgtgagccactgtgaccagcctgctttttttgtgtgtgttttgttttgttttgtttttaaagaaacaggggtctcactgtgttgcccaggctggtctcgaacccctggcttaagcaatcctcctactttagcatcctaagtagccaaaactacaggcttgagccatcgtgcccaggcccagctatttttctaataaaatatgctgaaatgggcacatcagaaaacccccttccacctgctaagacagaataatgtgctcccaaaagatgcccacacccaaatccactgaacctgtgacctcacgtggcaaaggggactctgcagacattgactaagtgacagccctggagatgggaagattgttctggggtacccgggtgggcctgatagaatcacaggggtcctgtgagagggaggcaggagtgtcagcacgagggggggaatgggatgctgttaggagaggctggaggatggccgggaccatgagccgaggaatgtgggtggcctcagacgctgggaaaggcgagacatggattcttccctccagctcctggtaggatgcagcctgcagacctgccttagacttctgacctccaaaattacaggagagtgagtgcaggctattttaagctactgtgtatggaaatgttacagcagccccaggaaactcatggaggccacatgactggcaacgggtctcaactcctgggcttttccccactgtggcagatcagcctgtgggaggtagggggtttcctcccagggggaccagtggcctctcagggctgctcacatgaggggcacgggctgtgaccggctgccatggccctgctgtgccctcaggctccaaccgcctggatgtgcccagtctacctgcaggcaccttttccataaacgtatgattttaaaagtaatccttatgtggattaaatttatacttgacttaaggttaatactaatacaacaccccaacacaaagaactgcaaccctcggtctatgcgactatttcttgttattacaaaaccgctgccttctggggcttatggaggagacgtcacatccgttctcacttctgacactgaccctgactccctgccatttagaggaaaggccctggtccttcatcagtagcccctaggcctgctaactgtagagactctcatttggctctagtgaggctgctctctgaagtcagggtccggagctagccccttgccagctgtatgactgctcttctcaaaagtggggggcccctgggggactgctggggtcactctccctgcattccttagagtggccccttctccaggctgacgtcaatttcactgctggctctcacaagggcaggtcccacatccacagagacagaggcagcttggggctggtgaatcccagaggggattttatcaagttcatgattttataaaagtggaagtgagctagtatctacatgagttgagctttaaggagacaaagcatttctagtgggttcccaaatgatacatctactcacaacttcagagtggggccttattggaataaaggtcttagcaggtataattaagcaaaaggtcttgagatgagatcaccccggattctccaggtgtgtcctaaatcctatgacaagtgtccttataagagacagaagaggagagacacacagaggaagaggccttgtgaccacagagacagaccagagtgacgcagccacaagccaagaaacgtcaaggaacagctgctgctcccagaagctggaaggggcagggacggatcctcccctgacttcagagggaccttggccctgctgacgccttgatttcagaattctggcctctagaactgggggcgaacagatgtctgttgttctgagcccaccagaaagcaatgcccattctctacagtacaaagctctgccaggcaccacgtgcaacccgaggtgaggtttctgtgcctgccagtagctccctgggctcttgacaccgactgggatagtccacaataatgtgtgcccccacccggcagggcagcagggtctggccctcgagacctccttcatggtatggtcgaagtgagaggcaggtgtggggctcgagggtgtacagcggccccagcagagtccatgagaaagtcacgctggaactgtgaggccagccccccgcggtttctcacacacccacccagtgtcacccagaacccagagccagcaggggccgtgcctccccgcacagcctcgctctgtttccctaccaaggggcaagcgtgggaggcagcgagctgatctaaggtgcagtatcctaggagcaagcatgatgaccctgctctgacaaccctggccccactcggccagcacagccctcgcctccctgcaaaggacctggcaggtgtgacaatcctctggaaaacaacacacgagtgtgacagcattcaacggcccctggatgtgacagagtctagtgggccctggaggatactggcatagaaacaggccagactccatggctgctatttcagtttggtccaaattcctctatacacaaaacaagatgtcatctaagaaaacaacagtctttctgtttctggtaaggggcccagtgttttacccaggaggccccggccacagccgagacgaggtgggggcctgggcggcccactgtcaggccctgggtgtggcttgggacagcgggaatcaggcgagcccacccaacctgccctcactgcgtgaaggaagccaatccaagtgaatgtcctgccagaaattgtggcttctgaaaattaagtccccccgttagccttgtggaaagcctttggcaaagcagctcctcgtccgagttgccccagatgtcttctaggttgctaagttaattcctggaaaaagcattcgacccagactgcagttcctggttttccctcaaaattaatgattcctattgaccaagaaccacaacacacctcctagcactctcccttaaaagttaattctggttgtacaaggagttaagggtggggactttgttttttttttgtttttttgtgtttttttttttttgcgacagattcttgctctgttgcccaggctggagtgtggtggtataatcttggctcgctgcaacctccacctcctggcttcaagcgattctcatgcctcatcctcccaagtagctgggtttacaggtgcctgccaccagcctggctaatttttgtgttttgtgcttcgctggaaagtctatttctttttcttttttttttttttttttgagacggagtctcactctgtcgcccagcctggagtgcagtggcgcgatctcggctcactgcaagctccacctcccaggttcacgccattctcctacctcagcctcccgagtagctgggactacaggcacccgccaccacgcctggctaattttttgtatttttagtagagacaggttttcaccatgttaaccaggatgatctcgctctcctgacctcatgatccgcccgcctcggcctcccaaagtgctggcattacaggcgtgagccacagcgctcagccagaaagtctatttctttcctgatggttctccaaggacactcagggacaactgagcacggcaagtcctatggaatgcacgtttcccactatgggctgtgcatccgtctttcacaaggtcaccctaatcgtgatttacccaggcaggagtcctagaaaaaatagcatggaatatgatgccacagattctcctgcagagtcacgcaccacacaggcctgtgggggacgagctaaaacacagaggacccacttgttttgggcagattctaaaatgacattgtggtctatgtttgtggcaaacatctattggtcaagaaaagattctgagtgagccgctgtctctacaaaaaatacaaaatacaaaaattagctggttgtggtggtgcatgtctgtagtcctggctacctgggaggctgaggtgagaggatcacttgagcacggaagtgcaaggctacagtgagcagggattgcaccactgtactccggcctgggtgacagaataagatcgtgttgtggaaaaaagaaaaggattctgcaaagtggaagaaagcaacgccagagaccttccttctccttaccacaaagcatccaaaatccagcatgtgtgagcctagccttctctcagtaattccagggagggaggcagccctccaccattccaatcttaggtgcttctgccctagtccagggtctcccattgccaggtgtgttctgcagtagcagctgccggagacagcaccaaggctgggctacccggggcctgggagtctgcccctgctcaggctctggtgggcaggagctgtggcaaggagagccaagcttgcacttcttccactctcgcttcccacgacaaggggctggtctcagccaacagctcctccaacaagccgctttaatgaggtggtgtcctcagaatcagcaccaggccctgacgatgctgacaccaccctcggtctgtgaggcagtgctgctgcagggggtgcacggcctcatctcagcagacgtcacactgacaaaaatcaccacgtgtcaggtgcacttcactgtacttctgcagagagcagtcacataagacaagcatggtgacctctgctcatacaaactgcagaggcctggcctgtcaagctggcacacataccccagggacagctgacaccatttccaggcaggggccaggtggctggggttggatttttgtggtggagaaaaaccacccaatgccagtgctgccctgggtggcgtgggcagggctggccgaggaggggctcctgcgggcttttctgtactgaccctgccactgcctaaatcatgaatcattaattccgctcccaaaatgaaatgtgctgccatgaggtttggtgtccagggtcgtggcagctgcaggcacaggaccttcccagagctctgtctgtggagcgttttcagagggtgagtttaggcaggtctttaggaggataatggccccgtcatatctgagtcaaggattttaccagattgaaacatcaagtcaataaacagcaaggacaaagaaagaaacctcagcttcctgttccctgtggcagatgggcacacaccaaggcccacatgaccctgggtgtgaacagaaaacaaactggtgcagggacccaagcagccgagggccactgcctccctcgtctttgccagaagagtggttaccttttctgatcttgtcatgaaaattaatggcgtccacggaagctgtgacgatgttggtcttgcagtggcgtgcagccacgatcccggcgacctcatccatgagcttcatggtcacacctgcggagaaagggacatgcggcagatgagacacggaggcagaggagattatttcacaccctggaaacaagttacaactcgagccctcccctcccactagccaccagcaagggccgcagccagcaggggtgcagggtgctcggccgcacgtgctgtggctcacgcgctacatggggcttcctcaggagattttgaaaaaaacgaccatggctgatatgccaagccactaacaaaacagcccttttcctgtcctctacagatatctcaccctgctgggcaagttttgttacaatatcaactgggatggctgcaatcctgaagtcacagaacagcacgtgctggcgaggatgtgggggaaactggaaccctcctccactgccagtgggagccaaaggtgcaggtactttggaaacagtttgaagtttcgcaagaggataaacacagagggaccgtataacctagcaattccactcctaggcagatacccagaagaaatacatgttcaacagaaacttgtacagagctttcacagcagcatgtacgcatagcagccaaaaagtggaaacaactcaaaggtccatacatgatgaatggagaaaaaaaatgtggcctgtccatacaacggaacaatagacgctgcactaggaatgaagcttgaaaacgctatgcaagcaaaaggagccagacaccaaagaccacacactgtatgctgccattgacaggaaaaacccagaagaggcaagtccatggggacagagggtagattaggggttccctagggataagggattagggggatatgggaatgaccactaatgggtacagggtctctttgtaggagtaatgacaatggtctcaaattgacggcaatagtagttgcacaactctgtgcaaatacaaaaaaaaaaaatcaacaacttgtacactttatttttgtttttgagacagggtctcactttgtcacccaggctggagtacagtgatgtgatctcagctcatcgcagcctcaacctccccaggctcaggtgatcctcctacttcagcctccaaagtagctgggatgacaggcacatgttaccacacctggctaatattgttgtagatggggtcttgctatgttgcccaggctggcctcgaactcctggactgaaacgatctgcccacctcacctcccaaagtgctgggattacagtcgtgctactgagccaggccagtacactttaaataggtgaaatgtgtggtatgtggatcatcgtcagtacagctgttatatcaaacaaacaaacaaagactcactgaaagaatactggagaatactcgggctgcagatgtccgcttttactcagtctctcttatttgatggaccaccactgtgcacatgctggtcccccacccccagttctcatccctggtacaacacatatattacaattatttcaatttttaattttttttttttttgagacggagtctcgcactgtcgcccaggctggagtgcactggcgcgatctccgctcaccgcaacctctgcctcccaggttcaagcaattctcctgcctcagcctcccgagtagctggaactacaggcacgtgccactatgcccagctaattttttgtatttttagtagagacggggtttcactatgttgtccagactggtcttgaactcctgacctcatgatccgcccacttcagcctcccaaaatgctgggattacaggcatgagccaccgcacctggccataactttttaatttattttttattttcttgcagagatggggtcttgctatattgcccaggctggtatcaaactcctgagctcaagtgatcctcctgcttcagcctcccaaagtgtggggattacaggagtaaagtaggccaccgctcctgactcttatttcacttaaaaatttaaaatgtacctttacttaggttgaactacatgaaattgccaatagtcaacaatatttgacttacaaaagcagcaaagtgatattaaccaacttaatacctattagaaattttagaaagttatgtacattcaccctaggacacagaatgatttttttttttgacgcggagtctcgctctgtcaccaagattggagtgcagtggcacaatctcagctccctgcaacctctgcctcccaggttcaagctattctcctgcctccgcctcctagtagctgggattacagatgtgtaccaccacacccaactaatttttgtatttttagtagagacagggttttgccatgttgtccaggctggtcccaaactcctgacctcaggttatctgcctgcctcggcctcccaaagtgctgggattacaggtgtgagccactgcacccagccaaggacacagaatgattcctaataaacccagagagaggcagaaaaccagactccatcccacaagcgaaaaccagacttgtacagtcacgtttagggtgggaatcaaatgcccacagcatccagcaggtgaagctggaaagagcagaattagtgggggccccgagcagaggccagccagggccccctgctgctcagctcctacctagcgccccccatggggaccccattcttcaagaaacacatccacctaatgagaggcacgcatcttgtgggcatctggactctaccaactagagaaaaagatgagcacctggcgagatgtgaacagtgattgggtattcgacgatactaaggacttataagtgtgtttgggaggatgtgatagcgctattgtgggtgttcaaggtaggaagttatcttttagatacaatatctgggatctgcttcgaaataccgcagtgggaaagaggtgaggcaggaacgggcaggtgttgcccattgctggtgctgggagacgaatacccaggggcttgggatgctctacactctgcttttgtgtatatctgagcattcccagaataaaaagctaaaacagagacatgggtgttattgattaaagcattatgtttttattaccatgacttttcccacagaagctataagaagatgctgctaaatgaggtaggacaggtgaggggaggaggggccaggttcacgctcgctgcactttcgcctgtcctttcaaacacctggggcatctgttcggctcaacctgtgctgggggcatcagcatccccgtctttctttttctttttgagaaagagtctctctctgtcacccaggctggagtgcagtggtgcaaccttggctcactgcaacctctgcctcccgggttcaagcgattctcctgtgtcagcctcctaagtagctgggattacaggagcccgtcaccatgcccagctaatttttgtattgttagtggagtcggggtttcaccatgttgaccaggctggtctcaaactcctgacttcaagtgatccacctgccttggtctcccaaagtgctgggattacaggtgtgagctactgcgcccaggtgcatctccatttttcaatcagcatccccattttcaaatgaacaacggaggccctaagtcacatggaggtccgattctgaagaaagagtgcaggtgaaataccgggaaaatagctgtttggcaagggaaagaatcctaggcagcggattttctcccccaggcaaataagatgccgctccgggtgccaggcagggcagggcacctctgggcttcaggtggcttggctctcacagttctgcaaggtggttttatgttgttattggaaatagaaggtgcaggttggctaagccaccaccaggctctcctggtctctctcccatggcaaggggcctccataaaggcccagcaagcccagccctcacagggtagaggacggttgggccaggtccctagcccaggacggcaaggaagtgaaaacacaaaacagaataggatcatccgtgtgtcaatatcgagggcttccttggagggggcagcctcagcttctgaattaaccacacccacctgtgagtgggcccctaccacagtgtggttcaggagcagagtctggaatgaggcctggtgcgaatccccctgccccatcgcccatgcctggaggggcttgagtccctctgtccccgtctagagtgtgagagtcactgccatagcctggctgggagtgagtccccatcacctccgccactgccggctgggtgaccttgggcaggcaggttgccctccctgagccgtgggctcagtgtctgtcaggcagaggaggtgacggcgcccacaggcaaggtgactgaggagcaaatgggatgaccatgtggctgccagcaatggcagctgctatcatgggatgtggggatttggtggacatctgttgagctgaacactaatttaatttagggctttggggacagatctgaggtttggaggctgaacagaaaaggaaagaaaaatgaaataactcagaacaccaggtaacatgctggctgagaaccccacacacttggctcaggtgggcaaaggagggatccagaggacagttggcctccccttaccaggcaccacacacagagggcatagaggacagtcggcctccccttaccaggcaccacacacagagggcacagaggacagtcggcctccccttaccggacgccacacacagagggcagagaggcccacccggccacctcctgactaggtactaggtcatggcttcagagagagagagagagagagcgcaagtgtgtgtgtgtgtgtgtgtgtgtgtagggcacgtgtgtgcgtgtgtttaaggggcttagtagcggcagagctgcagcccacagactgagttcttctaggttgatctgcctcataaagaaactgacttgtgaccacaacagctggactagtggtcccactcacacacacagccagcacaggtgtgccacggaattccacggcatttcccacagaccaactctaaatactgccctgggcagccaacagaagctctgtcagcctccaatgggggccaggaccagctgcatttgccatgaaacgctgaccatttatattcagaaaatggcaacctggtgatgaagtgacaacagctgagcacaggaatgacgatgagccagcaggattccagcaggaccgtgtgtgctggggagacacattgttaactggagtatgtgagaagtttatcaccaaatgtgcactatatgtggccttcctcagggggagatacgtcgccatccagcagctagtcagggtcctcctaggaacaaatgagccagggacaagcaggagttttaaggaagggacaccaaagcctagcatcaggagccaggacagcacatggacacagggtcctgatgctgctgggggccgtgagctggatgctgagggcagcggctggcattgccggggaagctggtgccaggcatggcccagcatgtcacatagaggaactcggctgcaaagtcagtgccatgagccgtgaactttgtctgttcactgaggcagcctgagtccatgactcacagctggcccctcccctctccacaaacacggaatctcaccggaccccacccgatcctgtgatgcacaaggccggccctctccacaaacacagaatctcaccggaccccacccgatcctgatgcgcggccggccctctccacaaacacggaatctcaccggaccccacccgatcctgacgcgtggccggcctctctccacaaacacagaatctcaccggaccccacccgatcctgatgcgcagccagcccctcccctctccacaaacacggaatctcaccagacagcaccctatcctgatgtgtggccggcccctcccctctccacaaacacggaatctcaccggacagcaccctatcctgatgcgcggccggtccctctccacaaacacagaatgaccaacaccgggtctcactggacaacacccgatgaggcagcagcctccctgtctccattctacaagtcaggaaccagacacatggagagtcacgcttccaaagtcacaccactaggggtaggatgggaccggacctgaccttgggccaccagaggcaatgccatgttgcctccccatcctgtcctgtgacatcgagtccagagtggaattcttcccaagatgattgcaggaaggagcgttcaaagtcacagacccagagtgtccagtgctggccaccagctggtgtcatcaactcagggtggtttagctgtgggggaaggaggagggaaaggaagggttcgtgttggatttaatgttcagaacttaggaagtgcctacaattaaccccttgttcttccatcctgaaaagcagaatgagagaataaatggaaggagttgtaatcagctccttcaaaccggggtttgccccatttatccaaaaggctaccttgttggtatgagactccacaagggacctcatgttactgaaaaccgctcaggatccaaagcacgtgacagtcaaccccgaggggaagatgtgagcggctattgagtgcctggtgtgcgaataccctcttcaccacccccatgctcctgcaggctccacacggcacccccagaccacactgcatgatgtgacatggacgcctgcactgggtgaggacctgcctcgttgtccctgtgtccctgacccaacacagagctggcatctggtgctcaggaaatggttgctgaatgaatgaattaatcaatgaatgaatgcaggttgactaacaggtcacaaccagcccaagcaagctgccccagccacaaagtatgtggctccttcaggcaacaatttgcgtcaagaattagtcacagatgagggcaggaaaagctcatccggtcccagaaaccccaaagccaggtgagcttgatgaccggccaaaaaaccaagcccacactcaaaatgatcttgctgtgtgagctggacggtgacatttacagggacagcctcctccagccccagcagccagcacacacgcaccggcctgggaaaccacgcagagtttagatcagcggcagacctgctatgaaacaacaactttatactaacgatggaaaaggccaagactggtggatggagtcagtgctattctggggcccaggccaggggggctgtcgtaatcccaccatgtgtgtctattatcagattataccccacacctggagttttattctaaggacccggaacagtgactcacgagcggtgggaaatcaggacggtgtagcatcctgactctggcagacaaggaggtctttcaagacctgggctggcctcatggacactggccagggcagcaggcaggagggctctgagctcccaaaggatctcatctggaaggatctttgtccacttcaggtcatctgcacctcccagagaagtcatagtaggatcctgggccaactcaaggccaactttacgactcaggagataacctttctcggggaaacacttagaacggtccaaaaaccaagcgtttggccttgcgacagcgaaggctcccagtccctgcaggtgttgaggcagcaggatcagaggcgggagcagaaacccacccgagaagacggacctggcgaaaaaccagtgcctcagcctccacccaccccagtctgtgttttcacaaatgcactttttagtgtcgatccagtgggcttgagaaaaacatagaaaaaccatggtctgtgtgtcagctgaactctgctggctacttagagggaaggaaagtgatctcataaaaactgagattttaatcaaccactgttgatcacaagccctctcctaccggcgagacacaaccctgggcatcctgttgtagggcctcgtgccaagcctgctggttacctgccaccgagagagagcaatgaggtcagatggtccctgcagaagtgagatcattagaaagccacgtgcccatcgtgtcctgcgtgtaaagactgctaccacacaatgcctgtgtctatgacagcacacacaagacactacaatcaatgtgttaactgagaaaactaaattttaagaaaacaacccagaaaaacatagtgccttcctcacaactgcctttcttgccaccactgtccacctgggcccctgccttgccagagggagccaccccgcttctgacgctggaagccactgtctccctttcactttcttccgctgtatttaaaatatcgagtgcctaagttttttccaagatgcttctttccaggttcctactgaaaagcctcatcaatttcccccaccgcaggcacaacgggtgctgccaacgttggaaaataactttggcacattacagtccaccgcaggcagtcctcatctcccaagatctgtaatttaaaagatgacaacaaaattgtaggacccgccgtccttggagctgcatttatttcaagaattacggggaaaaaaaaaagactttcttggccactaatgtatacacgttaggtaccaaaggtatttttaattgtaacatttaactgcttataggtttttgttttgtgtttttttgtttttaagtattgatctgtcaactggcttaaaaataaggcttcattttcttctcccaaggccttgctcgtgactgggtcaggcttgcctgcaaacccaaggcggcagttcacagctcggagcccgtgtgccgctgtctgttctgtgggcggcaatctgagatgcccccatttctatatttaatcccaactgacggagcgtgggcgccggcctcctatattaagaaaatgatagtaacttcatcttgttttaaataccccacccgttagtaattacaagagttctgaaaagatccagttgagtgagaacctgcgagacagccctggcctctccctcccaggttctgtggctgggaccatggacagaggaatattcactaagtggttcccggacgtctgggagcatcatagacccagggagaagggccaagagctgcccacgcccattgattccttacattctatagagtctgaagcagggaaggggggaggtcttgactgcttcctgatgtttgagtatccatgcttcactttcaaaataaggaagcagagaaagggtagatggattttgcatcccaactgccatggaggccccagcaagaggaggctgcagctacacacgagcccccaggcccacccctaagaaggacaggccagtgagaggctgcggcctcagcctggaggctaccaaagcaaggtcgcttcctggaaggcccagaaattttggtggggtgtcagtttccttccaagagtccaggggacgctccttttgaagggtttgtgttcatcacttggaacagggaaatgttgtcagtgggtatctgccacgcatgcccctggcgaccacagctaaagagagaagcacaggctggacaatgtggcaccaaaaaaaaaaaaaaaagaaagaaaagaaaagaaaaacacccccatccgacccgtacacaggtagaaaagtacgttctttttttttttttttttttaattgataattcttgggtgtttctcgcagagggggatttggcagggtcacaggacaatagtggagggaaggtcagcagataaacaagtgaacaaaggtctctggttttcctaggcagaggaccctgcggccttccgcagtgtttgtgtccctgggtacttgagattagggagtggtgatgactcttaacgagcatgctgccttcaagcatctgtttaacaaagcacatcttgcaccgcccttaatccatttaaccctgagtggacacagcacatgtttcagagagcacagggttgggggtaaggtcacagatcaacaggatcccaaggcagaagaatttttcttagtacagaacaaaatgaaaagtctcccatgtctacctctttctacacagacacggcaaccatccgatttctcaatcttttccccacctttcccccctttctattccacaaaactgccattgtcatcatggcccgttctcaatgagctgttgggtacacctcccagacagggtggtggccgggcagaggggctcctcacttcccagtaggggcggccgggcagaggcgcccctcacctcccggacggggcggctggccgggcggggcgctgacccccccgcctccctcccagatggggcggctggccgggcggggggctgacccccccacatccctcccggatggggcggctggccgggcagaggggctcctctcttcccagtaggggcggccgggcagaggcgcccctcacctcccggatgaggcggctggccgggcggggggctgtcccccccacatccttcccggacggggcggcgggccgggcggggggctgacccccccacctccctcccggacggggcggctgtccgggcagaggggctcctcacttcccagtaggggcggccgggcagaggcgcccctcacctcccggaaggggcggctggccgggcggggggctgacccccccacctccctcccagacggggcggctgacccccacctccctcccggacggggtggctgccgggtggagacgctcctcacttcccagacggggtggctgccgggcggaggggcttctcacttctcagacggggcggttgccaggcagagggtctcctcacttctcagacggggcggccgggcagagacgctcctcacatcccagacggggcggcagggcagaggcgctccccacatctcagatgatgggcggccgggcagagacgctcctcacttcctagatgggatggcggccgggcagagacgctcctcactttccagactgggcagccaggcagagaggctcctcacatcccagacgacgggcggccaggcagagacgctcctcacttcccagacggggtggtggccgggcagaggctgcaatctcggcactttggggggccaaggcaggcagctgggaggtggaggttgtagcgagccgagatcacgccactgcactccagcctgggcaccattgagcactgagtgaacgagactccgtctgcaatcccggcacctcgggaggccgaggctggcggatcactcgcggttaggagctggagaccagcccggccaacacagcgaaaccccgtctccaccaaaaaaatacgaaaaccagtcaggcgtggcggcgcgcgcctgcaatcgcaggcactcggcaggctgaggcaggagaatcaggcagggaggttgcagtgagccaagatggcagcagcacagtccagcttcggctcggcatcagagggagaccgtggcaagagagggagagggagaccgtggggagagggggagggggagggggagagggagaggacgttcttacggttcatggcaagacctcaaccaaatactccatatttctggaaaggggtcagtgccccatgatttgagagggatgacgtgctggccaccagggacccggctgagaggaggacccagtgtgggcaggacaaagtgagttcctgggacaggtgcctataggatgcttggactggagtgatatgaaccccacgcccaggctttcagggttgacaccatctcggggttcaaggttcaagttcaccagtccccacgtcccgctcccccgctgaagcatcaggatggacgtgaagctgttcttcagaacagaagaacctggagaacgatgttttcaaacaccaagatcctagaaggcgagtactagaaggaatttaactgcagcctgtgccactcagcttcacgaggaagaaagcggcgtcccaaagcatttgtttgttcacctcttgatccccctagaccagaagttcctcaagagtagggaacagctcttcgtccacctttttccttccttgccccaacactgagggtctggtgtgttgtgtcccacgtagcagtgggggctccggccaaacaaggtcacggaattggaaaagagtaactgtgccctcttttgcatttttcagtgaaagtcaactcctcctgcaggtgcaaaagattgttttttcacaactgccccaagaagaccaagtgaacaagagcgtcttggtggaggcctcacttgcgtcccctcccatgttttctctgccttccctttcctctgcctcctcctatagtctcaggctaagctgtgctgtcccctggcctcaagacccccagcagcgttgtttggctccccagcagctagacacctgcatggatgtttgtcgcagaaggtttgactcccaaccagccagcagggctgtgtcttcttcacagtgtccctggtggagcacggcggggctcggcacacaggaggtgcctggtcactggttctcgagttagagagcggtcattacgtgtttctcacgtgcagcgcacgtgcagcctggcacaatcctctgggtggggctgactgcgcggcaccagcacagtccgcagtccttcccacgcaggaccttcatttttcccagtccagtcattcagctactgagtgctgactccatgccaggccctgcgctaagtgggaatgcaggagtgaacagacagacagaggtcacaggaaagtgtgtcaggagtgatggtgccttggaataaaaagtaagctgaggcagtctaatttatacagagtgctcatgagaggtctctttccttttcttcagagacctggagaaaaacacaggcagccttacagttgtctgggtaacccaggtagagagaaagaaccaagaccctggcagagggaacagcaacaggcggagggaagagcaaccaggcagagggaacagtaacaggaggaggggacagcaacagacagagggaaccacaacaggcggagggaaccacgaccaggcgggggaactgcaacaggcggagggaactgcaaccaggcagagggaaccgcagcaggcagaaggaacagccacaggtggagggaactgtgaccgggcagagggaactacaactgggcagagggaaccacaaacaggcagagggaaccacaaccagacagagggaactacaactgggcagagggaaccacaaacaggcagagggaaccacaacaggcagaaggaacagcaacaggtggaggaaactgcaaccaggcagagggaaccacaaccaggcagagggaactacaaccaggcagagggaaccgcaacaggcagaaggaacagccacaggcagagggaacagtgaccaaagggaactacaaccaggcagagggaaccacaacaggcagaaggaacagccacaggcagggggaacagcgaccagagggaactacaaccgggcagagggaaccacaacaggcagaaggaacagcaacaggcagagggaaccacgaccaggcagagggaactacaaccaggcagagggaaccgcaacaggcagaaggaacagccacaggcagagggaacagtgaccagagggaactacaaccgggcagagggaaccacaacaggcagaaggaacagccacaggcagggggaacagcgaccagagagaactacaaccgggcagagggaaccacaacaggcagaaggaacagcaacaggcagagggaaccacgaccaggtggagagaactgcaacaggcagagggaaccacaaccaggcagagggaactacaaccgggcagagggaaccacaacaggcagaaggaacagccacaggcggagggaacagcaaccagagggaactacaactgggcagagggaactacaaccgggcagagggaaccacaacaggcagaaggaacagcaacaggcagaaggaacagcaacaggcagagggaaccacgaccaggcagagggaacagccacaggcagagggaaccgcaaccaggcagagagaaccatgaccaggtggagagaactgcaaccacgtgaagggaacagtgactggatggaaggaaaagcgactgggcggagggaaaagcgactgggcggagggaacagcgaccggacagagggctcccagcacagccagtacatctccccagaccctcctagactgtcatagctggcgcagtcagtggctctttactgataaacttatttgtagactgaagatagcacagaatagaaaaccactacgtcctggccactattttctgccatgacagcactcaccgccaaggccgatcaacagtcatgttcgccctgtcggctttcatttactcccttgacccaggtgtgcacactgtgacttggggctggcagagcaggcaaaacagacgtggtctccagcctcggcagcagaggccgagtcatcccagttaaggggctcagtcatgacctcacacccacattctgcaaaccaggtgccagggcagtgcccagtaggctgcaactagagggtgcttggacttggacgggacagcggaacaagctctgatggcccaaactttacaggttctgtgttggtaaagacttggatttgggggattgcagtagggggctgggaggacagctccaagatatggggagaggagggacccagagacccagacagagacataaagtcggcctgctcctgccctgagtctttccgcctccttcctgtgggtggattttgttattttttttttccagttccaacacttaggtattttttatttttccttttaagtaataagctcaaagtttgtcacttttactccgaaaacatctttagctatctccccgattttgataggaagtattcagttttcattatcttctacataatcataagtccagacgttactttttctttggccggcagttatttgcaggagtgttccatttccaggggctatgttctcgttaaggaggcttaggcttaatgggtctcactttagggaacttataattaaaacgctctttgtggtcaagtgcatgatcctattttgtaaacgctcccctggatatgagaaaaaagcttgagttccccatggagcagaacattctctatgtctgtaataataaaactaataaagtaaatgtaataaaagttatgaaagtaactgatctttcttaaatgcctcccatgtgctgccttccctgtgttatctcgtctgtttgtaatccctgcattatctcactggtggggaggagagaaaggcccagagagtttaggttaggtgagggctgccacaggtcacagcctcagggcaccgttcacacgtcaccttcagaagttaggacaaggacagcaagtggggaatccagaggaagagcaggtccaaggtgaagctgccacaggctgccagagcttgggagtaacaactgagctggatattagaaaatctgtcagttgccacttggaggcgggagctgaggccgtggggtcaggtgagctcacgggagaaaaggtgggaagagggtgagggcagacctcaggggcacacccacactcaggggcaggtgaaagaggaggaggcagagcctccagagagccccagggtcctccccctgatgtgcgcagaaccactcggggtgcgatcaacattcagacacccaggcccattccccagccaccctggcgcccaccagcgtgggaggatgaaggccttggaaagcataatggcctgaaatcctgtgaggggacctcagggtggccaggtcagtggtgtccaatgctctggagaggtccagggacatgggtgggagattgctggacatagggacacggttgctggatccattgagacaaacctacactctagctgtgggtttctgaggcccctgaatcatcagagccacccagggcacttgttgctaaaaatacaggtttctgggccccagcccagccctgctgcagcaaaacctccaggagaagggctggggaatctgtttgtttgttttgttgttgttgttgttgctttttgagacagagtcttgttctgtcacccaggctggatggagtgcagtggtatgatcttggctcactgtaacctccacctcccaggttcaagtgattatcctgcctcagcctcccaagtagctgggattacaggtacctgccactacacctggctaatttttgtatttttagtagagacgagatttcatcatgatggccaggctggtcttgaactcctgacctcaagttatccacctgccttggcctcccaaagtgctgggattacaggtgtgagccaccacgttcagccggaatctgcacttttaacaagcacaaagatggtttctaaggctcagatgagtttaggaaactctattgtggcccctcttccctgccacatgctccatcctgtgcttcccagtaccatgggagctgagcaagctctcccgatgaggatacccaccttgacttctgtttcagagcagagttagtttttactcagagccgatgtgatcagtaaacgttgaggttcttttctaagccagagaacaacccatgccctccctccattcccctcacgctctaaagaccctgatacaggaaccggagaagcaaccagaacaacccggatcatcccatggacgagggccccatgagggccacatctaggctgaaatgagagagacaggctgatgtaccacaaaggtgcggtgttgggggtgccagccgggtcagttcccccaacaaaaccggtccagggcagggctggagctgccgctgtccgcaaggttcaatctgcccctcaaggtatctcaactccctccgtccccagctattggggtctcttgtggtataattcagggaggatcacagtaactaactgtaggaatgaggttcttcttccggcttctcaaaatagctcaaaatgggtactaggctgctcacttaagggtacccaggaagatgacaagaaggatttcagaactgggaaacttgctgagaagaagggaaacacactcatggacacacgagtccaggagcgcccctttctcacagccgtttctctttcccagggtaggacgtttaccgcggcagtgctgccccagcctgtccccgagaattccctggggagcttgggacactacagctcctggacacccctcaccccgactcccagggtctgggtcacctgtcgggtggggtctgggtgtctgtggttttaagagttccccaagtgaccttaataggcagcagagacgaggtcacagatccaacctctcaggggaggcgccaacatcacctcaagtggaggagacatacagaccggatctgacggagaagtgagaagagggcaggatggagaggaagggctggctctaagcaaaaggaggctgcgtctccctcggtagagctggtggccggggaaggagcctgagatagagggaaaggctccaaagctaaccacaggatgggcggttagcaggggccaggggagatggttaaggggtattacaaaattgaaagaatgaataagccctactattcgacagcacaacagggtgaccacagtcaataataacgtaattgtacatttcaaaataactaaaagagtgtaagtggattgtttgtaacacaaaagataaatgcttgaggaaatggatacctcattccccatgatgtgctttctttctttccctccctccctccctccccctctctctatctctccctttctttctttatttctttatttcgaggcagagtctcgctctgtcacccaggctggctggattggagtggcatgatcttggctcactgtaacccctccctcctgggcacaagtgattctcctgcctctgcctcccaagcagctgggattacaggcacccgccatcatacccaactaatttttgtatttttagtagagacagggttttaccatgttggccaggctggtctcaaactcctgacctcaagtgatctgcccaccttggcctcccaaagtgctgggactacaggcgtgagccaccgcacctggccgatgtactaatttcatattgtgtgcctgtatcaaaccatctcatgtaccccataaatatatatacctactatgtacccaaaaaattttttaaaaagctgtccacagatgaaattaaaactttttaattacatgaggtgagcccacctgccaaaactgcctgggaagggtggcctagagcgcagagattgagagagacatgacacggcccagtggggactccagaccagtagcctcagcatcgcaaggagcaagggggcagtgcaagttcttgggccccttcctacctaccaaacacctggggtgaccccagtgagccagaaccatggctctcaatgtgagtgcacagcataatcgcctgcggctgctaagctggtggtgtctgggggacaggggtggagaaggatgtcacttcacttggaagaaacacccagaaactgcaaactacgtgatttgctatccagataaatgggttagtaataaaaagtccctggaagatcaaggataggccaagggctgaaggctggaatggggagggaagatcaggccagcagacaggcagaggttgcggccagaaagtggagggaaaatctacagtccctgaatttcccagcaaaaacctcagaagccagaagacatggaacaaacgcttccaagccctgtaaggaacacttccccacaccctgctcagccacaagtcttttcagacgcgcaaagcttgggaagatgaccctctaggccccatgacagagactatctcttccttcatcagtcactccaatgtctaacagacacgtctgaccagcggcactcacccacccacagatgtggccacatgaggacattgtggccaaaaggggaggctgcaattttcaatatgccctccacccctttggggctggacgctgatgaagagataggcaacatgtggctcaccaagagggcactcccaggctggcggagccacagggcagcagaagcctgggtccccagcaccacggggctgcctatcggctgtggatcgctcacagctgcattgttagttcaaaaaaaaaaaagaaaaagtcctctctcttgttgaagccaagctgtctgggtggcagctgagcctttattccagttaatatattgcctttcttggggagccactggaggacatgttccaccaaaaccagcaaagagaaaaattgaagatccatgaatcctggcatccaacccaggcgagtgcaaaggccgtcccaggagagcagtttagagcaggcacagaatgagcaacgtggaggaggactgaaggcggacccctctagggaacatggcagggaacagttccgtggcaggcagactgtactgagagcatcttacagagctgctggagggcacagaacaaccattggctttcgtagtaacaccgtttcgagggaaagtaatcacagtaccccacctgatgaacagtgatggggctcatgcatctgaaacttacgcatcaagggacagcaacagagcctcatgcttaggaagcagagtcctgaatcagaaacaggagctacccctgcaggagcgatgggaggaagagagacccacaagccctctggattgtttccacataatacttaagtataaaataattaatttaaaaataaaaaataaagtacaaggaaaaaactaagatggccaaaagttgagaagtgaagaatgcatgctcaagactcctctaaggtctgccttgaacagggctaccggctgacccccaagaacttccctctcccaaggtctggacccccacaggtatctgctaggtcaccccttcagtctgtacaagcaaacgtgggggtagtggaggggagaacagggggtaactggtcttttctgggccgatcctgagcactctatgcaggagggtgggggaccatggagtgactcactcaggactcaagggaagacagaaaccaaaagcccagtttgccctcttcacatgcccttcaacccagaactgcacgcacaccaccaaccctcctcccgcatgggatgatgacggtcctccacaccctccacgagccattcaacccagaacggcagagaccccgccaaccctcctccctcatgggacgatgacggtcctccacaccctccacgagcccttcaacccacaactgcacacacaccatcatcaaccctcctcccgcacgggacaatgaccctccacaccctcgggctcactccccagatctctactattcccctaactaaagacaggaggttctgtccatgcaaccaggaaagcagcagtgagctagtgtctggtgggagcactgcgttctccctgtgattccaggcagaagagctcctccctttccaagacacccttcatgagtttatcaccacccagacctgtgtggaaagtcctcaagaccaaggctagccagtgtgtggaactcacagaaaacgggactcgggcgcagctttgcgcagtctagaattacagaataaaggctaaattggcatccacttcaccattttcttctgcaactggcatctagtgaattacagtttagtgaagattttgattcaaatgattttagatgccattcttgccaacagtactttacaggaaaatacgataaaatcacagttcgtgttttcaatgtggtgtttattttattcattcactcgtggtgagttaccaggccctataagagaaggttaaggctgggcacggtggctcatgcctgtaatcccagcactttgggaggccgaggcgggcagatcacggggtcaggagatcgagaccatcctggctaacatgctgaaaacccgtctctactaaaaatacaaaaaattatctgggcgtggtggcgggcacctgtagtcccagctacttgggaggctgaggcaggagaatggtgtgaacccgggaggcagagcttgcagtgagccgagatcacgccactacactccagcctgggtgggcgacagagtgagactctgtctaaaaaaaaaaaaaaaaaaaaaaaaaagagagaaggttaagcttggtaaaattattagatttttttacaaattgtgggcagaaaatccctactaaaataggcattattgtaaagccattattcctaatacacatcttaacatgtgcctgtatcagtgaagcagcttagacaccgtaaatgaacatgacatgctgcggacttccaaggggcttctccagtgacttctcccactcctggcatctcactgatgcctttcagcacataaagaaagaaagactgggcttaagggtgtggacttttcagcacgtagacagcgacgacggaaatgccccatttagtgaagaacgtctaacatgtcgacaaagtaagcagaactcatagcccagagtttcacaaattccaggcagaatggagctgtatgagtctcaaacacaatactcggaagtggcagaagcctgggcttgggatggccaggctcggaagagggagctgagcccaccctggaattcgagggaggacagagacatgggggcagtaaggaaggggaaacagggaatgcctctgaggcaacagctgttctgcgggcagcaagacactcagattgtcatagtgctcgtgggcctggaagtgctgttataaagcacagcttcccttggcaagaccatagttaatcagatttacgagcagtgcagccaccactgagtgggaagacgaaaacaatcatgaagtaggaaaaagaaaaagaaacaaactttggaaacatatctcacatcagggccgggcgcggtggctcacgcctgtgatcccagcactttgggaggccaaggtgggcagatcacttgaggtcaggagtttgagaccagcctggccaacatagtaaaaccccatctctacttaaaatgcaaaaattagccgagtgtggtggcacgtgcctgtaatcccagctacttgggaagctgaagcgggagaatctcttgaacccaggaggcggaggatacagtgagacaagatcagatcatgccactgcactctagcctgggcaacagagtgagactccatctcataggcccagagccaatgtcccaaacctgaaagtgattggtgcctctcactcatggagtaagtatctgcaaggtgcccctttgactctctgtgggtgctggagccaacacaaagaatatgatccaatccctgctcctgaggtgtccctggtagaaatataaatgtaagccagcacagagtggtgtcgtttgagctgggttttgaaggataaataggagttttctgagtggagaagaaaacagaacttggtgttccaggcagttagaaatgacagcattgtgcaaaagtgcctgttatgcctgggacagatgaatagctcagtacaccaagaacagctgcacccagccttcattaaccacacagcaccttcacaacttctgctctcactgataccacttcactatgatcttatctccttgacgtttttcttcaaccaacttgtttttaaaagcttactttggtcttcttcaaaattacagtagccatgaaattacaggtttgatatgctatctacattttctttaaatcatgaaaaataattacacattattaaagtaaaaagtgtccatctgtgaacctagagctaaatcctcttgcgttccagctgtttcccaaactctgggaagccaagctacgaactttaaggcctgtgttgtttgagaagagatctgtacttactgggaaaaaataaatgcaaacattagaggaaaaacattattaacgagtcactgccggtgagtcacgatgctagtctttggggccatcggtgccctgcaaggccctgccctgaccctcagcaggcattaaacatctcacagctatcagatcccggggctgcatgtgagcctccccagggacgcagtcatccgtttaatttttatcaccaatttgaaaaatgggtgccagagtctttcttttttttttttttttttcttgagacggagtctcactctgtcgcccaggctggagtgcagtggcacgatctcagctcactgcaacctccgcctcccaggttcaagtgattctcttgcctcagcctcccgagtagctgggactacaggcgcctgccaccacacctggctaatttttgtatttctagtaaagatggggttttgccatgttggccaggccggtcttgaactcctgacctcaggtgatccagccacctcggcctcccaaagtgctgggattacaggcgtgacctatggcgcccagcctgccagcatatttctgtgatttattgttcaaccttttcttttgagatagggtctcgttctgttgcccaggctgaagtgcagtggcacgatcatggctcactgcaacttcgacctcctgggctcaagcgatcctcccacctcagcctcccagtagctgggatcacaggtgcaggccaccatgcccggcttattatttatttttttgtagagacaggggtctccctatgtcgcccaggctggtcttgaactcctaagctcaggcaatcctcccgcctccatctcccaaagtgctgggattacaggcatgtgccactgcacctggcctattgtacaacttcttggaagtttgtacttcaccaaacacaagagcctcaagtgtgtcagacagcagcacggctgccagagaagcaacaatgagccaagggacaggaatggagtggccagggcgcttccttcttacctccgtgcacaaagccgtgcagggtgcagtctgaaggccccaccaggtggatcaagctggactggctgtagctgacagtgttcggctctggaattgcaaaagagagagattagttatggggtaggctgattcccacagctgaatggtctggcaatgccgaaaccaccctcaggtctacacagtcaacgaaggcgtccaaagccgggttcagctatgatttctctaaggaaaactatggtctccaaacaggctacagttggtgaaggagaggttttcaaggattcatgacccattctgttagtgggccatgacgagactctctggggccatcagtgccctgcaaggccctgcccaggggtagccatgaaacacctcaaagctgtgagtcccggggctgcgtgtgaccctccaccaggctctagttaaccatctgacttgcatttccaattttacaagaagtgccacagtgtttctgtaatttactccacagcctgagaatgtacagctccacagggagcaagctgttccctctggccagcccccaaccccattcactgctctatcacctcactcttgcaagagccccaaatatcttggaggagcttcagtcacccaacactgcactgctcctgaaatatctttaagaggccgcacttaagaaaaaaagccgatgacatataacgtccagtctctagaaggtagacctttctttttttcttgagacaaagcctcgctctattgcccaggctgaagtgcagtggcacaatctcagctcactgtagcctccgcctcctgggtccaagcaattcttgtgcctcagcctcccaagtagctgggattacaggcatctgccagcacacctggctaatttttgtgtttttagtagagacagggtttcaccatattggccaggctggtcttgaactcctgacctcaagtgatccacccgcctcagcctcccaaagtgttaggattacaggcgtgaaccaccttgcccagcccaatatataatttttgaaaagtcagttatccttattgttttctctgtctgacaaaagaaaatggaattaccatgagctcttcggattcatagctgtcagctgtccagctttgaccatgtagggactatgtggccacatggctgtccatttttagggtttatgacaaaattagccctgcctcagacaagttcaagtgcctgcctcatccctggcgcttgcgttgaaaacagtgttcacttccaagcctggtccagcccttccagagcagatggggtcctggcaggtcacctagccccggctcctgggttgggatccgcctttctggggtcaggcagtgctctggccaagccccaggaagatccgccctgagccatccacgagggtgcgagggctggtgaacatggtcaggccaggggcttggccctgggtctgaaacgcctcccacttgatgtctctggccctctggccaggcccatagtcctgctcccgtaagcagtagtttggaggctgagggcatgggggaagcaagagaggataggggaggaagggaggttctggagttggactgcctgggtttgaatcccagctctgctgccttcatgggaacttaacctccctttgcctcagtttcctcagctggaaccagagatggtgaaagcaaaactatcgggttatgaagatgatgtaaacacctagcacacacgaagccctgtaaatagcttgtcacataggacgggatccgaaaaggagagttttgtgtttatggctgtgtaaacctcgcccactgctatcctgggggcctggttcaggctcctcacatcattttgaaactgcaggttcacagattaggcactgtgtcagtcaagatcatagtcactgctgcagcagataaaccctgaaaccctagtgggtcacacagtgaggttgatttcctgctaggtaaagtccaaatcaggctttcctagtggggtagatttcctccaaatgttggagatgcggggattcaggcccctttggtcccgtagctccattacttttaatgggtagctttgaaggttaccttggaaagggacagagtcgggggaggctcacacacctgaggttttgatgggtcaggcctggaagcagcatttcactctgctcacactctagacatggtattttcacacccgctgcagggcaggcagggcagtgtggccctgctatgtgtggagacaggcttggtcatctctgtctggttctacccctccagtcaccagatccctgttgtattctttgcacacgtggagcacctcaccctcaaggacgaccacctgaaaccctatccggcctctgcgctgacctcagagcgcagcagctggtcacatgcatgcagtcttctccatcgtgtttacacgcaattcttcatgttcctgcagccaatgaactaagaagatgagttacctacacttgcaccctttatacagcagcggaagagggaacagaagagcacactcattcaggaaaggaaagaacacaggagctacccaggagcccctggcccaagcagagatgactcccgccagggtctgagctatggccatggggaagggtctttagttagactctgattccactcttggggaggaactacatggtcctttgctcagcctcctggaaggttcttccctgttggttatccaccatggcctcatccaagcgggcactgggaaataggggcccacggcccacctcctgcttgtctaggtttggggaggttactttaaagtttgaacagtcaaaagctttttttcagtccaggcaaattcagtttcctcgtaaacttagtaggcatctgatctgtctgcctccagtcagttccatgtgacaggaaccacacccaacgttctttccaagtgtcacgctcaagcctggtgtattttttttacttttccatcccactccactccactccctttctcactctctcaagacacatgtgggtgtgtaaaccacactttaatctgatttttgacacaaggctgagtctttttcttttttgagacggagtctcgctctgtcacccaggatggagtgcagtgatgtgatctcggctcactgcaagctctgcgtcccgggttcacgccattctcctgcctcagcctcctgagtagctgtgactacaggcgcccgccactgcgcccggctaattttttgtatttttagtagagacggggtttcaccgtggtctgaatctcctgacctcgtgatccacccacctcagcctcccaaagtgctgggatgacaggcgtaagccaccgggcccagccaaggctgagtcttaatgggcttttgatttcagtctccttccgttcccaggtcaataaacaataggcttttccaatcttttcatgccgccaatttctggccttctctcagagccccactcctcgtggtattgtgggtttcagggtgtactaaattcccctgaggcccaaggtgccctcggcaattgcaggctgattctggacacccctagaccctggcaggcccacgctgaagcagcaggtgggagagcaggcatcccctcccttgggccaagccacaggtcgtgcgaactggctgcaatgcaggatgtcggggcccccaggggctccttcccaaaagccttggcacttggaggggtctgttggttggctttgagatcgcgaccctgcacgccagctcccagaggggcccagatgcaaggacctcttgacgcatattcaggagggtgggctgggtggggaggcccccagaatgtggctttttgggaggagctcctctactctgcttctgactccatgacatgctacttctcccacacaccctggcatgagggcaagcccagggcaggaatgaggaaactcacatggcagctaacagtgaccaggagagaagggaggggaggcggtttgaaattctgtgtgtggagtgtacccgtgtgctggggccgctgtaacaagagtgcccaccaaaggctggcgccttaagcggcagaaattcgtctcacagccctggaggctggaagtcccaggtcaaggtatcagcagctggctcttcctgaggcctctctgctgggcttgtagatgccgccttcccccgtgtcctcacagggttgttcctctgtgtgtgtctgtcctaacctcctcttcttgtaaagacaccagcccaccctaatgacctcattttaacttaattacctctttaaagactctttctttacattcagtgacattctgagggactcagggtcaggacctcaacatatgatttgtggtgacacaatttagcaaccatgacccagaggcacatcaaagcctcggaaatgacactggggccgggcgcagtggctcatgcctgtaatcctagcactttgggaggctgaggcaggtggatcacctgaggtcaggagttcgagaccaacctggccaacatggtgaaacccctctctattaaaaatacaaaaattagccaggcatggtggcgggtgcctgtaatctcagctacttgggaggctaaggcaggagaatcacttgaaccagggaggcgaagtttgcagtgagctgagatcatgctgttgcactccaacctgggcaacaagagcaaaacgccgtctcaaaaaaaaaagaaaaacaaagcaatgaaatcggacacttaggagacctcaggtatcaacttctgggtcaggaccacccttcatcccaccagctttttcggctactgagaaacattacttgcctaaggccagacctagaaaggacctgtcttcacctgaaatgagtcccagtcatttcgtggcccagtgggctggcgtgttcaacagcttggggcttgtcagttaggaatgagctaccctttctgagtgccagctgtcctgggcagggaacagatgaggtctagtccctgaccaggtctgccttctggccaggtatggtggctcacgcctgtaatcccaacactttgggaggctgaggcgggcggatcgcctgaggtcaggagttcgagaccagcttggccaacatggcgaaaccctgtctctacaaaaaatacaaaaattagctgggtgtggtggcacatgcctgtaatcccagctactcaggaggctgaggcaccagaatcgcttgaacccaggaggtggaggttgcagtgagccgagatcgcaccattgcactccagcctggtcaacagagtgagacttgtctcaaaaaaaaaaaaaaaaaaaaaatatatatatatatatatatatatatatatatagacaaattatagctgtatatattggacaaaggacttttaaggaactctcagactctgaggtacctgaaagacgaggccacccctgtggaggttgctaggcaacagtctgaactcttgctctaggatgaggtctgggatgtgggatggacaggggctgggagcaggcaagtcaaaggccaagatggcctctccagggcagagacggagggtcctcccacgggatgggatagcacgtgtcacacctgttagaaagaccccagtgccaagcacatacgcacactcttctcccagagctgctgttccccattgacccggacgcccctgccaaacccaactcaggctaagccaccatacaggagaccaggctggtctcagatgagcccacccctgggctcccgagggtaccgggaagccatgccactgagataccggctctaccaggaaactggagtcaaagatgcagatgttcagaaatgctcaagaaagaatggacatgggacttcctaagaaatatttaaaagccgagtctctaatccaatcatctgaggaagatacatttttataaaacaaaaaagtaaaaataaaagcacatacaatcaggaaatcgagattcaggaggccaactctgactgacagtgaataacacattctgaaaaatatcacgtgtagatttacagtcaatcggaggctggcaaacagaagagaatcccacgagtaaaggaatttaaactgattgaaaaccttgagtaattttagtgtccctgaggatcagttaaaggcagaagctaggatctaatccatgcttctcaaagccagagtcagcccagcagtgctgcccacaccccccggggtctggcacctaccccaagctctctccagaaaccgctcacaaaaaggtaggtccaggcagcccccatgttccatccaaccctctcctccaggacccctttgtgttaggctagacatagcctcttcttgtctcttgcaagggcactgatcactggatttggggcccacctgcataacccagatgatctcaagatccttaatttaaccacatctgcaaagacccattttccatataaggtcccattcacaggctctagggatttgaatgtggacatattgtctggccctgagcgctgtgttggtgcctttcctaagacacctcccgttgctcccatcccatcccattccttacagccggtgtctgacctgactgctgggctgccctcccaaaagcacggcctgggcactgcctgccccagcacgtgcctccaggcctgtctggtgtattgctgtgttgataaactggctgtttaaattttatttttaaaagatatctcagccgggcgcagtggctcacgtctgtaatcccagctctttgggaggccgaggtgggcggatcacgaggtcaggagatcgagaccatcctggctaatacggtgaaaccccatctctactaaaaatacaaaaaataagtggggcatggtggcgggcgcctgtagtcccagctactggggaggctgaggcaggagaatggcgtgaacccgggaggcagagcttgcagtgagctgagatcgcgccactgcactccagccaggaggatagagcgagattctgcctcaaattaaaaaaaaaaaaagatatctctttactggggtttcatcaaagcagcaccattctttctattaatactgacacattaattttctttctttctttttttggtgtttgttaaaaagcagacatgaaaagagaggaaacctacagtggtttccccaacagtaaagaaaccgacctacccagtcccactggcctaaggtgacaaccagtccgcttttggcaagttgaggctggagcacagactgagtcagagacacacatgtgagaccaaatacacacaaactcctgttcaagcctcaagttgacccgcccagaaaacaagcacactcctgctgcatgccagcagccaagcccagaaagccatgctctcatctgtgcgcccactgggttttcaccagtcccctttggtgcttatgtggactaagcaagggaggtgagcggccataacaatgccccgagtccaggttagcaggggccagggcgcctctcggcagggctaggagcaggtggaccccagagtggagcccacatcacaggcacatccaagggggaaagggattacttgaggcaggtcctccaccactgctgagggtggaggcaaaacagagaaagctgagtaagaaactcaaacacccaccatgaccagggtctcccaaggcatggtggggggcagcaaaccctcctcaggctgccatcccgcatgaggtaccctgtggaacccagcacagagcacgaatgtgccacgagcccaggccatcgcagggaggcagagaagcacacagtgcgtcctggagggagttctcctgccactacgacaacatgaccaccatgtgtgcagtagggagaggggtaatgctcgttgcctgcccccgagggctcacccttttcctagggggacagatgctccccagggccccctgccctgaattgtttctaggaacgcggggagttctctgggtagaaagtccttgcttgaggcaaaacatctcatcgtgccttcgtttagattttgagtgaacattttgttaaagccagagcaccctgacatgagagcaagaggatggatggcagaagggaccaacaccacagggaaactgggcatgccacagagcccagtgcctactggcagagcccctcctccaatcaatgtctgaacagtggggccgggaagaagtggcgcttgaacagctgctgccgtttttttcttttttggatgagttggaaatcccatcaagaacaagccacttggccaggtgtggtggttcacacatgtaatctcagcactttgggaggccaaggcaggctcatcacttgaggtcaggagttagagaccagcctggccaatatggtgaaaccccatctctactaaaaatacaaaaattagccgggcatggtggcacatgcctgtaattgtaataccagctactcgggaggctgaggcaggagaatcacttgaacccaggaggcagaggctgcagtgagccaagattgtgccagtgcactccagcttgtgtgacatagcaagactccaactcaaaaaaaaaaaaaaaagaaaagaacaagccactgagcgaacacaaggaaaagatacaacaaaaacaaattccttgtgaacaggtgcacaccacctgcctggcaatggaggccccacgcacagtgccctctgggactccctgagtcacgcaggtcgccttccaggtgtgtgactggaggggtctacatggctcagggcggggctgggggacagccctccctggggaccccagagaaactggttcccggagagcatgctcagcacctggggaacctcaagcatgaggctcacgtaggcccggcctgctcctgcctcctatgcgtccccggtgaggagtggcacctgctgctggtgtccgcggctcttacctgggttgaggactggctggacgatgtccccgttcctccacttggtctccatgcgctccagcttctgggcttcataccgcttccggccctcctcctcctgctcctgccgggaatactgcgagaaaccaaagacaggtcaggcccaggcaggacacggcctcctcccctcgctgggcggccatgatcccaggcccttatagccttgtgtaactgggactattttttcttctgttcatgtgtgttttaatataagtaataagaatacagaaacagtgaaatcccatgtggctccactccccagagagacaacctgggtcaagtgtttggtttagatccttcctggaattgctttaatgcctacaaatatataaaaagctctatggtgctgtatgtggagcttaaaagcaaccgtgtatctatttaacgtaatttttgtaactatgtgggcacttagcttgttcccaatttttctttacttttcttttctttgtttttgagatggagtctcgctctgtcccaggctgaagtgcagtggcgtgatctcagctcactgcaacctctgcctcccgggttcaagtgattctcctgcctcagcctccccggtacctgggacgacaggtgcccgccaccatgcccggctaatttttgtatttttagtagagatggggtttcacgatgttggccaggctcatcttgatctcttgaccttgcgatctgcccgcctcagcctcccaaagtgctgggattacaggcgtgagccaccgtgcccggcccccgctttttcactattaaaaccatactgatcctaggttacttaaaatcattttgcactgtcccattgcttcctaggattcattacagaataaagggatcctcaaaaaggccccacccactctccaaagtccatgacagagcaggaaccctgtgtgtccctgctgacccttggccaatcaaacaggttatatattggtagagaatgggcagtaaaagatggaactgtcctcccacggctctccaaatgaatcacaggggttttgactccagaagttaaaaataaatgtgactataagactcagcacaggccgggcatggtggctcgtgcctgtaatcccagcaatttgggaggctgaggcgggtggatcacttgaggtcaggagttcgagactagcctggccaacatggtgaaacccctggccaacatggtgaaaccccgcctctactaaaaataccaaaattagccaggggtggtggtgggcacctgtagtcttagccactcgggaggctgaggcaagggaatcgcttgaatccgggagatggaggttgcagtgagccgagattgcgccactgcactccagcctgggcgacagagcgagactccgtctaaaaaaataaataaataaataaaaaacaccaacaactcagcacaaaagccaaagctcctgagtcccgggacacagcagggggatactgcatttcttggacgtaacagacggttcactcactgccctgctgtgcacactggaggggatgcaccacactcggatgggaccctcggaggggccctcggggcctgtgtgctggccgcaggctggttccagaccctctgcctgctccatcccccacgaccttctccctcccccttggcctggccaggggccgactaccacctggctgttctgattagcctccacttctgctctcacattcactcaaccaaccattccagctgagcttgtggggaagccacggaactcagggcccctctgggcccctcggccgcctgttgaagcccctctgacctaagcaagttcacttcagacggctgtgttaggccttctttcaaaagccagttttaaacatctcgataattcctgctcatggctcagctccaaaattgtgcagggtctcagcaccattcaccgttcctcggcgtaactacccatcatcttcagttgagaacccatcttcaaaagaggctgagaagggagctgaagcgtttgttcaaaagaagcaaactgtggggagtgttttaagttgcagtggataattcaaccttttcctccataaataaaccacgtcctaatgttccaccggccaagtaacgactgtgagaagagagtctgtgctgtgtatctacctaggaacattggtgggtgaacttcagcatcctcaagagatgccttttaaagggatttttttttttaaaggagccagcccccggtctaataaatcctcatggtatccagtacatttgtctgggcttggcaggcgcacagggaaatgatggggcccagtcctggacacaagccatgaggagaagcccagcctcctccccaatgctgcctttccatctgggaacaaaaccgctggaacattttaatgatggctggcacctaactctcacccccgagagctcatcaaacccaactgatctgaagcagcagacagcgtggcccaaatatctgagagacaggctgtgaacctcttcgctagagcacatattcagacatttgaaaaaaaccaaagcatccacccccgacagccactcagcctgtccagggctgcggctgcccctctggtcatcctggggcccctcgggcccatcacaggcccaccgaggttccctgctcactgggaaagctgcaggcaggctggggaggaaggtggagcaaagaaaagacatcctgcgctagacgactgtgcgcatggccggcagctgggttcctccagggagacgcacacatccaggaaaccagtgtgtgtgtgtggtgtgtgtgtgtgtgtgcgtgttcaagatatctacatgcatacgtatgtgacatctctatttgtatgtgtatatataatatatatctgtatatctatacatacagggacgtacattttcctaaatcggggatggctgtctgtagaaaggtcagcgggagcatgctcatgcaatataagacagccctgtggccaggccaccagcagatgggcataaatgcccatcggagccagggaaggaagctgtactttctgggattcctaagcaggcctctggccgggcccaccagtgaaaaacaggagacctagattccaaatcagtgggaggtttatactacgtgggcctagcgtgtgttggggggaagatggtgcaaagagctctgaacaacagctgcagctgagaaccgtgcagcctctcccatctgcggctccggctgcctcggagccatggaatggtttcaacaactcctcgacaaggccaagttggtatttatgtctcatcaaacccactctacaaaggaaatgaaaaagcaactgggagctcctccaggatgtgggagggagggagctaattactgggcaaggagaggcgaggctaacaggggccacgctgaaagcaccctgtccctgcagcgaggggatgggagccaggggagtcagaagctacccgtcccctccactggccaaaaacccaacagctcttggcgcatcgatcctaagcgacaaggcagcaaaagtgactgtgttcaggtccaggcccgcccctcggtatcacccgcctgagatgcaccatcagatgctgaagccaggcatggggcctgggagagatttcagaactgggtagcatctgaaaattaaatccgttaaatgctatgtctcaatatttacatgtgatgtggctcactgaacgccaagggcttagagaaaagaatgaacgtggggtgggtgtgcttgcaattctgcggagaacagccaggagcccccatctgacccctgctccttaggtcttcaatcacccccaagttagcactgctgaaaatgaccacaacttccatctcagccaagaagcagggagagaacagccccacaagaacaagagacgggagaggttgttgaaccgagggctggtgcagtgggttgaacagcatccctcaaaatgtatatccacctgaaacctcaaaatgcaaatgctccaaaaaccaggtctttgtagttgtaaacagttagaatgaggtcacagcagaatgggacgggccctgagcccagtgacccgtactccggtaagcaggccgtgcgaagatggaggcagaagcttcagtgacgcagcctcagccaagggacgcctggagccacccggcgctggagacgccaggagggatcctcgcctggggccaatggagggcgcagggccttgcccatacctttgcacttctggcctccagaactgtgacagaatcaacttctattgtttgagagctacccagtcagtggcactttgtcacagcagccccgggacactgtcaggtgggaatatgagacctcggactccacaccccgaccctgagcccccgcccactggccagattctggcatgctgccatcctgctctcataaaaccaaaggtgcagccaccagcctgcccttcccattaaatatggacagggctcccctgtcaccaagattaaaaaaaaacaaaacctaggccaaacagcagctggacccggcagccagccacacccacctggggagacaccccacccagaccttcactgccctctgaggagaccctggcagggtgcctggtcagacacggagctggggacagaagagacggcaggaagcaggtctcaaggagcacctccccagtctcacatgggcagtggcagcagggaccgaggccccatcagccctggtgaccggggggccacgggaagatggagagccaggcctcctacaggcgggaagtggcctgcacccggcaaacgctggggagggaaccaaggctgccggcagcggcaagagcacccagcgtctctattgggtctggaagcaaaaagagcaggcaccaattcctgacaatctggttctcagttttattatttctaaaaatgtattctatatatatatctcagccggaggaaaagctccctgccggggcccacactgcagagactcagaatcctggttccttccctctaagaagagctcttcctgggggctgtggcctgtggaccgcagggtcaggctgcgggaggagctggtcacatctgtccttggacttgccaatgaacttggggcacaggagaaggaggcgagggagtacttttaggcaacgaattaaatttctttattcccaacgtctcccctccaggagtctgtatgtgtggcttccacaggcttcgcccacaggcccgcccatggcaggacccctctgacaacataatgaactggtattatgaaaggtgcttctgccgggcgcagtggttcacacctgtaatcccagcactttgggaggccgaggtgggtggatcatgaggtcaggagatcaagaccatcctggctaacatggagaaatcccgtctctactaaaaaatatatataaaataattagctgggtgtggtggcgggcgcctgtagtcccagctactcaggaggctgaggcaggagaatggcgtgaacgtgggaggcggagcttgcagtgagccgagatcgcgccactgcactccagcctgggcaacagagcaagattccgtctcaaaaaaacaaaaaaaaacaaaaaaaacaaaaagaaagaaagaaagaaagatgcttccaaccacagcgaagccagaaatgagagaaacacagagaaggagacagaccccagcaggggacaagaagggagaaagacaaaagctcatatgacaactgtttccacagccactgcgtcagaagcagagatcagaaccagcttgcaggggccacgggggaacagctggcccggcccccgcagcctggtggtcctggctcccgaaaggacatgtcactatcacgatcctgtcaccgtcttttctctggttagggagtgtgacaaaaaggtccctaggttggagggatgtttatgtccacgggttctgggccagcttgcgctcacattcccagcatgaattaaacatacattagaagatcccacacagacatgtctcctccccacccgtgtttcctcggaggcaggacagaaactcctgtggagccagggatgccctgcccagcccagaggggacactgcctgctggcggacctggccccctgtgccctagctctggcctgttgctcccttgagacccttagctgaacgagcctcccaacatcaggtgaggtgacctgatctctgccatctgcccccaagagagaagtagaaagggcaccttaccacaacaggaggcacctcgaggaccttgtccacattcttcagcgacaggggcacataccacagggtggccttattggtcagctttttggcaccttaagagaagaaaatcacattaagtgacgcccgggagacggggtgggaatgtgagcgtccaggcacgtggcaggtgctgctccagcgcccggtcccagtacctgaaacacaccacagtgtgcaccacctctctggcccccaacccccaagcccccaagcccccaaggccttttcagcatcctggctggggagtgctgccatcatgtgagtgtggacaaacagaacaagagaccccagagcccatggagagaggctgcgtggggcccacccccatcacaaggcatgcccccccaaaactggcttgagctcaggaccccagcccctcccaacgcacccactctggggcagttctccctttccaggggctgctgagaagacttcagaccacgtggtttaagcctggatggtccggagctggtcagccacaacacccaacagggatcaccctggagggcaccaactgcaggcaacctcctcttcctggtgttttgacagaaagggagcttgattatgaaaacacatcagaggctcccaacgagcctcccagacagaggggaaggactgattggctgcaggcagacgcccttcgttctgcccggggacacgaggctgagcccgcttcacctgctggctcaagtctccagcaactgatcgctgctgacatcgaacgtcaaaatcaaaagtgccttgctggggaacttgacgtcctgatgctcagacacgcaacgtcttctgcagatcccatccacctgtctaagcactgccaagaactcccgccaaacggggaagcccagaaagacacttggcccatacagacgtgcaggctgcagaggctcaggaggatgtggaggctgtgcccaggcagagcagcccaggggaggggcaggggggacggccagggcccccacagcccaaagcacagagcagcggagccagctcatcaagctccatttttgccaccccaggaacttcctttccttcacaccagacactcgggtgtgctgccagcccatccaaagctccaccagaagcttccaggtgccaagagacgggctataggctgctgactccttggggcactgagcccacccacagagcaaagtggggctgcaggacagggaaggctgtccgtgctgagaaacagaggctcgtggcctgctggggctaaaggagcctagagatccctggtgtacacccctcacttgtacagaaggagtctgaggcccagagacgtctaggggtttacccagggtcacacagcaacttggtgccatactcccatgtcccagtcatttcagagaagtatctgcaaggatgcctttaaaaagtggctttgtcaggcacggtggctcacacctgtaatcccagcactctgggaggctgaggtgggtggatcacttgagctcaggagttccagaccagcctgggtaacatggcgaaaccccgtctctaccaaaaatacaaaaaattagctgggttggctgggcacggtggctcacacctgtaatcccagcactttgggaggccgaggcaggcggatcacctgaggtcaggagtttgaggccagcctgaccaacatggagaaaccccgtctctactaaaaatacaaaaattagccgggcgtggtggtgcctgtaatcccagctactcgggaggctgaggcaggagaacagcttgaacccaggaggcagaggttgcggtgagccgagatggcgccattgcactctaggctgggcaacgagagcaaaactctgcctcaaaaaaaaaaaaaaaaaaaaaaaaattagctgggcatggcggtgcacacatgtggtcccaaaggctgagataggaggatcgcttgagcccggaaggcagagattacagtgagcctagattgcaccactgcactccagcctgggcgacagagcgaggccctgtcttaaaaaaataaataaaagtggcttcttcaatgtggaagatcctcactataaagcagaagagcaaactgcaggaagtaatggaggaaagggagacaggagcagccccagggccctgcccaaaacccccagaggagctcacttcccaccagttacctgaacctgcctccccaaggcaaagcgcttttcctcctcaataaacacagccccaggctccaaatcaagccccagggggcccattaagaaaaggcctgtgcctgcccctcctccccgcacagaacacaccttgggaacgtggggctcccagtgcttgggaaccacaggcaaataatatgggaaaatatttccaccgcactttgactgagagtgaatctgacaacctgcttttgggaataaagatttcctgttggattcagctagagccagcctgacaagccggtttccatgacaactcgagtggccctctggacctaaatgaacaccatggagcaaatgaggcaaacatgctaattgtattttctccatcatttaatgaaagcatcaaaagacaacggcagtattagaaaattatctctcggccagctgcggtggcttacgcctgtaatcccagcactctggcaggccgaggcaggcggatcacgagctcagaatcgagaccatgctggctaacaggtctctactaaaaatacaaaaaaattagccaggcatggtgacacgtgcctgtaatcccagctactcgggaggctgaggcaggagaatcacttgaacctgagaggcggaggttgtagtgagccgagattgcgccactgcactctagcctgcacgacagagcaagactcggtctcaaaaaaaaaaaaaaaaaaaaaaaaatctcttaaaatcttaagagctcccagctatttttctggagcaattcacagcaatcacatcccagttagcttaatattttgacagttgctggagataaatgagctgcctcaaaggcaaggtttgcgggtcgtctgcctgggcctgtgctcgctcagcggcctcgtgacaggcagcacagcccaggtaaaggggacacacagaacaggggacccctgtctcctggggtggagacagcacacagatgtcacgcacacagcttatgactcagcctgctccgggccagggtccccgcgcgcatcctctgcccccacctgcaatacccctatctttcagaggtcaccacccattcagccagtgctccccgtgtgcccacagtgtgccaggcactgttcttgctgttggggccttcgagttcaatttccaggggacacatgggcagagacagagaagggcctcaagagaacaatagagactgcagagagagatggcagagaagcagaagcacagacgaggagatgagcgagacagagggggagatgagactcgcagtcacagagtgagacaacagcgggctccggggcctgaccaagatatggagaaaagctacagccttggggctccaaggcctccctgcccagcccctgctacagggaaaaggctgaagctgggaagaagaacctggggcaccgcccagccccactgggaaaagccttcatgtgctggcaagcgtatcctgccttctccaagcctcacgcgcacgacagcgcaatgccagccctgatgtccccagggaggaggggtgggcatctctgtccctctctgagcccatccttcggaggaggaggagaaggccgagggctgtggtggccaggacacagctgggaggccgagaagctcccagcaccttctgggtgagctggtgggggctgctctctcatgctcacgcctgccttggctctgcacaggagcctctccccctctcagcccctaaagagcgagggatcctcacgaatatgtcagattgtgtcgtcctcatcaaaaccccatcagccagcatgtctcagcactgatgcccagttcttcctggtcgcctctgctcattcacttattcattcattcatttgctcatccactatcggttccatatctattatgggccagcagaagcggccaggaaagggaagttcaggatctagggagttcctcaagctcagtacccctgacctttggcctgcatcactctctgctgtggggacagcgggtcccagccatgctgaaagcctgagaacgcctttctgtctccctgcctctctccccatcatcccaaactgctcggctgggctcggtggctcatgcctgtaatcccagcactttgggaggccgaggcagctggatcacctgaggtcaggagtttcagaccaccctggccatcatggcgaaaccctgtctttactaaaaatacaaaaattagccaggtatggtggctcatgcctgtaatcccagctactcaggaggctgaagcaggagaatagcttgaacctgggaggcaggagaatagctcgaacctgggaggcagaggttgcgatgagccaagatcacaccactgcactccagactgggcaacagagtgagacaccatctcaaaaaaaaaaaaaaaaaaaaaaagaaacctgctcttcagggcttcctctgaggctatggcctctgatggaccacaaagggggctttcatggcagaaaatctgcaaagcagatcccttcctggcatttttgaagccaccaactcctgcaatgacaaagggcactgctgactgggccctcacaagcaggaaggtcctaggaagcaggagagcgcggcaggccatccctcctctccaggaaggggccaaggctccacccccagcacagtcggagaagagctgcgatctcacaggagatggcagggaacccccaaggcccctaaagtggggaacccacccagccctgagcctctcccgagtcgtgggcgctgctcctgttgtgggaggtgcccatacaccccttcctgggccacatcctgagaccagcatccagggtccctctgatgtcagaggtgcctgctgagggagcagcaggcaatgggaacgcagaccaccttccaccccaggcccttgctcagctccatctgcccacctgccggagctgggctgacacagccattctaatcaaccctgctgaggtcctcagaatgttctagatgcataatcgtgcttgctaccggcccgtcatgaggaagaggactcaagcccctcaaatggctgtgagctggcactccacggggcagccactgctgaggaacaggcatggggaagaggaggaaaccggcccagcctctctgcatgggaggactggtgacctgggaggtggcagggagaggaccaggggcaggggaagaggcccgccttccccctcacctcccgtccccagcctgggtataaaaagaagcgtgagctggtgaacactggagccgccccctcctgcagcgcccagtgggaaggggaagggggtttccatggttaccatggccaaggaggagaatattcagatgaaagcagaggcaaaggttcacccagtgagcttccatctgagcctggtttctggggctcccaggagcaagcactgtcctctctggagccaacacctccctacgcttgaggagggcaagcagggcagggagacctgcagaggggtggatggtgcgtaccggcctcacagcccgcgcccagcccctgccatggatgagctggccacgggcagcaggacaggcagcatgatgtgctcaggccggacccagacagcagggttgagtcctgctctgggtaactgaactcgtttcctaacccctctgtgcccctttcctgtctgcaaaatcagggcaatggacatagctgctcccagggccatggtgggaggtgagagaggtctcattggtggaaaaggggccaggccctggagcgtcctctgccctcaggagggaagcagctgtgtagccacggcccttactgctccagtcaacactgtcgctcccagaagtacctgtgaggatgttttcggacatcacgttgacctgcacctccacagagtgcttggaggtgtaggtgatctccgcgctgacatgcgccacctcaccgatgcacatgggagacaggaagtcggtgcgctcgacacgagccagggcggccacacagcgctcctgtggagacagaggcagttgtcagcccaggtcagccagcccagccccgagagccccacccaggacatgccccctggaaacggtctttgcctttgctttcattccccactgtgaaagcaaccaatgtatcaccatttattggcaccgcggttttttttttttttttttgagatggagtctcgctctgtcacccaggctggagtgcagtggcaagatctcagctcactgcaagctcagcctcccgggttcacgacattctcctgcctcagcctcccgagtagctaggactacaggcgcccgctgggactacagcgggccttccgagtagctgggactacagccaccacgcccagctaattttttgtttttttgttttgttttgttttttgtttttgagatggagtctcgctctgtcacccaggctggagtgcagtggtgcgatctcccctcactgcaagcgccgcctcccagattcacgccattctcctgcctcagcctcccgagtagctgggactacaggcgcccgccaccatgcccggctaatttttttgtatttttagtagagacggggtttctccatgttagccagaatggtctcaatctcctgacctcgtgatccgcccgcctcggcctcccaaagtgctgggattacaggcatgagccaccgcgcccggcctagcaccgcgcattcctaaacacaaaagcacagggatgtagaggagccctgcagagtccagcccaaagcaactgctgcaggcgattccccaagtgatgggatcaccagctgcttcttcctttcttctgattttctcacaataggcatgcattatttgcttaatataaagtgaacaaatgcatacatacccattatggaaaatttgggaaatacagaaaagtagaaagaaggggaacgtcactcctcccattcaaagataaccatggttactattttgggatctgtctttccaggcttttttcccaagaatcggggtgggttttgttgtctcacttgttcgtctgcctggctcgtttcacagttttagtctaatatagctgtgcaaaaactaagtatacaccctcaccttctgattctttttcattcaacgtaggaaaaataatctgcctgtgttgtgacacattctttgcaatcactattcttctttaggccgggcgcggtggctcatgactataattccagaactttgggaggccgaggtgggcggatcacatgaggccaggagttcgagaccagcctggccaacatggtgaaactccatctctactaaaaatacaaaagttacccgggcgtggcggtgcacatctgtaatcccagctactcaggagactgaggtatgagaatcaggtgaactcgggacggggaggttgcagtgagctgagattgcgccactgcactccagcctgggtgacagagcaagactccatctcaaaaacaacaacaacaacaaaacactaaatacactctcaccttgattctttttcattcagtatgggaaaaataatctgcccgtgttgtgacatggctctttgcaatcactattcttttttttttgagatggagtctcactctgttgcccagactggaatgcagtggtgcaatctcggttcactgcaacctccgcctccaggattcaggcaattctcctgcctcagcctcctgagtagctgggattacagatgtgcaccaccacgcctggctaatttctgtatttttagtaaagacggggttttaccatgttggcctcaaactcttgacttcagatgatccgcctgcctcatcctcccaaagtgctgggattacaggcgtgagccaccgtgcccggcccaactattctttttaaaaatttaaaagtggccaggtgtggtggctcacgcctgtaatcccagcacttcgggaggccaaggcgggtggatcacacggtcaggagatcgagaccatcctggctaacatggtgaaaccccgtctctactaaaaatacaaaaaattagccgggtgtggtggtgggtgcctgtagtcccagttactcgggaggctgaggcaggagaatggcgtgaacccgggaggcggagcttgcagtgagccaagatcgcaccactgcgctccagcctgggcgacagagcgagactccgtctcaaaaaaaaaaatttttttcaatgttatttatccttcaaataggcgacccattctcatgattcaaaatgtaaaaggaacaaaaaagcctatggtgctgggtctacctctggccacctcgtctcctgtcacacaggaccccttggcagctgggtcccatgtgtcagatcggactccgcatctacaaccacatggtggggctcccagatggtggacatggacaggtggtgctgcaccctgcttttctctcttcatctaccctggggatcatcctctgtagctttgggtcttagttcgttgggctgccagaacaaaatgccatagcctgggcagcttagacacaacagaaatttatttctcacagtcctggaggggggaagtctccagggacttgggtcattccaagatcagggacgggcagattccatgcctggtaagggccggcttcctggttcacagacagtgcttctcgtgtgtcctcacgtggtggccggggcaaatgagctccctcgggaccctttcatgaagacattgatctcattcatgaagccccacccccataccctcgtcacctcccaaaggccccaccccctaataccatcaccctgggggtgagaatttcaacacatgagagacacgaacactcagacggtggctgtgtctgaaagacttccttatcctttccagtgacttccttttcatagcactccaatgtaaaattattatcatttatagagacaggaccttgctgtgttgcccaggcaggaatgcaatggctattcacaggcacaatcatgctcactgcagcctcaaactcctcctgggctcaagcgatcctccagcctcagcctcctgagtagctgcgactacaggcacatgcaaccacacctaacttttttttagaaaattactttcaattgctagccaggtggaattgaacattcttcttctgttagagatgtggggcacccccagttgattctcattacaaacaatgctgtgatgggcaccctttcacttaaaccgttttctgcatttgggattattttctgggcccaaggacaaatacttttatatatggtcctaagtgtttctcggaacagcagtgactggcctggcctttgccacctcacggcatcctgaccaacactcagaattgacttatttctcatctttgctgaataaatgacacaaaagatgaccttgtgtttgagccatggggaatgtgagtctccatttcccagaggactgccatgactttctactgcaacaatcacttccttaggacattgacagcatgacactgaggagccctcaggcttcccagggcgggcagggagcaggtgagggaggggcctgggccagctccgacatcactggcccaggtgatcttcacagcaccccgacaaggggtgccacattaggcaagcgtcccagagcacacagagtatgtggcagtcacttcaagccctggtgtgtgcgtctgtgctctcccacctaccgcctgccgcccccaaagcaccgacatgcagctcacccacctacatgaggactcactgaggtggggttaacatgcaagctccggggcccaccccaaacccagcacctgcttctttggaggtaggctgggagcctctgtctgagccctttcccaggtgactctcctgcacacaggcgcagggactctgtgactgcatctggggctgggcaagaaaagttctagagctggcaagggtggcccgatgcttccccattctggtttgcacgggcttgtcccccagcaaaccctgccctactcacaacaggtcacagtaaagcgatgcctggaactgtctctttcacccccaagtcaatgtatgtggctatggcgccacccattggccaaaggctgttagggcagggctgcacagagccaggcaagaattaggcaccgcctctgggcagggcaatgcccatcttggaaggagccaagcactgtctgcaagacctaaaagtggaatgaagccaagtgtgtgttgtttgagggtgattaagtacattacggtatgctatgctgacacagatcaaacagacctatgggcgcatgcttttccggggcagaggccttccacctccctgctctgcagctggtttctggcagcatctgtggggcctctcagtgctgggtgtacagaggggtgtgggtcagagaagcctgggttctagctggggggacggacgagaagtaaatggggccacgccacgatggggacagcccaacgatgttaaggcagggtgtgacttcagatgagaggcatctgagctgaggcctaaaagaccaggtgttaggcaggaggaggtagggggagcgttggtaccacagggagaggaaagagcagcaggagtggggaggtggtggggagccaccagaacacagggacgcagtgggagacatggacaaaggtccaaagaggcaggctgccaggccttgcaggccaggatgtgaggggcaggtccaagggtcgctcagaggaggcacaaaagcaggttcactcaaagagtgacttgaggcaggaggaaggcagagcgcacctctctgtgctgtccctcgggacacccctcacacagaaccatccagtagccttccccacagtgccacggggacacctggtgatggcttcaagcctgtccttcatagggcagaaggccactgatgacccttgagcttggttctctcccagcttaacatactaaagaaaaaagtagggccgggcgcagtggctcacgcctgtaatcccagcactttaggaggccgaggcaggtggatcacaaggtcaggagttcgaggccagcgtggccaacagagtgaaaccctgtctctactaaaaatacaaaaactagccgggtgtggtggcacatgcctgtagtcacagctactcgggaggctgaggcaggagaatcacttgaacccaggaggcagaggttgcagtgagctgagaccgcaccattgcaccccagcctgggcgacagagcaagactctgtctcaaaaaaaaaaaaaaaaaaaaaaaaaaagaaaagaagaagaaaagtaatgtctcccaggcatccacacaggagtcttgccacggtcccatttcactatcaggagaccctgtgggaggattttgttttactatctggcagcctgggaggctgcagaggtggctctgtgtgtctgatgggtacagatggcaggagccgggacccaggacggctctgatttgctggtgggcggctgcttcccaggagcgggcagggctctggaccaggcccagggagtccctgaaggccagtgtgatccaaaacttcaatacatggactgacaagtatttgcgttccatgggaagatctcccagcagccagtgcctcggatgagccccacacctcctgcttccaggactgcaggagcaggaaaagccccaccctgccctgggacagagacacgagctcctgatcagcacctgcccggaagtgccctctgccacgctctcaaaagcaactggtatcacacggcccgtgaggcacaggcatcccagcaaaccacaggcactgggttcctcatggccacagggcttccagccaggacagcagctgcagaggcagagcctaaaagaacagctctgggccctgggttcaaatcctagctctactgcttactagctctgtgaccttgtgcagcgacacaacctctccacgtctcagtctctgtaaacacagataataaatggtcccaacaggctgctgcagagattcgaggggataacgaatgggaagaactcggtgcttaggaaacgcccaggagaggcagggatagctgtctctctctgacatgcggggataaggcaattgacaaacgtcaagtgcgtggaccatgcccggcatccagtgagggcccagagagggtgcggtctcatcaccatgcccagccccggccgtcttctggctgacggcagctctgaggatgcagctgtctggaaagccacctaactgttctaggcctcagtttccccacttgtaaaacagggttaagaacagtgcctgtctcagcaggtggctgggaagactacacagggagaggaagggtgagccccagcgtggccgcgggctcatcgtaagcgcttactcggtggacgctctccatgacggttgacggtgccaggcccgagctcccagcattcatcagatgatgcctaagcacgctctatgctcagtctggagaaaccaagggcagaagtcctgcctgccctcgtggggctaccactctgtacaagcacagcaggtcaggagtggagcagcagctggaagcagagagggagccaggccatcaggggcatggccggacgctgtgttttgtttttgtagaaacagggtctcactctgtcatccaggctggagagcagtgatgtgatctcaactcactgcagcctcaaccttcctgggctcaggtgatcctgctgcctcagcctcccaagaagctgagactacaggcacaggccaccacacctggctaatttttgtagtttttgtagagacaaagtttcatcatgttgcccaggctggcctcaaactcctgagctcaagtgacctgtccatcttagcttcccaaagtgctgggattccaacatttttatgtagagcctagaagaggagagggcagggccctgtggatatctggggaaagccagtgcaaaggcccaaggcaggaatgcacccagcaagtccgagaagaagcagaaaagccaatgtggccagagggagagttgagaaagagatgtaggaggtgaggtccccgagccgcgctaggcagagacagggactcgtgcggacgtgcctttggctttgggcgaaacaggagatctggagggctctgagcaggcagcactgtgccctgactccacatctccctggctactgctggagaacaaaccaggcagcagggaccagcagggtgacctgccaggaggctgctgcagtgatcaggtgatcgggtgatcggaagagcagcaccattggacccaaagtgggggtgggcctgggggttgtgctcagatctggacttcctggaaggtagagcagtgggatctgctcccagagcctcatgagtttgggagggagagaggctgacagaggctccaggctttgagcctgagcaccggggtgctgcagagaccatttactgaggggagggaggctgggagaagcaagcctggggcaaggacaggagtgtcgtttttttgcacatcaaggccaagcaggccaagtaggcatccagatgggctggccaagaggccccagccagagacagaaccttgggacttccagccacagactggaaggcaccaccaggggagtgtggatgcgggggtcccctgccccacctagggccccagcaaagcccttctaggcactgggactgttctcacccccacgccctggggctgcctggaactcagagaccccctcctaagcctagaatttctggatcaccatcctggggaccagcctcccagaggcttctccaagccaatgtgtcaaaactgtccctccagcagccccagatccggagaaggagcaaggaggggcaagtgttcaaagcacaggttcgaggtatagtcacagcccagacctaccatctgcctccccaggtggcctcaagcaagtgttcaatctctctgtacctcagtttccttatctatgcaactgggataataaaaataacaacagcagctgggcgcagtggctcacgcctgtaatcccagcactttgtgaggccgacgtgggcagatcacttgaagtcaggagttcgagatcagcctggccaacacggtgaaaccccatctctactaaaaatacaaaaaaattagccaggtgtggttgtacacacctgtaatcccagctgctcgggaagctgaggcaggagaatcgcttgaacctgggaggcagacattgcagtgagccgggatcgcaccattgtactctagcctgggtgacagagtgagactctgtctcagaaaaaaaaaaacaagacaagaacagctgcctctccggggtgttgtgaggattccatgagctaaactttagctcctgaagcattctggagctttgcagaatgtcaagtgctgaccaaatggcagcaaaataattccacgattctgagtgacagcatcaccctctggcctcccaagcccctccttcatctttcctccccatcttggggacttttccttccctgtgtccatgctctcctgccagggaccctcactgtctctctctggaagggtgcaacaggaacttgggacttggccctcacccctgccccaggctctcaggctcaggcccaccctccccacagccaccagagggtgctctctgaacgtgactgagctgcaccggagcctcgggtccaaagaatcaatctacccccagcccagccagcgagcccctcctaaaccaggcactgccagcaaacccactcctgaacctgtaccacacgacatcccccacatccacgtccaaccatccgcacttactgtggcttggttcattctacatatgcacacacacatgcatacgcagatacacacacacacacacgcacacacacacagcttccactcctccactgaaacacaccctacccactgttccaggctgaatgcatgtgccatgctctgcatggctgtccccacctcccaaaatccctgtgttgaaatcctaacccccaagggaatggtagtagaaggcagggtctttgggaggtgatgagagaatggggacagagccctcacaaatgggattagtgtccttataaaagggcctgagagagccactcctaccaagcgaggacacacaggaagtgatgtgacatctatgaaccaggaaacaaatgggccctcaacagacacgaaatctgccggcgccctgatcctggacttccagcctccaggactgtgagaaatgcatttccattgttcacaagccagcaggctgtggtcttagttccggcagcccaggctgacagagccagcagccacttcctgcatctcaacagtgtggctcagagctcacagtgcctccgctggtccctggtctctgacgtggcttccacttggcctcttgatagagtggcattatgcccgtgcccatggtggggacctgcacctcacactcccactctccaagctggggctgagtcttcctcttctctgcctccctggaggccacagaaggtgtgctgaccgagccccatagtgcagaggctgcagctgcggcaccaaggcagacgccctgtcctcagcacccaagggctggcttccccccaacagccgcccttcagagaaaatgtcccctccccagggctggggatggctgaatgtcctacagcagccctgaggttgacactagacaccgtgccccttgtccccagctttagggtcacagggccctcccgagctacacaattttggggcaggtggagagctgctcccattgtgggcacagtggtaccaggcctgtgagcttcaaagccaggaagtggccaagtcacagagagccacggcacttgctatggtgccatggccaccagggttggtcagggcagaggtgggacctctcctacatctgctgtctggcctcttatgtctcagctgttggccatcacaataaactccaccccacggaggcggggcatgcttctgatcagggccaggttggcgggggactcggcatggcggggagtggtggagggagggcctgtcagcttgcttgacgcttcatctctggtgggttcctacacctcctggctgaggccaaaaccaagcatagctctgagggtccggtgcagaaatacttgggccacttctcccacagttcccaaggcccagtgcacaaggggagggaaggctgcaggcctggctccccggggaactcctgtcctgaactcacactggtgcggcctccagggcccagaggtatggggcccagacccttaccccgttctggctgttgcaatgccgggtgctgatgatggcgcctgcctcctcgatcatcttcaggatggtccccccgtggacattgccggccacgttggcatcatctggccgcatgatcctagggcagaggagaagcaggatgaggcctctggagaggatgccatttgtgcaacagtgacaatccaaggaggggagaaggtccccaaagggctcaatggctcccggaggaaagagaaccttcccaatgtttgggctcttcctaggtggtgtgttcgtcagggtggggtgccacctgctaggccacggaaggggccctgagatgctgtttccatgagagagaaggagggcagaggggcactttctccccctgaagccacatgtccctggactgccctggcagggaagggctgatggtgaagacctttaagcaaagccacagggcagggaggtggtgatcagcccttggggttcccagtgaccaacacacagactgtgaccctaggagcaaattcccgggaccaccaccacccccgtcaggagtcccagagaagccaggtagccacggctgttctgagaactaaacatgagtcgcagcttcaagaccccaggccctgtcagcaggtgagcgcctgcccactgcgcgctaagctcctctgtgggtcccgggggcagtgtggaatcaggccctggattgaaggcaaggagcctcccaggtcagaaggaatggaaacgccacctcacttccccaaagaggaacaacttcatccttgccgtgagcagccggtagtgtgggagctccacgaaatctctggaatcccaacaagccagcttggcagtcctgccagggcaagttgcctggcaccttcccagacagcacccagctgatgaaagccgccttcacaggccgaggcctggagacgagtgacaggcagcgggcacaggtccagggtccagcatccacctgcagcttgtgtagcctgcccagccttgctggacagtgtgggggccccaggagcagcgtctccccaggtctgcatctcctctctgcttctctagcagctccaaggctgagcaagtcactctccaagagcgttcctggctctggctcttacttgctaggtaacctgggcaagctgtcagaaccctcaatcctccatgtgctcatctgtacaatgggtagaatgacaacactgcctcgcctaactgggagatcacgcagatcgcacactcactccacaacagcgctggcagacacatggtacacagtagatagtccacacgttaactaggagaatttttccctttttggtaagtatttagccaacttggttggaagctccaagaaacccaccatctggccacaggatgccacttctagagcaaatgaccacagatgtcccccagcaacccatagctgcccatccccagtgtcacccctccaccctgggtgagagtctattatgcaaaccagggcccacttaggccaactggcttctggctctgaggtcaggcagggcccaaggttccgtgggaggctcagggacagttgcctgtggagcggccggcacggcgtgacacagtggccgggggatccccagagcacacaagaaacctcatttggcttctcaagtgttcattttaaaatacctttgtttttaaaaattgaacttactctatgaaaggtttttgggctttttttgtctgagttatgaggtagccaattataagtcacaaaatgattctatcagcctcttccctttgttttccacttagtaggaagggccttccccgcaccagctgcagcgggcagagggtcactttccacacaggcctgtcctgggggcactagccaaggctgtgggtgggtgcggagagcagggcccagctcctggttctagagcagtgaggaaacatcagcccagcatttcccaggagcagcagagccagcctccagagcagcctgaatgactgctgcaggcctcactttgcctgtctgtgaagtggagccacacacagcaggctggcccccaggaatgacacaaggccagggagagaagacgcgggccaagggctgcagagcagcggaggaagtgctttcatgcggtgggcactgaagacaggacagatatgtgggtagcctttaagacagaagaccagggacagtgcctgaggccccgaggaagagcctggagccacctggcaacaaagtgaggactcggcacttggcgctgtgccatcaggagtacatgccaggaactgcagaccgcacgccagctggctaccacgggcctggccgcctttcttcggcaccttgggtcctgcaccaaggaccatcctaactccccaactgaccacccaggaagccagcccctgccctcaaggtcagacacaaccctctcccctacaggacctgactcctgcctggggactgtgctgtcacctccaatgcacaaggctcaaagcccaactcacttaccccttctccctttccccaaatcagacaccttccctccaagccagggcagccagtgagtcccagcctcagctgggattccttcccatcctgcataccaccaccagctgctccacacctggcccctccctcttcccctccccacctccctcattccttccaaacagctcaggaaccgctggatccagccagcctccaggacccataaacagctctgtcactctctcaggccccgccccatggcctggccaaggccaaccgtgtccatcccaggacagggtcatgactgcctctgtctaaaggcaggcaggggtgagagccagggagccagggaagctgctgcgtctcactggagacttcgttttcccatttctttttttttttttttgagacggcgtctcgctctgtctcccaggctggagtgcagtggcacgatcttggctcaccgcaagctccgcctcctgggttctcctgcctcagcctcccgagtagctggcactacaggcgcccgccaccacgcccggctaattttttgcattttttagtagagaaggggtttcaccgtattagccaggatggtcttgatctcctgacctcgttcgtgatcccatttctaataaagacacgggtaccgaaagcacttcatgttcctctttactattttgtttgttttttgagacagcgtctcattctgtcacccaggctggagtacagtggcatgatcttggctcactgcaaactccgtctcctgggttcaagcgattcccctgcctcagccttccgagtaagtgggattacaagcatgcaccaccacgcctggctaaattttgtatttttactagagacagggttttgccatgttgcccaggctgtctcaaattcctgacctcaggtgatcctaaagtgctgggattacaggtgtgagccaccgcacccggcccctctttactattaaaaaactgaaatacaggctgggcgcagtggctactagggaggctgaggtaggaggatcacttgagcctgggaagagtacgttgcagtgagccacaattgcaccactgcactcaagcctgggcaacagagtgagatgctgtctcaaaagaaaaaaaaaattgaaatatatttggctgctgggcgcggtggctcacacctgtaatcccagcacttacagaggccgaggcgggggcggatcacttgaggtcaggaattcaggacttgcctggccaaaatggcaaaaccccatctctactaaaaatacaaaaattagcggggcgtggtggtacacacctgcaatcctagctagtcaggaggctgaggcaggagaattgctcgaacctgaaaggcagaggttgcagtgggctgagatcatgccactgcactccagcctgggtgacagagtgagacttcgtctcaaaagaaaaaagaaaagaaagaaatacatttgtctatctctaggattcctggggttaaaaattatctaaaaataaagaaagacacaggccagctcgggcaacggcacaggcctggcccagttctggaggactgtttactgctgagtctgacatgttattcctcccccagcccccaacacgctaatcctgcacttcttccccctcctctgaccccagaaacttcaaggaaagaaagcaagctgcccagggtggggcctttcctacgtggctgccttctttctctgggcctggccccaaacatcccccgctctatcttctgcctgccgggtcctggcagccagtgacccgggctgactgcaggtctggaatgtcacccgggcccacagccccaccctttttctgttccagctgctcctgtcccagatcagaaccatgtctgtccagtccttgtagcatgagtggcaggtgctggggcccaaggctaatggacgcagatgctgccaacccactctcagccaccccactcccggccggtgtcccctctggaggtggcatccagctgatgacaagggctctgaggaagctgagcacacatgggtcaaggagccactcccagaagggcgccaccccacctaatctctgggaaagcttcccagaggaagtgacaccttggccaagtcctgaagggtgagccaggagcagaggtccgagaaggctacgaggagagggaatgttcggggcccaaggccaggagtgcccagcgagctccagaaacagaaagcaaccccacaaagctggcgcatggcccaaaagggggtgaagaagcgatgtcctgagacagggacgcagctgtcatgcagggcctcagggctgagacaaagtctggatccatcctgaaaggaggggaggctggggaggctgaagtccaggaaccacacaatcagacactgtttggggaggtcacctcccatggcctctgcactggcctctcactccccatggcctctgcactggcctctcaccccccgtggccgctgcactggcctctagcccccccatggcctctacactggcctctagcccccccatggcctctacactggcctctagcccccccatggcctctacactggcctctagcccccccatggcctctacactggcctctagccctcccatggcctctacactggcctcttgttccccccatggcctctgcactgcccctcaccccccatggcctctgcacttgcctcttgccttggctgagatcctaactggccccgactgcacagccccaggaccaagtcactcccttatccataccttccagggcctttcccatctacagaataaagactcaatctcctagtaaggcatctggagctctcagggattgggaacttttccgcctcaactctcactgccctgcggggctccgacctgcacctgccagagcactgctgcttagcaggcacgcctggcccttcccaccgttctacctgtcccagcaacgcctgacccaccctttgtgaaggacagggaaccattcacaaataggggagtgtaagcgaatacccactcacagagggcacccggcaccacccacccaaaccccagatgcacagggacaccctgacccaggattccactcgcagaaatttaccccacagctgtttccacacacggttaaacgaagcactgcaagggtactcactgcacagccgtgtataacgcaggacatgggccagcgccgagatgtccacataaggacataaaagcaacagccacacattggaatattgctcagccttgcacgaggaggaggaaccttctcagagaccagctgtcaggtgaaaaacagcaaggcacagagccatgggagcaaggtgaccacctggggcgcagggacgaccattccaggaaggaggtgtgacaaaccagaggcctccatggcccccagaggaagaaactagctactgggcagggacctcggtgagatgcctgtgtcttttggatgcctttaaaccatctcaaccctttcaaattaataagtgttctttgaaaacgcttcaaggcacagctcaaaactcagatctcatcacaccagaggccggccagcactcatcccaagagcgcctacagcagcggccctggggtccagcccacatcctcgcaggacagcccgagcctgttccgcagcgggagtgaggcgcctggaacaattgaggggagcctggcagggaggggagccgctcctgccccctggcctcaccttgagggctggccatgcctcctgtgccctggggtcctctcaaggtggagtcccacctaagccacatggagcctgagtactgggttgaattgtgtcccccaaaagatgtgtttgagaacgaacccccagaaactatgaatgtcaccttacttgaaaagagttctttgcatccagatacaatcaagatgaggtcgccgtgccttaggaagggccctaacccaatgactggtgtccttataggaacagggaagtctcgacatgagacacaggaggtccaggtgaagatgaaggcagagacgggagcagcctcccgtcaaaccttcgggagcatggccctgcccaccgctggtctccagcctgaggaaactgcttccggttgtcacctgccacctggtttgtggccatgcccggaggtctctgatgctcccaaagaaagcagcactgagtggcacaggggagccccgaggcagcagcggcagcaccctcagcaccctcagccctgcccagcaccctcagcccagctcagcaccctcagccccgctcagcaccctcagcccagctcagcacctgccacccacacctggccagccctggacaggcccctgtgcggtgaccttggcagcagccctgcagggcactgaaccctgcctgccccttccacagcccagcacacgaccagctgggagtgtcaccagtgtctctgactctgacacaaaaatgtcagtgctggccaagcgcagtggctcacacctgtaatcccagcactttgggaggccgaggcgggcggatcatgaggtcaggagtttgagaccaggctggccaacatggtgaaaccccgtctctattaaaaatagaaaaaaaatagctgggcgtggtggcaggctcctataatcccagctacttgggaggctgaggcaggagaattgtttgaacccaggaggcggaggttgcagtgagccaagatcatgccattgcactccagcctgggccacagggtgagactgtgtctcaaaaaaaaaaaaaaggacgacgacgactacacttttgtggctggacgcagtggctcacgcctgtaatcccagcactttaggagctgaggcaggtggatcacctgaggtcaggagtttgagaccaacctgaccaacatggagaaaccctgtctctactaaaaatacaaaattagccaaccatggtggcacatgcctgtaatcccagctacctgggaggctgaggcaggagaatcgcttaaacccaagaagcgaagtttgtggtgagccaagatcgcgccattgcactccagcctgggcaacaagagcgaaactccgcctcaaaaaaaaaaaaagtcagtgctaaaatgaaaacattactacgtgaaacccagggtaaccaggggtaggtgagccttgcttcctttactccatggtggaagctaaagtgcccacctgaaggtgcacagccaggtaagggtctggggtataggcaggtcaggcccacacggggcctgcagggcaggcggctcattactgcccccttctgacaaaggcctcaaaccagaggtcaagcaccaggtgcgtgtgctccaccctcacctcagctggaaagctgggtgggacagaggtgtctgggcagactgtccccagtcatagggctgcagatgccactcatggctgggggccaccacctggggcctgcagacactcggagcttccttcaggagctcagcagaggctgccttggccaggagtagacaagggacaggggttgcccttcccggaaggaaaggagaagcgggtctccttatggcatggggggcgggggcctcacaccaggcagccttgagggacaaaacaggcacgtggatgggtgtggggcctcaaagtccaggcacaagcacacataaatgcctcctctttccatgggggactctgccaaacagaagctcaagcagccctgcttctcctcttttttttttttttgagagggagtctcgctctgtcacccaggctggaatgcagtggcgtgatcttggctctctgcaacctccacctcccgggttcaagtgattctcctacctcagcctcccaagtagctgggattacaggtgcgtgccaccatgcctggctaatttttgtattttttagtagagacgggggtttcaccatgttggccaggctggtctcaaactcctgacctcagttgatccacctgcctcggcctcccaaagtgctgagattacaggcgtgagtcacagagtctggcccctgcttctcctctttgacttgctgcctaaggcagttccggcgaagtcccttcaacccacagacacgccactgcatctccagaagagggaagggtgggaggaagggctgtgccaaggaaagttccagcagcacttgcaggcccccaagcaggacgggggaagaggccaacaatggccctgagctcccagcctccattttggccaggggcaggggactgacccaggaggctccttgtgcagcccacagaccccccctccaccgcaggtaggaagctcagcagcgctgggaaaccgcagtgaacccagcccagctgaagggagcagagggaagccacaggagcaaggctggaaagaaaaccaggtgccttcctccctggggactagagcaggcaggggagtgccctggtccgtcaggggaccccagctcacgcaggcctgcacttcctatcccagcttcggctgaccacctaatcttgggggtcagtaagagccaggccaggtgggtgccctactgcccttcctggctgcatgacaccagccagcctgctgggcacaggggccgagtcccctctacccacccttcccttccaaatgtccctaaacaatccacccacagtggcccctgcacggcctagacatgcccatgactggcagtacctgctcagctggaaagccatggtggctaggacatcccaggatcagatgcagagaaaggcgagggagcagggaagcatcacagagtccttgcctgacccaggactgtcccagctccctgccacaccgggcttggtggggagcaccccccacccccagcttcctgagctgcccaatctggccaggaagaggctgcctcgccaatccagagcgtctaccagaaaccggtcgtcatggaaaccttgctttataaataattacagaagaagtaattctgtgagctcttctggctgccatgccaggagatcaggaaggcagaggggccgctgctgagcggcctcagggaagcggctatgaggctctgccttctctgacagggcacaagaccccctagtctttctccagggtctcagccaaagccaggtctggccccactgccgccttctagagctccctgaaatgtagacaggggaggaaggtcacaggccagcaaggactccagcaggtccaagcctgcatcctgctgatggagctggcatctaaagcctgtcccaagggccagctccctggctgaagcaaagtggacaggcggtccagcctcccctctcctcaggccacacccctgtccttccccactccccctcttccttcccccaacccctgcttcagaggatgccatgcctgtcttggggctcagcaactccactacccttcctccactcccgcgggctcttaggctgccggctgccacctgtgggccctgtgccccccaacccgtactctcttcactccgcctccccttctactgggtgtcaggaagaaagaaagaggccaaacaatcacagcggccagggtgcaggctacaggaggcccagtgcaggaggcgggatgtgttatcaccacaacctcccccaatgctgcccccaccagggctgctttcccaggaatcctgtgaccagcaagggaaatggaaagtccccagccagagtgcaggccgcacagcctcaaccaggctgcacccgccggcctctgggcaagtttcacatgtttagttgtgaaagagaaagttagggcagagagggctgattaggccactcccactggaacagccggcccttatcaaggcccttatcaaactgccagagcctgggcttattctatctaaccagctggcaggcactgagcctgggaagtcactctggtaaaagttaaataggtaaattattactaaaaggatgtcctttcacctatgtgcaaaaataacaagtcctaaaaggacaagtcctctcacctatgtgcaaaaagaaagaaaaagtcattttcagcttacaaaccccacacgcactgggtcccacagggaggctggtgctgcccccgcccagggatgcttaatgtctagaagccagcagaggagaggattctaaagggatcccaccgacccaaaatgtctgcccggaggggaggtcagagggctgagtctggcccaagcctggcagctaaccctggctgaaaatgccccctgagccctccccacccaggcagcctgccggggcccaggcccgggccatcagcctcctcagccccctggctgcccatctcggcccatcttcctgagtagccggcatcccagggccagggtcttgaagccacagcgtctcccaccctggcacacaggacaggtcctcccaaacacacttccctcccctgaccccaaatagcccatagttcctctcagctcccaactcactgtttggccttctccccaaaacaggccctgtcgacttcctttctgaggacgtttagtgacaagcttctccgaagcaggagcatcgtctccccacgtctcctgtcggctccctccagaagctgcagccaaatggaactcaaggaatgagcctgggccccaatactgtgccctttggacttggcctcatccctccaggcgggcattgctgcctccctaagcaacccttccagctggtcccagtccaggtgtgctaggcccaccacccaccccaaatcagtgaggacctaccaggcttccacagcaacacagattcaagccacaaccagatggtcccgcaaagaggaagcacttctcagatagcttagccttatgagtaaataatctcaaagttaaacaactacaaggtgctatttcccatctagtaaattaaaaatcattttaattgacaaaacgagatgtctagaaatgttcatagcagcattattcacaaccacccaaggatggaaacaacccggtgtccaccacggatgggtaggtaaacaaaatacgataaatccatacaatgagatattatctgaccataaaaaatgaagacctacagatccacagtaatgcacggaccagccttgaaaccaccctgggtgaaagaagtcaatcacaaaaggtcacacgccatctgattccatgtatattaaatgtccacaacaggcagatctacagaaacagaaagtcagctggtggggggcaggggctggaggaggggaaatgggagtgactgctaatgcgtgcaggttaattccgggggtgatgaaaatgttctggaattaaatcgtgctggtggctgcacagccttgtgaatccattaaggttcacgcagaattgtacaatcaaaaagggtagactcaatagagttatagctcaggaaagctgttataaactacaaacaaggcagggtggagtagttcacgcctgtaatcccagccccttgggaggccgaggcaggcggatcatctgaggtgaggagttttgacaccagcctggccaacacggtggaaccccaccactagtgaaaagaaagttaaccaggcatggtggtgtgctcctgcaatcccagctaccagggaaggtgaggcaggagaatcacctgaacccaggaggcggaggttgcagtgagccaagatcacgtcactgcgttactgcattccagcctgggcaacagagcgggactctgtaaaaataaataaataaataaactactaacaactggatgccagaagctgtggcccctccctacataagcactggccatgtgggtgacacatggcaggagccctcgaaacgctcttacctttgccacagaaaggcactcccaaaatctaaagaaaaacacacacagcttggcagagatctgcagatgtggcatccatctctaacccaaaacaaagtagaactggctcagtaggctgtgagcatccctaaaaacatgctcgaggttgtgtctggtttctacttttctggggaaaagacccagttttctgcagctttcaaaggcatctggaagctaaaaagtcaagaggtgggctgggcatggtggctcacgcctgtaatcccagcactttgggaggccaaggcgggcggatcacctgaggtcaggagtctgagaccagcctggccaacatggcaaaactctgtctctactaaaactacaaaaattagccgggcatggtggtgggcgcctgtaatgccagctacttgggaggctaaggcaagagaatcgcttgaacccaggaggcagaggttgcagtgggccaagattgtgccattgcactccagcctgtgtgacagagtgaaactccgtctcaaaaaaaaaaaagaaaaaaaaaagtcaagagatggcagcacctcttcccccatccctcccatacctacccaggcagccaagcatatagaaagaaggtaggaaatgagacaggcacctagaactcaaaagcacactgagcccagctcatcagagggcactcggaagagagaattcaaggagaactccgcaacgacatgccctagaatgggaggccacatccctctccccaaccgaaactcactgcctcatgctagaggaagctggtagggtcagaaacttacatccaggctccagaaagatctctcagagctcaatgtgaaaaaaacaaatgacctttggctaggcgcggtcgtgcacgcctgtaatcccagcactttgggaggctgaggtgggcagatggctagagctcaggagctggagactcttctaggcaacatggtgagaccccatctctaccaaaaatccaaaaaaattagccgagcatggtggtgagcactgcgggtggcaagccatccaggtgccgaggcaagagaccaagggcatgagcttttccagtataataaaatatataaaacagtaagaattatactagatctagatcatagacgtgattatatatgaatatcattaatcattaatttgtagcaattactctttattccaatattataataatcctcgctctataatcataacctaggaaaaaccaggctatacagagatgggagctgaggggacatggtgagaagtgaccagaagacaagtgcgagccttctgttatgcccggacagggccaccagagggctccttggtctagcggtaacgccagcgtctgggaagacgcccgttgccaggcagaccgtggttccagcagtagcgtcagtgccaaagaaaaacacccgccacttagcagaccaggaaagggagtctccctttcccccggggagtttagagaagactactcctccacctcttgtggagggcctgacatcagtcaggcctgcccgcagttatccggaggcctgtctccctgtgatgctgtgcttcagtggtcacgctcctagtccactttcatgttccatcctgcacacctggctctgccttttagataacagtagcaaattagtgaaagtactaaaagtccctgatatgcagaaataatggcgtaagctgtctctctctctctccctctctctctgccttggctgccaggcagggaagggccccctgtccagtgcacatgtgacccacgtgaccttacctatcattggagatgattcacactctttacccctccccttttgccttgtatccaataaataacagcacagccaggcattcggggacactaccggtctctgcatcttggtggtagttgtcccccgggcccagctgtcttttatctctttgtcttgtgtctttatttctacaatctctcatctccccacatggggagaaaagccaccgaccctgtgggttttctgtggtcccagctactcagggggtcccagctgcacctgtggtcccagctactcagggggctgaggtggtaggatcacttgagctgggaggtcaaggctgcagtgggccaagattgaattccagcctggatgacagagcgagaccttgtctcaaaaaaggctagatgcagtgactcacacctgtaatcccaccactttgggaggctgaggcaggaggatcacttgagcccaggaattccaggccggcctgggcaacaagacgagactccacctctagaaaaaaagaaaagatattcaacatcattagacattaggaaaatacaaaagtaacatctaaaagcaattatcggcgaggtgtggtggctcacacctgtaatcccagcactttgggaggccaaggcaggtggatcacctgaggtcgggcgttcaagaccagcctgaccaacatggaaaaaccccatctctactaaaaatacaaaattagctgggcgtgatggtgcatgcatgtaatcccagctactcgggaggctgaggcaggagaatcccttgaagccgggaggcagaagttgcagtgagccaagatcatgccattgcactccagccagggtgacagagcaagagactctgtctcaaaaaaaaaaaaaagcccagcatttggcctggcgcagtggctcacgcctgtaatcccagcactttgggaggccgaggtgggcagatcacgaggtcaagaaatcgagactatcctggccaacatggtgaaacctcatccctactaaaaatacaaaaattagttgggcgtggttgcgctcacctgtagtcccagctactcgggaggctgaggcaggagaatcacttgaacccgggaggcggaggttgcagtgagccaagatcacgccactgcactccggcctggggacagagcgagactccatctcaaaaaaaaaaaaaaaaaaaaaaaaaaattagccaggcatggtggtgggagcctgtaatcccaggtactcaggaggctgaggaagcagaatcgcttaaacccgggaggcagaggttgcagtgagctgagatcgccccactgcactccagcctgagcaacaagagtgagactccgtctcaaaaaaaaaaaggaaaggaatgaataactgatacatgcaaccatgtggatgaatctccaagtaatcgtgctgagcaagggaggctggacaaaaagagaactgtgcaagtccatgtttataaacttggaggaaacacaaactatagtgacagaaagcagatcagaggttgcctgggggcagggagggaccagagaagcagagggcctcagcagggtgacaggtctgttcacagtctcggtcttgattgtggtgaaggcttcacaggctcacacaggcatacctcagagatattacgggtttggttccagatcaccgcaacaaagcacacattgcactttataataagtcacatgatttttttggtttcccagtgcacgtaaaagttacactgtagtctattaagtgtataatagcattatgccttaaaaaaaagtatataccttcatttaaaaacactttattgcaatcgggcatggtggctcacacctgtaatcccagcactttgggaggccaaggtgggtggatcacaaggtcaggagatcgagaccatcctggctaacacggtgaaaccccatctctactaaaaaacaaaaaattagcccggcatggtagtgggcgcctgtagtcccagctactcgggaggctgaggcagaagaatggcgtaaacccgggaggcggagcttgcagtgagccgagatcgcaccactgcactccagcctgggcaacagagcaagaccccatctcaaaaaaaaaaaaaaaatttattgctaaaaaatgctaacaatcatctgagccttcagtgagtggtattctttttgctggcagagtcttgcctcgatgttgatggctgcagactgattcatattgttttggggtttattttttttttttgagacagtctcattctatagcccaggctggaatgcagtggcacgatcttggctcactgcaacctctgcctcccgggttcaagtggttctcctacctcagcctcccaagtagctaggattacaggcacgcgtcaccacgcccagctaattttttgtatttttagtagagacagggtctcactatgttggccatgctggtcttgaactcctgacctcaggtgatccgcccacctcagcctcccaaagtgctgggattaccgcccggcctgcagactgattaggatggcgactgctgaaggctgggatggctgtggcagttccttaaaataagacaacaatgacattgaccacatcaattgacccttctttccacaaaatatttctctgggccaggcacggtggctcatgtctgtaatcccagcactttgggaccccgaggtgggagaatcgcttgtgcccaggagttccagaccagcctgggcaatataaggagatgctgtctctaaaaataaaaattaaaaaattagctactcatggtggcacttgcctgtggtcccagttacttgagaggctaagggtgggaggatcccttcagctcaagaggtcaaagctgcagtgagctgtgattgcaccactgcactccagcccgggtgacagagtgggagcctatctcaaataaaaaaaaaaaaaaagatttctctgtagcatgcaatgtttgatagcattttacccacagtagaacttacttttttttttttttgagacagagtctcactctgtcagccaggctggagtacagtggcatgatctcggctcactgcaacctccgtctcccgagttcaagtgattcccctggctcagcctcctgagtagctgggactacaggtgtgcaccaccacaccaggctaattttttgtattttagtagagatggggagaacatgtcagccaagatggtctcgatctcctagaccagcccagtagaactttcaaaagtggagtcaggccgggcgcggtggctcatgcctgtaatcccagcactttgggaggccgaggcaggcggatcacgaggtcaggagatggagaccatgatggctaacatggtgaaaccccttctctactaaaaatataaaaaaattagctgggcatggtggcaggcacctgtagtcccagctactcgggaggctgaggcaagagaattgcgtgaacccagaaggcagagcttgcagtgagctgagatcgcaccactgcactccagcctgggcgacagagcgagactccatttcaaaaaaaaaaaaaaaagtggagtcagtcctcttaaaacctatgttgttttatcaactaagtttatggaatattctaaatccttttgttatgggatctttggggtatcccttttctggccagaaacctctgtgtcttgtggcacctttgcctaagttttgctggggcccactgggcttattccacccactcagcctggcaggctgcgcttggctcatgctaccagcctggagctcccatgcctgccaaggacaagcctggtgtggagcagcgagcagtgtgtgagtgagcatggagtacggccactgcacagtcagacatgccagctgctgctgcagggcaggcagctccagatgctggcacaggtgctggttctctgcaaggctgcacctggaccaagcgcacctcaagcagcttgcctggttggcacacgggaatgctgtggtgcctggaagcttggtgacgccaggaactgcagggccccaaagagggagtcacaaccctgactcagggagctcccaggtctggactccccaaagggccacagctcttctttccttcccttcactggcaacgtggcaagaaggggcatgtttcagccctgtttgtgttacagttctttcagcctcaccatttggcaggtcccgagttcttgccctgtgaccaggaagaatgaggtacgcagaaaaatggagagtgagcaagacaaagaggagctttattgagtcacagccaggtcatcccagtgagtgttcagctctcagcagagagggtagctcttctttgcagctggtcatcctgtcatctttctgtcctctgctctagtctggctgagtccggggtttttatgggcctcagagtggaggaagtgtgtgttgactggtccatgggtgggccagcaaaaagcaccacaagcttcccctctggtcctcgggactggccagccaacccccaggcttcaggccctccccagtttgaaggtgaggcttcactggggaccagaccccttctacccaggagcctgtctgtctctcgccactgttcatggcatccaggctgtttgtgccagcctatcctcagcccccacttggcctccctcccatgcctgttggtgcccaaagtctgaagggcaccatcagcagggtgggtgcggtggctgcaccgcagtccaggtccccaaagtgaatgccgctcccacttcccgccccagggccctgaagcataacccaagctctgcatcccaggcccagcccccacactccatatgcaggtgcagcatcaccccaggcccagctccaccttggggcccctctctgcccgcacctccatgcccaatcatgctgcttccccaccagcaggcaactcagcctggccccgttgtggtggctcccagggcagtgggctctgggagactcccaggggtagactccagggactgactatttcctctgcacacccctccccacagtgagagcgggtaagagctctgacactgagccagggtctggagcggcaaggctccaggcctgggagcaggtcctgcctggctgtgcaaggatgggggcggtgcagtcagctgcccggggaatgcagggcacaggggacccactgctgccactgctgctgccactgctgctcccacagctgctcctgccaccactgcttgcaccaccccactgcacctggcgtgagggcaggggttgctccagatggcccaccattgccattactttcttgtcatttcagcaatgttcatggcatcttccccaagactacattccatcttaagaaaccactttctttttttttcttttttgctctgttgcccaggctggagtgcaatggcacaatcttggctcactgcaacctctccacttcctaggttaaagcaattcttgtgactcagcctcctgagtagctgggattacacacacatgccaccacatctagctacgttttgtattagtagagacgaggtttcaccatgttggccaggctggtctcgaacacctgacctcaggtgatccacccactttgacctcccaaagtgttgggattacaggcgtgagccacctcgcctggtctataaatattcttaatggcttctagaatagtgaatgctttccaatgtaaatttttcaatttacattgcccagatcagaagaaccactatggcagccagagccccacaaaatgcatttctttttttttttttttttttttttgtagagaaggaggctcactctgtcgcccaggctggagtgcaatggcacaatctcagctcactgcaacctccacctcctgggttcaagcaattctcctgcctcagcctcctgagtagctgggactacatgcacatgttgccatgtccagctaatttcttttttttctttttttttggagatggagtctcgctgtatcgcccaggctggagtgcagtggcacgatctcagctcactgcaagctccgccttccaggttcatgccattctcctgcctcagcctcccaagtatcttggactacaggcgcccaccaccacgcccggctaattttttgtattttttgtagagacaggatttcaacatgttgcccaggctagtctcaaactcctgaacaaaggcaatccacctgcctcagcctcccaaagtgttaggattacaggcccaaaatgcatttcttaaacaatacaacttgaaagtcaagattactccttgatccataggttgcagaatggatgttgagttaataggtgctattatccactatggtttggatatgaggatccctaacctcatgttgaaattcaatcccaatgttggaggcaggacctaataggaagtgtttgggtcacaggatggatccctctggaagggcatggtgccatcctcgtggtcatgagtgagttctcactttattagcctctgggagaactaatagttaaaaggagcctggcacctcccttctctctcacttctctggccatgtgacctgcacacaccagcttcccttccccttctgctgtaagtagaagtggcctgagtccctcgccagaagaagatgctggtgccatgcttcctgtacagcttgcagaaccatgagccaaataaagctctttccttcataaattacccagcttcgggcattcctttacagccacacaaatggactaaagccagcaggcacgaaaacaaaattaatctccttgtgcatctccatcagagctcttggtttatcaggtctattgtcaatgagcagtgttagtattattattattattattattattattattattattattattattatttgaaatggagtctcgttctgtcacctggcctggagtgcagtggtgcgatctcagctcactgcagcctccgcctccctggttcaagtgattctcctgcctcagcctcccaagtagctgggattacaggcatgcaccaccatgcccaactaatttttgtatattttttagtagagatggggtttcaccatgttggccaggctggtctcgagctcctgacctcaggtaatccaaccaccttggcctcccacagtgctgggattacaggcatgagtcaccacgcacagccaatgattagtattattttgatttttttttttcttttgagacagagtctcactctattgcccaggctggagtgcagtggtgcgatctcggctcactgcaacctctgccacctgagttcaagtgattctcctacctcagcctcctgagtagctgggattataggcgcctgccactgcgcctggctaatttttatatttttagtagagacagggtttcgccatcttggccaggctggtcttgaactcctgacctcgtgatccacttgcctcagcctcccaaagtgctgggattacaggcgtgagccaccgcacccggcctgatcagtattattttgaaagaaatcttttttctgagcagtaggtctcaacggcaggcttaaaaatattcagaaaactatgctataaacagatgtgctgacatccaggatttgttgttccatttatagaacacaggcagagtaaatttagcataattcataagggccctaggattttcagaatagtaaatgagcattggcttcaacttaaagtcaccagctgtataagcccctaacaagagagtcagcctgtccttttttttttttttgagacagaatctcactctgtcacccaggctggagtgctgtggcaggtgcaatcttggctcactgcaacctctacttcctgggctcaagcgattctcctgcctcagcctcctgagtagctgggactacaggcaagtgccaccacactcagctaatttttgtatttttagtagagacagggttttgccatgttggccaggctggtctcaaactcctgacctcaagtgatccacccgcctcagcctcccaaagtgctgggattacagcgtgagtcaccagacctagcctgtccttggaagccaggcattgacttttcctccctagctatgaaagtcctagatgttatcttctttcaacagaaagctgtttcacccacactgaaaacctaggcagggcataggggctcacgcctgtaatctcagcattttgggaggctgagacaggcagatcatttgaggtcaggagttcgagaccagcctggccaacatagtgaaatcctgtctcttctaaaaataaaaaaattagccaggtgtggtaacgtgcacctgtagacccagctactcgggaggctgtggcagaagaatctcttgaacctgagaggtggaggttgcagtgagccgagattgcaccactgcactccaccctgggcgacagagcaaaactctgtgtcaaaaaaaaaaaaaagaaaaaacctattgtgtagccaccctcaccggtgatctcagccagattcggataacctgctgcagcttctccagcagcacctgctgctctaccttgtactttcatgttatggaggtggcttctttccttcaacctcatgaaccaacctctgttagcttcacgcttttcctctgcagcttcctcacctctctcagccttcatagaattgaagagagttacggccttgctctggattaggctttggcttaagggaatgttgtggctgatttcatcttctctccaaatcactaaaattcttcttctccgttatcagcaagaaggctgttttgctttcttatcattcatgtgttcactggagcagcacttgtaatttccttcgaaggacttttcctttgcattcacaacttggctaactgtttggcacacgaggcctagctttcagcctatctcagctttcaacatgccttcctaagtttaatcatgtctaacttttggcttttttttttttttttttgagagtctcgctctgtcgcccaggttggagtgcagtggcacgatcttgactcactgcaacctccacctctgggttcaagaggttcttctgcctcatcctctgagtagctgagactacaggcgtatgtcaacacacctggctagttttttgtatttttagtagagatggcgtttcactatgttggccaggctggtctcgaactcctggcctcaagtgatccaaccgcctcagcctcccaaagtgctggaattataggcatgtgccaccgtgcctggcctccggcttttggcttaaagtgagagatgtgtgactctctccttcactggaacactagaggtagggtattaattggtctaatttcaaaattgttgtgtctcagggaatgagggagctcacgaaaagggagagagatggggaaatagccggtcagtggggcagtcagaacacatacaacatttatcaatttcatttgctgtcttacatggacgtggttcgtgatgtctcaaaacaattacactagtaacaccaaaaattactggtcatagatcaccataacaaaaatgataacgaaaaagtttgaaatattgcaagaattaccaaaatatgatatagacacactacatgagcacaggctggccgaaaaatggtgccaatagacttgctcaatgcagggttgccacaaacttttttttttttgagaaggagtctcgctctgttgcccaggctagagtgtagtggcatgatcccagctcactgcaacctctgcctcccaggttcaagtgattctcctgcctcagcttcccatgtagctgtgactacggcacatgccaccacacccagctaattttttatatttttagtagagatggggtttcgccatgttggccaggctggtctcgaactcctgacctcaggtgatccgcctgcctcggcctcccaaagtgctgagattacaggcctgagccaccacgcctgccccaaactttcaatttgtaaagaaggcaggacctggctgggagcagtggctcacgcctataatcccagcactttgagaggccaaggtgggtggatcacctgaggccaggagtttgagaccagcctgaccaacatggtgaaaccccgtctctactaaaaatacaaaaattagctgggcacagtggcaggcgcctgtaatcccagcccttcaggaggctgaggcaggagaatcgcttgaatccaggagggagaggttgcagtgagccgagatcgtgccattgcactccagcctgggcaacaaaagctaaactccatcttaaaaaaaaaaaaaaaaatgcaggacctgcaaagtgcaatgaaaggaagtctgtctgtacctaggtcaaaactgatcaaactgaatactttccatatgtgcagttatagaaattattcctgtataactctgtttaaataagtatctctttcacctcccacctctgccttttagagaattaaatatccatggcaaatgcattgggcttgtttctacttgaggcacttactctgggcaagtttcctggaattctgccaatttctgcaagggaaggtggcagcaggtgcgatgaagtcacctgaggacagaggcctggtccccatgctggcagctgcgcccacgtccctcagcccaaacagaggcgggagggaggtggccaaatggccctgggagctccagttagggagtcactaagactaagagccctgcccagccaggcactggttaaagccctcccacaggcccatggggactgaaggcatgtccctcagtgggcagaccagcaggccctaagtacttccagagtatggggccagtgggtcagtacggccaccctgagtctcactctccaaatgtcaaggaggatgccctgaacacacaggcttggggcctgtggggagaagctgagctccacagcgtgggggccaaggactctgccttgcccaacatcctggagatcaagcaccacaacctgccacgcaccacctgcaggccacatggtggatgaggggcaggtggaaatggccaaggaggtgaggtctgcactctactggggtccctgccccacctgccacacacccctaggtcactgcgcctggagggcctcagtgtcttcacctgtaaatggagggtaaactgccaagctgagagttctccgtggctgggacaccctacactattccacagactccccgtctaacctaggacaaaccccggcatcagtgagcccctaggtctcggccagttgaagggaacaaccacgtcaagagtcagaggagaaaaaccaagtttggcatctgctgaaaacgatggcttcccctgttcatcctgatcagttacatggctgaagttcccactttattgatttaaagatttcagctctgagaaagacactgttaagataatggagacaggccgggcgcggtggctcacacctgtaatcccagcactttgggaggccgaggcgggcggatcacaagatcaggagatagagaccatcctggctaacactgtgaagccccgtctctactaaaaatacaaaaaattagccgggcgtggtggcgggcgcctgtaggaggctgaggcaggagaatggcgggaacccaggaggcggagcttgcagtgagccaagatcgcgccactgcactccagcctgggcgacagagcgagactcctctcaaaaaaaaaaaaaaaaagataatggagacaagccacagactgaggaaaatgtttacaaaacatatatccgataaacaacttgtatctaaaatatacaaagaaatcttaaaactcaacaataagaggccaggcgcggtgactcatgcctataatcccagcactttgggaggtagacgcgggcggatcacttgaggccaggagttagagaccagtctggccaacgtagagaaaccccaaaaattagctgggtgtggtggcacatgcctgcaatccctgcttggagattaattccagccctttgggaggctaagccagaaggatcgcttgaacccaggagttcaagatcagcttgggcaacatagggagaccctgtctctacaaaaaaactttttaggccgggcgcagtggctcacgcctgtaatcccagcactttgggaggccaaggcgggtggatcacgaggtcaggagatcaagaccatcctggttaacacggtgaaaccccgtctctactaaaaatacaaaaaaaattagccgggcgtggtggcgggcacctgtagtcccagctgctcgggaggccgagacagaagaatggcatgaacccgggaggtggagcttgcagtgagccgagattgtgccactgcactccagcatgggcaacagagcgagactccacctcaaaaaaaaaaaaaaaatttttttaaattagccaggtgctgggcgcagtggctcacgcctgtaatcccagcattttgggaggccaaggcaggcggatcacttgagttcagaagttcgagaccagcctggccaacatggtgaaaccctgtctctattaaaagtacaaaaattagccatgcgtggtggcaggcgcctttaatcccaggtactcaggaggctgaggcaggagaatcacttgaacctgggagtcaggaggttgcagtgagctgagatggcgccagtgcactccagcctgaggaaaaacagcaagaaacttggtctaaaacaaaaacaaaccaacaaaaaaattagccaggcacagtagggtgcacctgtagtcaaggctactagggaggctgaggtaggaagatcacctgagcccaggaggttgaagctacagtgagccgtgattgtaccaccgctttccagcctcggtgacagagcaagactctttaaaaataaggtgggaggggccaggcgcggtggctcatgcatgtaatcccagcactttgggaggctgaggcgggtggatcacgaggtcaggagatcgagaccagcctagccaacatggcaaaatcccatctctacaaaaaatacaaaaattagcatggcgtggtgccatgtgcctataatcccagctacttgggaggctgaggcaggagaatagcttgaacctgggaggcggaggttgcagtgagccgagatggcactattgcactccagcctgggcaacaagagtaaaactccatcccaaaaaaaaaaaaaaaaaaattagctgggcgtggtggtgggcacctgtagtcccagctactcgggaggctgaggcaggagaatggcgtgaacctgggaggcagagcgaacatggcgacagagtgagactctgtctaaaaaataaaaaataaaaataaataataataaggtgggagggtggcggcagagggccaaagacccgaacagatgcctgatataagaggatatacagacagcaaatacgcacatgaaaagatgctcaacaccttatgtcatttggaaactgcaaattaaaacaacactgagacaccactacatgcctgtcagaatggcctaaacccaaagtactgacaacatcaaatgctggtgaggatgtggagcacaggagccctcattcactgttggtgagaatgcaaaatggcacagccactttggaagacagtttggcagttttgtacaaagctaaatgtactcttcaattaaatcaatcctatattccattaaagacattaaaaaaatacatgtaaaggccaagtgtggtagctcacgcttataatcctagcactttgggaggctgaggcgggaagatcacttgagcccaagagttcgagaccagcctggacaacatagcgagactccatctctatttaaataataaaaaaatacattatgtaaaaacttagtaggtacatggaagcaattaaatgcaaaatcaagtaaaaattcaagctggatatgggtgaattaagaatcttagtagaatcttaataggtgtcagataacatgggtcaattcagcaacttcaggctggtttatgagtgtcaccacttctaagagcctggcttttataaggtacaagacaaggtgagatttgcctgtcattaaaggaagcacagagtatcaatcatgcaggatgtagtttcctgagacaccaaagtgtagtatcaaaagcaattccattgtaaaagctgagttctaaatacaagcgacacctgagtgaacacagcaacaaaacagcaaagaaacacacaaacatcaaagtttggcacttactgtaaacaatggccaggtgcggtggctcacgcctgtaatcccagcactttggtaagcctaggcggacggatcacaaggtcaggagatcaagacaatcctggctaaaatggtgaaaccccgtctctactaaaaatacaaaaaattagccaggtgtggtggcaggcgcctgtagtcccagctactcgggaggctgaggcaggtgaatggcgtgaacctgggaggtggagcttgcagtgagcccagatcgcaccactgcactccagcctgggcgacagagcaagactcgtcaaaacaaacaaacaaacaaacaaacaaacaacggcaccagttacaaggccaaagcatccactcgctacaatgccaccactgttcaaattaattccaccagagcagccctgggtgcccgagaggtagtggctcaaggtaagactggaactggtggcctggagattgtcgggaggggagggagggaggggcagtgtctatgatcagcatgccctctgctggtggccggggtgctcctcgatagcgccagactgcggcagatggtccagtcccccagtgatacattttacagcaaagcacacagaccacgggccttcccaggtcccagccaacaagtcccatgggggcaggtaccgttgggccttctcccagtcccgggctcatgggcacacagccagcaagaggaatgctctggccctcctgaatcagggacttggtttcctttactctcccaaggctcagagaagctcccagcctcacacagctcagctgccagcccctgacctgccatagctgaacctccagccctgaggccaaaggattcaaggcagggcacagagacatctgagctgtctggcatggccctggtaaggtctcctgtggggacctacccccagggaggcccagacagcgagagcctatcatgtgccatgggacaggcaaaagccacagatgaacatttagggggaggaggagggaaggaggacagaaaggctggcgagggcaggggctggtgttcagcaaggggagggaaacagatgtggacaggtgcacggcgtggcctgcccctgagaagtaatgtccctagagtcctagttttattattgctcaaggacttttttttttctttgagacggagtcttgctctgttgcccaggctggagtgcagtggcgcaatctcggctcactgcaagctccgcctcccgggttcacaccattctcctgcctcagcctcccaagtagctgggactacaggcgcccgccatcacgcctggctaatattttgtatttttagtagagaggggtttcaccgtgttagccaggatggtcccgatctcctgacttcatgatccgcccacctcggtctcccaaagagctgggattacaggcgtgagccactgcgctcagcctgctcaagggctttctgtttctgtcctccaggtcagagataaatgaccctcaggtataagagttcaaagaaaggatgcagcggctgtctttggcctccacttgccagctgtgacggcaagcaagtagctccacctctaatgcctgctccccagcctataaagaggtgtgtccacacgtgcaaatggagctggacccctaccgcacatcacacataacaattaactcaagataggtcaaacacctaaatggtaagagctaaagctatgtaactttttttttttgagacagggtctcactccgtcacccaggccccagtgcagtgctgtggtctctaactcacttcactgcagccttgacttcccaggctcaagcaatcctctcacctcagcctcccaagtagctggtactacaggcatgcaccaccacacctggctaacttttttaatttgtagagatggggtcttcctatgttgctcaggctggtcttgaactcctgagctcaagcagtcttcccacttcgacctcccaaagtgctgggattacagatgtgagccacagcatctatcctataaaactctttaaagaaaataggccaggtgtggtggcctataatcccagcaatttgagagactgaggtgggcatatcacttgaggtcaggagttcaagactagcctggccaacgtgttgaaactctgtctctgctggaaaaaaaatacaaaaattagccaggtgtggtggtgcacacctgtagtcctagctccttgggaagttgaggcaggggaatcacttgaacccaggaggcggaggttgcagtgaactgagatcatgccactgcactctagcctgggcatcacagcaaagaaaaagtaaaaagacaacccagtgagtggaaaaaaatatttgcaaatcacatcggaaatagccaaacaatcatgaaaaagaacaaagctggaagattcacactttctgatttcaaaacttaccacaaagctacaataatcaaaacagtatggcattagcataaagacagatataagaatcaatagaacagagagcccagaaataaactcaaatgatatatatggtcaaatgatctatgtgacaagggtataaacacctttcggccgggtgtggtggctcgcccctgtaatcccagcatgttgggaggctgaggtgggaggatcacgaggtcaggagttcaagaccagcctgaccgacatggtgaaaccccccgtctctactaaaaatacaaaaattagccaggcatggtggcatgtgcctgtaatcccagctactcaggaggctgaggcttgaacccaggaggcgaaggttgtaatgagctgagatcacgccactgcactccagcctgggcaacagagcaagaccgtctcaaaaaaaaaaaaaaaacaagaagacgacctctcaatggggaaagacaatcttttcaacaaatggtgctaaggaactggatatttacacacaaaagaatgagttgcacctttacctaatagcatatacaaaaaaaaaaaaaaactcaaaatggatcataagccgaaaagtaaaacctaaaactataaaactcttagaagaaaacataaggctaaagctttacaacattggatttggtgatgatttcttggctatgacatcaaaggcacaaggaacaaaagaaaacagacaaattgtatgtcataagaactttaaaatgtgtgcatcaacagacaatatcaacagagtataaacacatcccacagaatgggagaaattatttgcaaatcatatatctgatgagggattagtgtccagaatatatagagaactcctaaaacgcaacaataaaaaaaccaaccatacacattgcattcatgtatcaaaataccacactatacccataaatatgtacaattattatgtgtcaaaaacaatagaagcaaaaatggacacggactttctcaaacaccaaaagctatagtcttcagtttcagaatactgatgaaaatttgaaaaatatatacatggatacttatatagatacacaaggatatgtatataacatgcacataatatatacacctatacatgtctatgttcaagtatatgaataaatatacaaacagtttagcaatatatttaattttcagttttaaaaaaaacctgattcaaaaatcagcaaacaacttgagtagacatttctacaaagaaaaaatacagttgacaaataaacacatgaaaagacattcaacatcactaaacattagggaaatgcaaagcaaaaccacaatgaaacaccacttcacacccattaggatggcaactatcaaaaaaaaacagaaaataacaagtattgacaaggatgcccagaaaccagaacccatgtacactgtcggtggaaatgtaaaatggcatagccgctgtggaaaacagtatggtcgtttctttaaagatttaaaatagaattgccatatgatccagcaattccacttctgggaatatatcctaaagaactaaaaacggggtctctgctgtgttcatagcagcattattcacaagctaaaatgtgggattaacccaagtgtccatccacagatgatggaataagcaaaatgtggtccatccatgaaatggaacatgattcagtctttaaaaggaagggaatgagccgggcgcggtggctcacgcctgtaatcccagcactttgggaggccgaggcaggtggatcatgaggtcaggagatcgagaccatcctggctaacacggtgaaaccccatctctactaaaaatacaaaaaaaaaattagctgggcgtgatggtgggcgcctgtagtcccagctactcaggaggctgaggcaggagaatggcatgaacccgggaggcggagcttgcagtgagccaagattgcgccactgcactccagcctgggcgaaagtgcaagacttggccgggcgcggtggctcacgcgtgtaatcccaacactttgggaggccgaggcaggcggatcacgaggtcaagaccattctagccaacatggggaaaccccgtctctactaaaaatacaaaaattagctgggcgtggtggcgggcacctgtagtcccagctacgcggggggctgaggcagaagaatcgcttgaatccgggaggcggagcttgcagtgagccgagattgtgccaccgcactccagcctgggcgacagagcgagactctgtctcaaaaacaaaaaacaaaacaaaaaaactgagctggacatttaaaaatgattaaaatgagcctgggaaacatagtgagacgtagtgggtgacagagcaagaaaatatggctacaaatacgtatatggtagccaggcgctgtgactcacacctgtaatcccagcactttaggaggcagacggagatgggcagatcccttgagctcaggagtttgggaccagcctggccaacatggcgaaatcctgtctctacaaaaactacaaaaattacccaggtatggtagcacatgcctgtggtcccagctactcgggtggctgaggcaggaggatcacttgaggtagaggctcagtgaccgagactgcaccaccacatgcgccccagaagacagagtaacaccctgtctcaatttaaaaaacaaaacaaaacctgccatcttaaccatatacatatacacatatcattaagatggcagtttttttgttttttttttgtttttggacagagtttcgctcttgtcacccaggttggagtgcaatgtcacgatcttggatcactgcaacctccgcctcccaggttcaagtgattctcctgcctcagtttcccaagtagctgggactacaggcgtgggctaccacgcccagctatttttcgtatttgtagtagagacggggtttcaccatgttggccaggctggtctccaactcctgacctcaggtgatccacccagcttggcctcccaaagtggtgggaatacaggtgtgagccaccatgcccggctaagatggcagattttttttttttttttgagacggagtcttgctctgttgcccaggctggagtgtagtggcgcaatctcagctcactgcaagctccgcctcccgggttcatgccattctcctgcctcagcctcccaagtagctgagactacaggcgcccaccatgacgcctggctaattttttgtatttttagtagagacggggtttcaccttgttagccaggatggtctcgatctcctgacctcgtgatccatccgcctcagcctcccaaagttctgggattacaggcgtgagtcaccgcgcccggcctgatggcagatttttttaacggtaaattatatattatgtgtattttaacacagtttttttttttttgagagacaagagtcttgatctgttgtccaggctggattgcagtggtgcaataagctcactacagcctcaacttcctgggttcaagcaatcttcctgcctcaatctcctgagtggttgagactacaggcacaccccacctaccctgcatctggctaatttttttttcttttgagacggagtcttgctccgtggcccaggctggagtgcagtggcacgatcttggctcactgtaagctccgcctcccgggttcaagccattctcctgcctcagcatcccaagtagctgggactacaggcgcccgccaccacactcggctaattttttgtatttttggtaaagatggggtttccctgtgttagctagaatggtctcgatcccctgacctcgtgatccgcccgcctcggcctcccaaagtgctgggattacaggtgtgagccaccacgcccagccaacatctggctaattttttaatctttaatagagatcagatcttgctatgttgcccaggctgacaacttttttgaattggaaaattttcttaattaaaaaattttatctgagaagggacttgcatctagaatatataaagagctctcatcactcaacaacaaaaagacaattacaccaattggaaaatacaggaaagacctgactagacagctctctaaaaatacacagtggtcaataagcacatgagaagatgctcagtatcatcttctctcattagggaaatgtagatcaaagccacagtgagataccactgcacatctactagcatggctagaattcaaaagatggataataacaagtgctgacaaggatatggggaaattgaatcctttttacactgctggtgggaatgtgaaatggtgcagccactttggaaacagtctggtaattcctcaagagaataaccacaaaattaccatatgacccaaaaattatattcctaggcgagctgtttttactcatgcttttaataacaaacatgggtgtctctttcaaccccacttctccaactctccgacactaggtgggtgtcctacaattcaagtaaagtctggcactaccttctgcggtataggaaggtaaggttgaaagcgctaacccgctaatcctcccttggcctttctggagaccagctcccatcctgaagctatatctagggcccccagccaccagttctctcattagcatactagacactcttaggactacaaaggtcccaagggcttggggagctccatgtcaggagaacaaaaaatcctcctaccacccctttcaaaattgatggaggtcatgatcccacagctctgtgaacataaaactgaaatctactagcttgtacacattagtgaatgaattgtatggcatgtgaactataacccaataaagctggcacaaagggggaggtatgtatgcccactcaacagagtttctgtaaagtttaggagaaataaagtatgcaaaagccatctgtaagcagctcaacactgcactgttaggatcagccaatcgtgcaggaacagctccctctggccctgcaccaaccttctggtctaaaatcacagctcaacatccagcctagggacaaagcagggcacggatgccagctgccagctgtgagccagcacagctgctggcttgcaggagccttgatctgcagaggcccagattcccacagcccagggttgccaggtcacctcctccaacaaagcccgggtgttccgctcgtccctaggggaagaacatgccaggtctccactgagggtggccacttaagtgggcactttcaatccagcaaaacacacagctcatccaacacccgaccctactaccctccccaaaactcctccaagttatgcggcccaaggccctggctgcccagtcggcgtcgcaagtgagacaccatgggcacaaaatattcccagtcatcctaccttccagtaatgcaggctccacagggtgggagatcagccctgggcccaaccacctggacgggagcgcagcaccctcgccggggccccacacatccctggccagccaccagcctcctggaagatgcctgcctcccaaactcacagagccggagagccctggcaagcagcttcatcctgcggtaagtgggcaaactgtttacccagtgacaagtatgatgcccagcagagcccaagcctgtgtctgcctggccggctcagcagtgagccggtgtgatccctccctgatagaaagcaccaggctcctgctcctcctaggaccgcccctcccccaccagcccccggcaagccgcctcctcggcttccggaactggatcacaggatgttctctacaaaagaccagtgatgcaaggaatccatgactcggcctgaactcacagacagggaaacaggacagggccaccacccctctgcgggagaggatgaactgggtggggccacaagcaacactcataagggttcccacctccaggaccttaaacctcgcaccactcaggctggccctcaggcaagtagaagaatgagttccacctgggcggagttccacctgggcagagaggtcttggctcacaggcaccgggagagctggaaggctgcggggaagccgaggaaggccaacacaccgcacaacacggcaggtgcctggccctcctctgacagtggccctcaagctccaggagggccgaggaaaatgcagattcctgggcctacccctccctgaccttccccgcccctggagttagaggcagtagctctggggtggaggctcaggagcctggttttctttttattcttcattgtggtaaacatcaaatgcttacaagagtagagggaggagggagtgaacccctatgtccccatcaagcagccccaaaacagtcagctcagggcacctctggtctctgctcccacctgctccccatgccaggttattctgcagcaaatcccggatttcccagtacgacatcgtaaatatgtctgcatttcctctcaaagataaaagctccttgtgaaaaacctaaaggaggggtatggtgactcatgcccacaattccagcactttgggaggccgaggtgggaagatcacttgagcccaggagttcaagacctgcctcggcaacaaagtgagatcatgtctctacaaaaaatctttttaacattagccaggcacagaggcgtgcactcgtagtcccagctactcgagaggctgaggtgggagaatcccttgagcccagaaggttggggctgcagagaaccatgattgcaccactgcaccacttagttgcctggccaactaagcgagaccctgtctcaaataaaaataaaaaccacaaaacaaagatctcatctaaaatatcatccaaattcctaatatcattaaatagcaagtgacttcacgtttctgtcctaaatgaattgaaatctgcatttgtgaacttcattcacaagatcccaagtctctgtggcctggtgaagagaaactgcagtgtgcagggaacagggtaatacagggctacggggacacaggagcgaggcccagcactgagctcgatccggttccatcgacacgaaattctagaagaggcacagcgagtgagtgaaagcagatctttttgccaggggccaacagtaggggaattttgggagtttggaaatattcgacatcacaactgggcccgccactactcagtgtgcacactcatcaaaactcagcaaactgtacgtttcaaatattcttgtgtatgcattctaaatctatctcaataaagctggtttaaaaaagcaaactacaaaacaattatcctaccttaaaaaaaaaagcagtgattccttaaaatcattatcaagggactattcaagtttccccattatctcctcaatcttcatcttgttgactctctgctgaagtactgttcacatgcagaaaacccatatttgtaacagacttccccagttattcccatgcaggggtccaaggatggggaggcacatccttgatccccctccccaggagggctctgagagtgagaggccaaggggtgggatggcaagacagcctatggggtcaccccctggtgcaggctacacaggccaggtgggtcacacaggagaaagccacttctggtctgaccagaactggggagccagctagctgcaggtgccaattccagggcaatgccaggctaagtggcccacttacagcgtgaggttggacagtgggtagacaaaggcctccccacgcacaggctctctgggttacaaagactgcatcttcacccagggtccacacatcccagcagcaagagagccagcactgtaaatcattttgcggaatgctccagaatacaagctctgagtgtggcttctgtaaatcaggttctttgtttttttttttttctttttttttgagacggagttttgctcttgttgctcaggctggagtgcaatggcacaatctcggctcactgcaacctccgcctcccaggttcaagcgattctcctgcctcagcttcccaagtaactgggattacaggcacccgccactacgcccagctaacttttttttctttttttttgagaccaagtctcactctgtcgcccaggctggagtgcagtggcgggatctcagctcactgcaagctccgcctcccgggttcatgccactctcctgcctgcagcctccccagcagctgggactacaggcgcacaccgccacgcccgcctaattttttgtatttttagtagagatggggtttcactgtgttagccagaatggtctccatctcctgacctcgtgatccgcccacctgggcctcccaaagtgctgggattacaggcgtgagccacagcgcctggccaggttctttcttttcattaattccattataaaaccaaagacagagcccggcctggtgcagtggctcacacctgtaattccagcactttgggaggccgaggcgggcagatcacttaaggtcaggagttcgagaccagcctggcaaacacagtgaaaccccgtctctactaaaaatacaaaaattagccgagtgtggtggtgggtgcctgtagtcccagctactcgggaagctgaggagaggagaattgcttgaactggggaggcagaggctgcagtgagccaagatcctgtcactgcactccagcctgggtgacagagtgagactctcttaaaaaaaaaaaaaaaaaaaggccgggtgcggtggctcacgcccgtaatcccagcactttgggaggccaaggtgggaggaccacagggtcaggagatcgagaccatcctggctaacacagtgaaaccccatctctaataaaaatacaaaaaaaaattagccgggtgtggtggcggatgcctgtagtcccagctactcaggaggctgaggcaggagaatggcgtgaacccgggaggcggagcttgcagtgagccgagatcgcgccactgcactccagcctgggcaacagagtgagactccgtctcaagaaaaaaaaaaaaaaaagacaaaggtagagcccctctttgtcttttcccttgggggaaataattctaaccccataacatactgaaactcatagccactcagctgctgtttattgacctgtcaactagacctcagacactattctaggcattcatggtaccacatggtacaacacaattcctgatctcaggaaacttcctggtagatctgcatctaagagcatggcaagcaaagaaaacacaaaaaaaccttgtagatttcacacatctacctataaataaagcatgccaagttatctgcctgctgggtggtgtccatgccaaggtccccctccatcagcatggttattccagagctggctacagtccccagaaagccttggagcttcctttaggaacaccctgccccccacagacctactagtaaattgatgtttaaatttctctacatattgcactccccaaaagatagccaccagccacaggtggctacccacctgaatttaaattgatgcaattaaaaattctgttcccttcgtgaccagcctgaccaacatggtgaaactccatctctactaaaaaaatacaaaaaaattagctgggcgtggtggcgggcgtgtgtaatcccaactactcaggaggctgaggcaggagaatcagtagaacctcgaaggcagaggttgcagtgagccgagatggcatctagcctgggggacagggcaagactccctctcaaaaaaaaaaaaaaaagaaagaaaaaaaagcccctatcccttcaacaatgtctgaactgagaacatgtgaccattgtgtctaagatggtgggaatttggacgttctcacccctgctagactgtgaccccttaaggcaggggccacattttccacacgtttccctcctggtgctatgcttcttggcagtgtccagtaaagcattgttaaattcatgggcttggctgtgctaggccaggaggctcctctttcaacttggggtgtcagctcagatgtccttaaagggctccccatcctagtacagtcactctccagtgtcctgcggtttctctgagtcaagccgatggaaccacagccttctcttcacaggcctacccctaccaccactcccgcctactcctttggcagtcacgctctgcacctgaggctcacctgctcactcatgagcaggggcagccaagcatcctcctcaccagtcgtctggccaaggcagccacttagaaacaatatgcaattggccaggcacggtggctcatgcctgtaattctcagcactttgggaggccgaggcgggcagatcatctaaggtcaggagttcgagactagcctggccaacatggtgaaaccccatctctactaaaaatacaaaaattagctgggcacggtggtgcacgcctgtagtcccagctactcgggaggctgagacaggagaatcacttgaacaaaggaggcagaggttgcagttagccgagagtgtgtcaccgcactccagcctgggtgacagagtgagactccatctccaaaaaataaagaaacaatatgcaattgtgaacctgagatagcagacttggtttacagtgggtaagaaaaagcacacacacgggccaggcgcagtggctcacgcctgtaatcccagcactttgggaggccgaggcgggcagatcacctgaggtcaggagttcaagaccagcctggccaacatggtgaaaccccgtctctactaaaaatacaaaaattagccagacatgatggcgggtacctataatcccagcaactcaggaggctgaggtggaagaatcgcttgaacccaggaggcagaggttgcagtgagctgagatcgtgccattgcattccagtctgggtgacagagcgagactgtctcaaaaacaaacaaacaaacaaacaaaaagcacacacttactgtatggaagtgtctaaagctatacaaaaatctagtaactaggctaggagcagtggctcacgcctgtaatcccagcactttgagaggctgaggcgggaggatcacctgaggtcaggagttcaagaccagcctggccaacatgatgaaaccccatctctactaaaaatacaaaaattagctgggcgtggtggcgcacgcctgtagtcccagctactcaggaggctgaggcacaagaactttttccagctgggtgcggtggttcacacctgtaatcccagcactttgggaggccgaggagggcagatcacagatcacctgaggtcaggagttcgagaccagcctggccaacatggagaaaccccatctctactaaaaacacaaaaattagccaggcgtggtggcgcactcttgtagtcccagctactcgggaggctgaggcccaagaatcacttgagcccaggaggcaggggttgcagtgagctgagatcgggccactgcactccagcccgggtgacagagtgagactctgtctcaaaaaacaaaaaatctagtaactgttagaagctgggtgaaaaaagacaacatgtataaattggctattcaccaccctgaagaagtaaataaaaggccagccttccacgggaagatttaaatcaaggtttcctttattcaggagaggggtgggaagaatactggatctggagtcagaagacttgggcaggggctgtccctggatctcctggagcaggatgaccttacacagttactcaactcccaaaactgccatttcctcctccacacaggtaagggtggcactaccgaccatcaacctcccagggaattgggcaaaccaagtgggatgagacaggtataagctctttgcaaaccatggagcccaagtttcccagccaatactcagcagagctgattcaggaacctgatgcaggctgtctgtctccagttatttccttttttttttttgccccgctttccccacctccagagtcgatgggaccagaacagccacagagccaaagtcaaaggggcagggctcccccaaagacgttccccctctggaaaagtcaaaaccgaccttgaggtaaggagaggccctcgaccaggccagaagatgagactgagagtcaagaatcgccatagacccaggacttgctatatgcccagccttcctggagatgtcaacatctacaggaaagtaacttgcttctattggacttggcttgagcccaaggtcagtctgtgatgcccaacccccaaatgtgaggaacccactaccaaaacagaaagcagctctcactcctggtagttcatcaagcaggataggaccggtcgcaggccacagagcctgtgtgcagtggctgaaaacctagactccttgtcctcacttagctcatgcacaaatgccagcctgctgcttccgattctgccgaagagaactgcagagtaaccttcaggctgccctccccacctcctatgggaaatgagcttgttcatgatctccagcctccagcttcctctgggggcctgcatctatctactcagtacctggtggaagaagagggggtgctctagaaggacaaccctttgcctctattgtgtaagatgctttcaggcccaacagaccactgattcccttttcttcatagtaaactgttagaggtagacagtattatctgttcttcctttcaacacctgccctcccccaaaccgaagcagtgcactgaagacggtagctctgcaacctcctcccacaggggcacccaccgaggggctcgcgcggctctgggcacctcccctccacctctgggggctttggttagcgcagcacaaccgccgaggtaatgatcccgaatcctcgaggaggctaagcaggaccacggggctgaggctccgggatgctcgggcgaggcccgaggcggggcggcccacgggcgccggtcgccgggctctggagctgtgcattgacctccgcccgccccgtccctgcctggctttctcgcccaaacggcccgtggcgcggccgccgccctggagatgcggccaggaggagccggctggaggcgggcgggggccgcccggcttgtgcggcatcgcgagtcgcatcccggccgggcgggcgtccggggcggcggcgcggaaggccgtgcggggaatcggcgggcgggggcggcctcggcgggtggggaccacagagccaagcggggcaggcctggggcggtgaccggcgcgcctggccgctgcaggctgcgcgcgggccctctcttaccggcagatctggatggcggacggcgtctcgacgtctgggcccgacatgctgggggctgcggcggcggatgcggcgggcggctgcagaagggcgcaggtgtctggcaggcccggcgcggaatgaatgagcccgggccgcgccataaagggggagggcagaggtggagcgatggggctggtgaggcggggcctgcgcgccgggggcaatcgaacgcggcctccccgcgccgaccccgcccccgcgccggccccaccccgagccccgcctcccaggccgccaaggctgcagagagctcgcgcgggcgtacgattctggcggcgtgggggcccaggcagccgccgcttccagaaggttcggtggcggttgggccgcgccggtgcggggaaggcccgctagccgcggcagccgcgcccgacccggtggcagccccgagggaagcgtctggggcggcctaagtggcggagcagggcggacttgggccctcactctccgcgcggcggtaaatatttgtgctgggcgttcccggccgcccgcgccgccgattcgctgccgcgcccagtgcctgggcggccggatgaggtcagagcggaaggcgcggcccgggctcctggcagtggggcctgattcccacccccgcccccaacccaccccggcaccagtcgcccgcatcgcggctctcgctaagatcggccctaagagagaatggaaggctgtttcctagaaaggagcattggtggcggctgctgggaagacacggggaatggaacgggcctttgcttccgcagcacaaagcgtcacgaggtggggaggaggaaaggccggcgactatctacaccgccgcctgcagcttttactgggagcgctgagcgccagcctggaggtgcacgtgttgcagtgaggagccctgaaacatgcgtgttttactgcacaagatgtgcccttgaatggagtctaggccagtcggggtcaccaaaaaaaatccaccaaaaaacacccaagaagggagaagcggtcaccccccacgtgctggaatgacagctttttacttgctaggcagttggaccttttccgaattttctacaatgcacatagatttgtacttacatctttaaattaaaacccacgcaactccggctccctagtgcaatttgaacaacccatttacactcagctaggtagctctgaaggaactgtgcctcaccccggtcacccttgagttaccagaccgtggaggcagcccacagcatgatctgtagctcccagaagcaggggcagtcaaagtcagaactctgtgatttcaagacttttatactaagaattttgtttttctgttttctttttttttttttttttttgagacggagtcttgctctgttgcccaggctggagtgcagtggtgcaatctcagctcactgcaagctccgcctcccaggttcacgccattctcctgcctcagcctcccaagtagctgggactacaggcgcctgccaccacgcccggctaattttttgtatttttagtagagacggggtttcactgtgttagccaggatggtcttgatctcctgaccttgtgatctgcccgcctctgcctcccaaagtggtgggattacaggcgtgagccaccacgcctggcctgttttctttttttgatatagagtctcgttctgtcgcccaggctggaatgcagtggtgtgatagctcactgtaacctctgccatccagtttcaagcaattctcctgcctcaaccacactgagtagctgggaccataggcatgcaccaccacgtttggcttatttttgtatttttagtacagatgtgtccagaattggtgggttcttggtctcaccgacttcaagaatgaagccgcggaccctcgtggtgagtgttacagctcttaaggtggcgcatctggagtttcttccttctggtgggttcgtggtctccctggctcaggagtgaagctgcagaccttcacagtgaatgttaacggctcataaaggcagtgt

SEQ ID NO: 7 - DNA, 77443 bp, Homo sapiens
  source 1..77443: mol_type = genomic DNA
tggacgagaccacaaaccaaggtcccaagtgataaaaaaggcaaaacatgaaaacccctccggagatgcccaaagctgttacttgggagacaaggacagctggggcctgctctggagggtggtgaggcaggagtgaccgtgactctaactcaggctggccaccacctagaatctagctgcgggcacatcagaggacttgggagcctgttccttctcgcttagaaaagctacaggtctaggtaaaggagccgtccacacacacacggcctgaggcatcctatgagggggacccctggtggaaatctgcatgaccccagttgacagcccacgcaggcccaactgctcttgggctgggacccccaggcagtggggctggggaccccgggcccgtgaggcctgtgggtggcagcctcagtggggaatgagcccctccgacactggcaggcaccactgacgtgttctctgggtttgtactcggaactgctccatctaattcgcaagggcctgagcactctcattcccattctctctgaaagcaggaagagtatcatagacaaaacacatgtaacccacgaagagtttgtttaaacccaaggaagcttctaaaccagagtaagatgaattcaggtggggatgctcctgggttcgagtgacaatggataccagcacctacctattgcgtctcagccctgtgctggggcactcaggcaccagggaggtcccatggcttctggtcccgctcggccacctcctgctgtctgcctgcggcagtgtccagcctattgggaccagtctcctctctgcagatgcagcaaacggcacagctcaccccacgcggttggctgagcgtcccacgagatgatgaatcctgagtgctcagtaaggtgctggcaggcggtaggtgatcatcaaagaagtcactaattacccctcagatgcccctggagccccagacgggtgggatgtggtgggggggtggtgtcctgacccttttctaacatgaaaatggcttcagaagtgatttccagtgctggaaattcagtttttaaaaacattctggaccatgcccttcagacgctcaaaagttctctgggctacctggaaaaataagaactggtcttatttggttcggcaccgtcctgagacatgctgggttacatctgtttgatgggctgtggtgatacgagtgtggccacgggggtcagggggcaccagagtgacccaactccctgctactgaagacgaaggccttccgtgccctgagctgatcagaggttaagaagcaggacccagatgcaaagacagaactgctccgggaacctaacactgggaagggcagccaagcccatggccctgcagggagcaggagtgaccgggggaggcgtgcactgatggccccggtctgctgcagtcaggctgtggccagcgccatggggacaggccacatgtgtgcaaggacttgctgggtagactctgcagggacaaacagatcatacatgttaccaataaagtgatttgtatataactggcggcagggggaggggggcggttggagactgaattgcccattcaaatcattagactttttaaaaaaacatttcctcgatggaaatttccagttccacaaaagaaagtaatcaaacagatgttcctccttaagtcttaaaccacgacattcagatgatctatgtgcaaattaataaggttatgacataattcaattatgtgacaaagccgagggagagttgacaaagaaccagactggcatcattgacttctcaatgaagtggagctcggtaaaaaatctagatgaatcacaggttgtctgaccagaagatccctgacaatgggctgtttactttagagaaaggagctgaaccctgaaaactgaatgtgcgaaattctaattatcaaaaaacccacggcgcatcaggtagacatgatcatctgcatttcttttccacgctgcaaatcaccgcgatcccagattagtccagccggccgggtgcctccctcccgtccgcctgggcagttgaggccaatcagcagtttaggcgcacaggtgcgggctcagaaagcagcagcaatctccggcgtgttctggaatcagaagttgaggtccacgtctgattagttcccttcgtttcattagacttggctgaatgtgtgccagtcccactagagcttcgatttcagacttcctatgacaggtttgttcacagaaaactctggccaccaggatgcccgctccaacaccttgctttcctgcaggacagcgccccagaggtttttgtagagctgcaaacaacacgtacacagcaagtgaagacaaagaaataagaaggaaaagattcctagacggctgagtgtgcaaatgcaactcctcaaagtttttgttaaaaacacaggaaattcggctgggcacagtggctcacgcccgtaatcccagcattttgggaggccgaggtaggcagatcacctgaggtcgggagttttagatcagcctgaccaacatggagaaaccccatctctactaaaaaaaaattcaaaattagccaggtgtggtggtgcatgcctgtaatcccagctactcggaaggctgaggcaggagaatcacttgaacctgggaggtagaggtttcagtgagccgagattgcaccactgcactccagcctgggcaacaagagcaaaactccgtctcaaaacaaacaaacaacaacaacaataacaaaaaagcacaggaaattctctgtcactttttagagaaattttaaaatggtttaaatttatatgaatattttctttttttttctagtagaaaacaattaggacaattcaattataaagtactataaaacacatttataatgaaaatcacccctcgccctcttctttggaaattattggctgggtgaggtggctcgttcctgtaatccctgcactctgggaggctgaggaaggcagatcactggagctcaggagcttgagaccagcctgggcaacacggcgaaaccccatctttacaaaaaaaaaaaaaaaaaaaaaaaaaaaagcaaaaaattaactgggcatggaggagttcacctgtagttctagctacttgggaggctgaggtgggaggatcacttgagcccaggaggttgaggctgcagtgggccgagattatgccactgcaccccagcctgggtgacagagtgagatcctatctcaaaaaaaaaaaaaaagaactgatcgtggcagtggacacgctgtttcttagtaactgcagccaccgcaggatgctgcaaggctgcatcgactgctgctctgaaatctgctctcacaccccaggccgctacaggccgcacaggtggcacgtggccaccagcagcaggatgccctcgccgagtggcccttactggctgatttctggacctgggccaccacaccctgctcctctggtcctgccccgggccagcactcccctacgggaggtgcagacttcactgctctcagcctaagtggcctcactgggaagatggggagagacgctcctgtcttggaggaaggttgtacaaatgaagggcgaagggcagctgagcagacacttcacccgtgcagggtggaaaggggcagcccagaccatctccagggcctggggaggtggtctattgtgtatccagcttacgctgacccattttattgagaagaaacccctctgcctgcacccgctaaatgcacttagcaacccctcctccccactctgctactctgggctccacagacacagacccaggctgctgctccacagggcctaggttccagcttatgtttcacagtttggagcagcgggcttgatttaaggatggtctcaactcccctgcagctctgtttgttcgcttatagtgaatttctcacctggcagctcctggttaatacaccagttccttgcaactggaaggaatgcacttttttttttttttttgagatgaggtctcaccctgttggccaggctggagtgcagtggcgcgatcactgcccaccacagcctcgacctccccaagctcaggggatcctctcacctcagtttttgtaatttttatggatggggtttcagtatgttgcctaggctggtctcaaactcctgggctaaagggatccgcccgcctcagccttccaaagtgctaggataacaggtgtgagccaccatgctcagccaggaatgcacgtttaataaaccatcctgccagcgacacctccagctggctctggttttaactatggaacccagagccagggggcccctccatcatgggcaaggtctctcctttccttggtcgttccctgcctcagagacgggcctgcctctgcagagcaaggcacagcaggtagacgctcaaggccgctccggcttctcctgcacggggcagacagtcccgtgtgcttgggggtcctccatggcgggtctggctccagtgtcccttcgaatgcctgtctgcctggtgagcccccacctcctggggagactgcctctcccaggaaggtgggtagggcaagtccctctcctatgcgctcccccaggacccaaggctcccgccaagtcttctctccctacagcagggcacagtctcttcaaatcctggctctgccactccctggctgggaaacccactgggcttctctggctctcagctctcagcggcagtcatcatctgggctgtatgggctctggggatggtcagtggtcagtccccgatgcaggacagcaggccctctgcagagatgaccatccctgcctctcctactacggggaactctcacctcctgccctgcccacccggctcctggcactacctgcctcttggcacacctagcccaacccaggtgtagcctgggccgcgctgaggccaggcgctgggccctccctggctaagccggtaagggctcatgtacagacttcagcattccctgaggactgagggagggtcctgcccactaaggctcaatctccatttgggcagagacccaggtgcttcagcaggtgcttcagcagaaataactcagttgcggggccagggggcagggatggggtcaaacccctctgtgactcacagccaggggacctcaggcatgggacatgagcattgacacgccgagtccctctagcagaagacagacacagccccataagcagtggggtgctggaaggcacccagtggacctgtgagcatcgctcctcgagggcatcatcaggtgggagggagacacaaggtcagtgatgaggccagcaagggcagcactacagtgcctgggggcactgcctcagctggaggccagagaaggcctctccaaggcagcaatagtcagcttatactgaaagaatggaaggcactccaggcagcccgagcagcaggcacaaggccctggggtgggcatgggcctggcgcgacagacggggaggccagtaaggctagatctggtgggcaggaggggagcgtggggtgaagggccttggaaggattcagtggctgtgtggggctggggcgtggcaggcagtcgaggaggctggtggaggctccctcaggggggcggcctgaccccatctgctatgaaggaatcattatggaacatggggggcaggaggagagctgaggagccacagggaggcggttgggggaaagcggggcaggggagagtaaccccggtgacaaccatggatggtcagaggggacagaggggcctggggattccaggacagggatgggggaagaggcctgcagggccaggagcatggtcagatgggggtaagacctgggaccggggaggccggggggagtgggaggagggcagaggtcacagtgtgtggacctccaacctctgcctgtgcaggcgggcagtgccaccaccccatctcgggaggaaaaggcaggcaggggatgggcaagtcccctgcaaccacagagccagcatggggaagcaccagagtgagacagtcctgacttgtcccgggccctccccaagaagctcctccatgtgtgaccactttccagaagacaccagacccctgacccacaggagcatctcagctccgcagaaatgcccatcaacccttggggcactcccgtgaggccctgtcctccctttacctcgccgtcggctctgccaatcggtgagtccagaacaaagtcaggaggagcgatcacgtctaccagggcaactgcatcgtctttcagctgttggaaaacaaagcccagacacttggcacctcccgggaatttccatggtgaccaaagcataacagccccgtgtgtggttgccaggacccactagcaacgggtcacctgagcggcacgtgcggctctgctgcccatgcgtgatctcttcaccggcctggattcgaggcccttgctgtgcactggaatgttctcaccatgctgcttttcactcaggacttctagggcttgtttcttcccaacaaggtagaaaaggcccttaaaagtgacgaccctgaagctcgtgaattagcaactgcattcagaggctagtttctaagccttggcttatctgggcaactgctgttccagtaaaggaaaatatgttcagaaaacatgtaatagagaaggcatttatgagcacttggaaaagccataagcatatgaagcctcctcggttggcggtggttttattactctcccattccactggacaaattattcttcaatatgacacatgaaatttatatgagtggactctcaagaattttcttaagatgcaaaacaaaaattatccttaaaatatgatgaaatgccgtggctacactgcatagaacccaggaatgggagacaccgctaatgatatggatcaaaggcaatcagtcagtacagagtaagaaaggccacaatggaggaactgagtgcacctctgcgcttcagcgccgcgctctgcagggcgtggccacctggtcctggtccacgtgcctcagcacagaggccgcagacaaatgccactgctcccggagagaagctctcggcagagcacaggcgctgagcccgacaaacgtgttccgtaagggtccaggtgggagatgttaccggctttgcgggccacggtctctggcaactgcctactgtgccgtggaagcacaaaggcacccacagacgacactcaggtgaacggcaggattggactgagtttgctggccctggtctagtggatggctggcaacttctccacctggctgaccttggcctccccaagacagtggtatggatgggcacacacagagtggcacacaacggtcatccagccttggccatagcctcactgggaaatcagttgtggctgtcatttttttgagacggggtcttgctctgttgtccaggctggagtgtgatggtgcaattacggctcactgcagcctcgaacacctgggctcaagccaccctacctcagcctcttgagcagctgggactacaggcatgtgccaccaagcctggctaattttttaaaattattttttgtagagatgaagtctcactacgttgcccaggctggtctcgaactcctggcctccagtgatcctcctgccttggcctcccaaagtgctgggattacaggaatgagccaccacacccggacactttttatcaacaacacctccccgctatgcccccctctctggcgaggagacccccgtgctttccttggtgcacctgcatactctgaaggcctccatggggtcaacactgccccaagggggtaaaatttggctcttggaggagccaaggaaaacccctccctgtggccagttcgatgttaagacgagtaaatgtggccacatacgtgcgccacaatcagacacgcccctctctggaaccgcaggctcagggaagggctttatacaacgaatcccgagagaggctcagagccagtcacagggacgttccactggtcccagatcaagtgtgaaagcagtgacaggggagatgaaaggccacgtctgcagtcacctgagacattgtgctaaaatgcagcagcactcagtccagttcctagcagcaaaagtggaatgacgtctccacggacacagtggccctgcccaccgcagcagcaccagcaccagcacaagtggctcctcaaaatcagtgcaatgaaaggaaatcggagaccctcactcacacagccgccttcccccaacccagcggctgccgtgctaaacagcacagcactgcagcttctgtccccggatggaagagagatgccggatcagaatgtggggttggggccctctgatttcctgggtgacataggtaaaagaatataataaacaaggaaactgccaggaaacaaatttaaattggaggctgagtcccccgaatgctcagagaattctcaaagtagctgcaaaaggtgtgtgagagggcctgggtgtgtgcagatctggagacgccccgacaggtttcttttgcaaaaatttctgatgtagccatattttcttgtaatcctacagtttttactaaacactgaacacacgtgaatgtttgggttgcaaaggcggtgtgtgtcggctcatgggtgacgctaaggcggtgtgtgtcagctctgggtgatgctaagggggtgcgtgtcggtctgggtaagggggtgcgtgtaggctctgggtgacgctaagggggtgcgtgtcagtctgggtgatactaaggcggtgcgtgtcggtctgggtgatgctaaggggatgcgtgtcgctctgggcggttgtgtaacatggatgtagagaacgcgacagcacccacggctcacctgggaacacaaagccaggacggcgctctccaacacttctcccgcctgctcaccggagaagtatcctcctgcaagcacagcctcggtcacatgggggctgggtccagtccaaaaccacccccaataccaacatgccctgagtgcactttccaaatcggccatataggaggcctgttttgggtgaacacatcagtgtcattgctgtccccagcccagatgtgacccaaggaatgtgctgctcaggggccgagttctgagacccttttcccactcaggcattgatggtctctggcccgcggcagcgagggaggcaaggtcccaggctcagaggtgacaggtggccgctgggctcatacctgctggggttcagggaggctgggcgggttccttcctcgggagaaagtgaggaaggggctcctgggcagagtgaagcaggggtgcatggcagggggcgcaggggcgagggggtgcctgggaccacccaggggagttgggggcggtgggcacctgcagggactcagaggccgcagggggacttggtccttggtgtcacctccagccgctgtggtttctggcagggccctaagaggtccaaggctgtggccttgtgcgttcgggagcacatctgtggtgggatctgcgtttgctgtgatttccgctggagagaactgtgtctcatcacttagggtttttctcaggcagcagtggggctcctgccctgtgcccgccctctctggcagacacttgtgtcccttccttggtgcacctgagcactgtcaaggcctccacggggtcagcaccaccctccagggggtaaacgctggctcttggggtggggaggatcttattcttcacaagcccagagacacaggacatgaatggatatgcagtgtatcctagtaccaaagatgcatgggtgccagccattgggaaaaaccacctaaaaagcttcctggggggcaaagacgaacaaaaagttgacaaactttggtttagcctattcccaccaatcctccaggaatcagccccagcaccccctcctccaggaagccttccagtattcccaagtctaggcactcctggctcgtgtctgtctgtgccttatgggacctagtgggtgggcttctgctctctgcagagcccggcaggctgcctggcatgagggggccttctggaagtgttctctgaaccgaaccccaagtgaaagaaaaattgggtttctcggcaccaccctgacgctgctctgccccatatgcttctcattatggaactgggcttctcatctgtccacagcgccatccgccgtgctcagtgagtcccgtggaaggaggacgatggtgcaggaagcagcttcctagatacaacacgggggccctgactctggggaggacagcaagcccgcagtcagaagcctcacctcggtagagcagggccgcgtggcggctcagggaccacagggcgtacagagcactgagccgccccagcacggcccgcagcgagggcggcacggaaggctggtgcacgtgctcgtggaacctctggaccaccgtgagctccacgaaggccagcgccaacggacggccgtgggacacctggaacacaggacggcaccgtgaggaccgtgagggtcccagccccgcccagattcccgggggaggaagttctcaggaaacacgaacgcgggtctgcgttcccgtgcatgtcctaggacagtaacataaggtgaggcagagcacagatgcggcgcagcacgagacatgtttccagaacacaatggaagaggcctatgaagatggagctgggactgctctggctccaccgacgccctccaaggcctcagtctcagctcagctcccgtctgggactggggttggcaccagcactgcatacggagcctggagccggcctcgggatgctctgcggctacagagtgggcgcccaccaggaggcccccaagggcccaggacctggcttcttccacacgggaagacacagaggagctggagaaggggcttgtcaggctcctccctgagctcagaattgacttcacttctccaaagatctgccaccccgtcctccaaagcctccaaagcaggcttctctccctctccccctgccgtaaggcccccgcaggctctgccgctcccatctttatgtccatgagtgccccatgtttagctcccacttgtacatgtgaacatgcagcatttgattttctgttgctgcattagtctgctgaggataatggcgtgcagctgcatccatgttgctgcaaaagacatgactgttcgtagtgatggctgcacggtatcccatggtgtctatgtaccccattttctttatccagtccaccgctgatgggcacctgcgttgatttcacatttttgctattgtgaatagcgctgcgatggacatacaggtacatgtatctggctggcaggatgattgcttttctttggggtgtatacccagtaatgggatcactgggtcaaggggaagggcaactcttagctctctgagaaattgccaagctgccctccacggtggctgaacgaatctgcgttcccaccaaccgtgtatctgtgtcacttttctctacagcctcgccagcatctgttatttttcttttttaatgaatatcaaaaacatttgctgataatcatcaacttcacttattagcctttctttccctgtctcccatttatcatcttaccagattttttaaattaggaaaacaacacacgcattgcttgacttgttaggatgagcaggtgctacttttaaaattaaaaaaaaaaaaatccagccaagtgatgaaatatggtgtatgggggactgactgctgcaggaggacccggctgcatgcctggcctatgacgctgctatgacgctgccccaaatcttcccagaacacagcagggtgaagcacacggcagcagggtctccagtcacaaagccagtgtcctccagggccctgctgggatcaggagcctcgggaaaacagaaaccgggagaagcgcctttcccgctgtgcttcatgccaggctgactggtcctgtcccaagacccccgctgggccccgcacactcctgggtgggccgtcctgtcggtgccaggaaggcccgtcctgctccctgctgtctgagcatggagcatgccagcatggggccttggggcttcctgccctcttctgatctcacatgcgctatagctctgggccttggttttggtgagtgagggctggtggcaggatctggacttgctctggggcagtagggactgcctgacagaccccagctaggtaggactagcacccaaatttcccagagccctgccgagtgaggtggggcagccctcaggctcccacctgaggcctctggcaggaggctgataatacaggcctgtgggggagctgccaggtgtggtgctgcagctccaggcctcagcccttcctccttccaccttccatgaaacaagcgggtgacggcatctgcacccccgtaggctgctcctgtgtccacgagaacacgataattccattgaatcctgcccacaccccaaaacgtgctcccacaccacgagggcctctcctctcgccatgggtcctctgcgaacccagagatgaggccaatcccagcagggcccaggcacagagaggccgtccttgaaccgaatctgagtgagccctgtgccccgcaccactctccccgtcgcctgcacagttgctgtgttagagcggcactgcttcagtgtttttccatgaaagtgacacagcttgatacagcgatggcacaggccagacatgctgcgggggccagaaagacagcccctcctggaaccttgctgctgtcaaataatgcatcgcgagtgccagtgagttttgaaacacagcgtcactcggctctgcagctctgcgcgtgagcaaaaggcgtcatggctccaagcctcagcgttgtctcctgcgtggtgctgctggggtcagggcggctctctcacaggaagcgcctgcgatggcagctctactgtactcaacggcatctcagtccccaggatttgcctgcatgatactgcgctgttcttccaggaaaggtccacgtaaggccagcagtcaccgggggggacacaggctctggggatgggctccctaaacagtgtctgccatggcaaccagcagagctgaccacagcattaaccaaggtgggctggggcccaggaagcatcccatgcggtatggactctggcgacccggggggacagtaatgcctcaggtgcagtccctcccccacggacaaagtgtccccacagctacggttagggctggcgcactccagccgagagtgctcacggcacccagacacatccgggagccccactgcccccaccagctgccccctagacagggcggggctgggctctgctctagggggatcttctggaccacctcagctgcccctccagagctgccaaactgtccccagctaggactgtgacaggcacttctcaggctcgatgcagctaaggtcagctgtccgtaaaccttcagcacaggagagaggagagggtcccagtctggtacactctggttggtgaagtacattttaagaggcaatgcatacttcaggcaaaaaaacaaaccccaaactgtccaaattcagactgcagccatgcagcctggggaaagggttggactctgtgacagctggcccgggtgcaatcctggccccggcacgggcgagctgggggaccttgggcatttctcttggcctcaacttccttcactcccaaagtagacaacgtgaaatgacccaggtacagaatccagcgtgtggctcagggagaacaaatgtcctcgtccttgtccgccttctgatgtgcaaatccctgaaggaaacctcgagcccttgtggcaggggttggtcccaggctggaggcaggctgcggggacgccaccacccatctttttactcccaggctggaagcaggctgcagggacgccaccgcccatctttttactcccaggctggaggcaggctgcggggacgccatcgcccatctttttactcccaggctagaggtagggaggagggacgccaccacccatcttttgtatctactggctgttgaacatgtaaaggtgtcactcagccaaaaaatgagagaaatgcatttttaaagacctttctgtgcatgccaggcttacagtgggtaaatggtggatagcagttactggcaggagccagaaaatgtttaaaagttaatagattttctccaccaggtcaaagagtaagcacatttttaacaaaaatggtcagtaaccttcccaaaggacacagccatcaccctctccatgaacggtgctgctgcccaagcccagcctgatgcctgtggaagtgtggctttgacctgcagctcctggccctggctccaggtcagtggctgctggggctggtttccgaccaggctggcatctatctgaaggaattccttccttcctgggggtgttctccgtcggcgacatgttacgtgggcttccacaggctgctgtgtgtcttccgattttgtttagagcgtcttttgcaatgcagaaatgctgaacctttatgcagccaaatccgatggtttttttaacagcttccggttcccatcttcctgaaaaggctggtctaggctgaggctttcttggtatgccgtattgcaggggaaggggctgcgtctcccctgggcccccttagcattcagcccagggccccaagggctctcagctatcacaaatgtcccctgctcttaaaagctccgcgacccggggcaggtctggaacacgaagccctgccctggcaactgttttccctccaaggccttggggctggtgtctgtgggtgtctgtcagctccacagctcagcccagggtcaccgtctcagccggatcagaacccaggacccctcctggcctctgccgcagccctccgtgaaattctgctaccaagttctcgaaggaaaagctacaggtgaggaggggtttctcagcagctgagccacacactcggggtgttgtggggtcacacatgccaggtccccagcatagatcggggctggaagggggtgctaaggacctaccgggcagttctaagagacacaggtgttgttaggaagggggtccttttgtgccccccatctctggggttcttgtttcataactctttggagaatctctattccattaaaaaaatgttttctttcttttctgagacagggtcttgctctgttgcccgtgctggagtgcagtgatgtgatcacggcctactgcagcctcaacctcctgggctcaagcgatcttcctgcctcagcctcctaaagtgctggcattacagacatgagccagtgcagcagcctattccaccttaacgcaaggatgtggcctgcagaggagggagcagtggaagctgacaggcatccactggtttctgaatgacccaacctgctgtgtatcacccaaggtgggtaaacaaggcggcctgttctggaagggtcacttcacgctttggtcaccatggccctaaactacaagttttacagaccctggccacctgctgacttcatttcttttcagttataaattcaatatgggttccttttttttttttttttttgagatggagtcttgctctgtcacccaagctggagtgcagtggtgcgatctcggctctctgcaacctccaccttccaggttcaagcgactctcctgcctcagcctgccaagtagctgggactacaggcgcatgacaccatgcctggccaattttttgtatttttaggatacaccaggtttcactgtattagccaggatggtcttgatctcctgaccttgtaatccacccgtctcagcctcccaaagtgctgggattacaggtgtgagccactgcacctggcccaatctgggtttctttgagcttgacaggagcccatccttcctgccttctctcctcatcccagggcaggtgtgtctagcaggttcctagaggagctggcctgaggggcggggctgccccccagcagcaggctgtgaggtgctgggccttcccagagacaggcagatgtggacctgggtccccatagcagcttcattactgaaggtgacccataacctcatgaaccgacgctagggagaaggggtgacagcagctctctccgtatccacggcctccctgcacaacactcatggcctgagtctccccacagctatggttagggctggcgcactccagccaagagtgctcatggcacccacagacacatccgggagccctactgcccccaccggctgccccctagacagggtgggggctgggctctgctctagggcagatggctgggacagggctggaaggttcctggcatgacaaggtgttttataacaggctattttttccctgtggcttcctggaacatgagagacagccctgtccaagtgtgagaaccaaagcgctttccaaggccaacgatgacccactcaccattgccaccccagcccctcgggaaggcgagagcaacttgtggaaaaccaagcagggcgctggcatcactcccacgagtcaggagggagtgctctgagtgcccgcaatggtgtctccgccactctgtgcatccaaggctctcacaacccagagcttcaccgctctggtttacgggctgggaaccgtcaggcacggtaaatgtaacatccatgacctccccagcccagcaagacaggtgctgccatccctgtgttacagaggagctgagcaagcagcaaagtcatcaagtcatctgcccaaggtcacgggagctcggggtctggggcctgaattgccaggatgttcaaactcccagggacacaacggccagggaattaagagcaaataatacaaaagggaattttgaaaacaaatacttacctggcatttgttccttgcttcaaagtcactgcttcctgatcttttctcttggtttaatttttgataagtctctcggagcaggtagcaaaccagccacttgtatgctgccagggcgacttcggaatgacaaacagaaggagaaaaagtaacaatagagaacacagcatttgtcacaactcacccccagggacaaggcactgccagcatcctgcaggtaccaggttgtcttcattgacaaccaagtgtatggggtgggtctgattttataggtagggaaactgaagcacagggagggcacctgcccagggcccccctggctggaggcacttcctggctcagcccagggctgtcctgagttctacactgttccagcagcctggaggccacaggaacacggtgccgccgctagagtgggcccccgagtgggacggctgcacgttctcgcacgcaccaggctcggtctgtgtgaagcgtggtgctgcctccacagcatcagccaggactgcatgggcagcaggacaactggccggcggtggcgcccagtggcgagaggaaggggtgcttccgttcgcctccccctgcctggcccttggacctcaccgcatgctggagctgtggaactggggactgacatggtgggggaggggggaacctaaggcctcaccccctgcgtggccccttccacaaagctcaaaagggcaggagggagcagatgttgcagacagggaggccccggggtggggtgtcaggcaggacagctggagaccccccttcgtcctccccttcccctggcagtggtgcccacatctgcggggccccccacagcacagccagagctggcctcccacagtactccgtatggaccaggcatggtcctgagaccccaccaggctgtactgctactaccccactgatgaggacacgggcccagggacccaggtacatggcgagcatgtgagggaggggtgcagaccacccacatgtggaggccacgctcacacccaccccctgcccaggcacagagggcctggcgcccagacacgaggcacctccaggctgcaggggccttctgcctggcagccggtcttgctcagagatcccaggcaggagaatggggatcagccacactgagtctgagcccaaaggctgaactcagtggggcttgggatttccttctatgtcacacagcccaggtcactgggaagaaaatacccaacgttgctgggcgcagtggctcacacctgtaatcccagcactttgggaggcagaggcgggcggatcacgaggtcaggagatcgagaccatcctggctaacacggtgaaaccccgtctctactaaaaatacaaaaaattagccgggcgcagtggcaggcgcctgtagtcccagctactcgggaggctgaggcaggagaatggcgtgaacccgggaggcggagttgcagtgagccgagatcgcgccactgcactccagcctgggcgacagagcgagactccgtctcaaaaaaaaaaaaaaaagaaaagaaaatacccaacgttgcagttcctgccacagcacacccgactgctttcggctgttacatctgttcaccctcacggcataactgagaagcccgtcacaaaccagagcaggccgtttcccaggctcacacgtcaggcggcttgccggaggtctcagctccccagagggagtgggatggaaagacgggtgctgctgaccccgcaggcagggcacaggcagggttgggcggaggcttcctccatgcaggcatcttcagggagccaaggctcccctcgccaagtcctgccaggcatggggcgctgaatggtggccccaactgacccccacagctgtgaatgtgacctttgttgggaagagggtctttgaagatgtcatgaagttgaggtattcaggtgaggtcatcagggactcctggactaggatggattctaaatccaatgacacgtgtccttacaagatgcagagacagcaaagtcacagaggaggcaaaggctggcatgatgcacccacagccaagaactcctggagctgccaggagcctgggcgggaaaagcccccccaccacgagagggaggcgggtagccctgccccatcctgacttggggtttctgcctctgcaccaagagagtcactgtctgctgtcttcagtgcccaggccgtggctctctgctgctggcaggctgcccaggggtcatccttgagcctcacatgctacccttcaggactttactggaaaactcaggtccattttgcaaccaatgctgaggggaggcccttgtgaccaccgcctgttcctaaaggctctgcaacatcccaagctctccccagcagggcagatggtcacgaacagcaaggaaaggtagacgccgtacagttgtgcttcccacgacttatttacacagcaacaaaaccaaggaaacggtccggccagaaaccacttgtgcaaattccttctgaccacaccagaggcccccgtgtcccaccacgcatcagccatggctgggcttccctcccagcctgtcctggccattcccaaacactgccccaggaggtgtccctctgcggtggacacttcacggcagttacccgagttttccaatctgtctctgcaaccagaattaatccatgaggcttcacgtcgatggccagttagactgtgctgtgggcttcaagtgagagggacgcttgagaaatgagttatgtttgcactgtgttttttccttacactctacttttggttcttggtttttcgtgaaaaaataaatcatgtcagtctgatgtgttcatgtgcaggggagaagatccccaaaaagcacatgaaagcaaacaatgaaaggtgggtgttgtgtgtgtcattttcagagttaatgtggaagtgaaaaagtatcgctgaaacaaactaggcaggaaaacgggcactgacgggcagtgaattctcttgctcggaatgcggctgctggcggcctgaggacacacccagcgtcaacaacctctgtcctcaagactctcccagaatcctgggtcaccacggcctttccatgtgcctcacaccagaaggactctcgaaggtgcccccagccgccctgtgcacccaatgactgcccctcgatctgccccctccccagctggggctctgtccttgaccccatggtgagctcttcgcatgcactgcctgcctttcgggtctcggtttcctctcccgtctctgggtccagtcccctctgcgtcagcatcagagcactcctaactcggattctgacccaggcaagccctggaaagcaaggcctggacagcggccccaactcctcagccagatcacaggcccgggtctgaccatgcccgccgctctggtgctcctgaatggccggtgctccccaaaagcacaacgcacggaccctctgagacaccctcaggtgccagttttgtgggagacattccctgacccaccaaggcagacctcacctgcatctgttgtttccaaggaagtgttcaggactgtggccccccacacgcagcagccccccaccgagggcaccatggcctggcccctgccaggtggcatggggtgaccgcattccctccccactgtctcgcagaaggaaaacaggctcagagagattaaagcctagctcaaggtcacagcggggggcagtgctgacccaatagcctgtgctcccaccctctgggagcactgtctgcaccacgaaccccactgctcacctcatatgaccccactgcccacctcacatgacctcaccatgcactccacgtgacctcaccgctcccccacgtgactccaccgctcacctgtgacctcactgctcacctcacatgacctcactgtgcactccacgtgacctcaccactcaccccatgtgaccccactgctcacacatgaccctatgtcacctctggcccacatcccatgaccttgcagtccacaaatacacacgtgtccgagtagtgaacactgcaactgcttactatgaatgcatacgagccagctaaacaacagggcccactgcaggaagcaacagcacaggcccccaaggcacagggctgtgacactcagctcagtgcaaaaatgcctgtgcaaaaatcagaggaactcaacagaaaacccagcctcccctacccaagtcagaatcgaacccctgaaggacccgccattggcttggcaaatcctccacccttcctcacaggcaagcgcaaccccggaaggggcctgtgtctctccagtcctgcagagcctgagggccccacatcacttaaacagcttttaccaaagatccacatgacgcaggctgcagtcagccctgagacctgggatctgtgaccaaatgcccttgagacgatggggctggcagaacccacaagcttccctgcggcgtgagggataatggcggtctctctcccataccactttgaacaagtgaaagccatttgcctttgttactccggaaaacgttttcactttgttgcatcttgtaaatattagagcagttgcagaaaagcagatgactttggtgtctttcctgatgatggagagactgtaaaattgcttttgctttcagtctcaggggaaggggagggaagagcagagcgtgatgggcacatggagaagctggctgtcccatttatgttttgattttattaatataaggagtgatggttttaggaaaaaggtattggttgggttgaagttaccacaatgattaggtcattttctagttctttctgtggcaacatttgggaagcttagaaagtgacttgcggccgggcgtggtggctcatgcctgtgatcccagcacttcgggaggccaaggtgggcggatcacgaggtcaggatatcgagaccatcctgcctaacacggtgaaactccgtctctactaaaaatacaaaaaattagccgggtgtggttgtgggctcctgtagtcccagctactccggaggctgaggcaggagaatggcgagaacctgggaggtggagcttgcagtgagccgagatcataccactgcactccagcctgggcgacagagcgagactccgtctcaaaaaaaaaaaaaaaaagaaagtgacttgcaaacatcagaaataggtcatcaaacgtgtccccgtttcccactggcacccaaaaaggcaggctaagatctgcacggttagttaccgtcagaagctgtaacccagcgcagtgaccacgagaaagcaagcagtgatgcagacgcttcctgatgacgatgctgacggtgcgggcaggggaaggcgctgggaagccggaccggcccaggctccacaccggcttcggccacggctgttgtcctgttctttgccgtgtgaacaaggaagtagcctgtagggctggagacggacaaggacacacgctcgggggctgctatcacatccacggcgtcggtcctgatggctggaacgcgtcctccatgtgtgcctgtcccctgcatgagggaggccagtgctccctcctcccgaggatccaggggcctcccagaaccccagggaagcctcacattctggtctcctgaatgcaaagccaagagcatcctccatctccaagtccccgctctatctgcccagttgaacgtgtggcacctcgagggcggttcctgtccaaactctgtggctgctgagctgagcactgatgtggcgccaagtgctgcactaagtgctttacgtgcatgaactcagtccacggtacaaacaccttatgaagggggtaccatccccgtccccgtgctgcagatgaggaaaccgaggcaggaaggctgagggacttggtgtaggttccacggccagcaggaggagggaccgggatcaaccccggcagcctggcgggagctgacgtctctctcactcaggaaggtgggctactcttccacgtctcgggtgtcacgggagcagtcagtttctacctggcccgccgggacagggcgtcgggacccctctcggcccttctcttctgcacaaataggtgctttggtggcaaagtgaagacattcactaaatactgctgagtgaggcgatggcgagatggaggcgttgctgcggctttgagctgttctctgtgatacgcggctttacagacgggggctgtggtgggaggaaggcatttgacagggacacgggtggcacggaggtgggggcagctccagccctgctcttctgtcaaatcgcacccagaccactgggcaagaagcatccaggagcagtaacgagagatcccgagctttgcggtcccacaggcttgggtttgaatcctcgctccgcccctccctgcgctcaggcagctggcaccaagggagccttcaggagtgccctgtaggacacgcagagctcggctgggtgcttctgtgtgggggcgcagggcagaccccctcacctgtcccagccgcctctcacctccatttccacagagcagccagagtggccttttcccatgaggaacatttttaaaaatatgaatcatcaaaacaaacagcacacccctttccaccaggcctcttgcgctcacctcccgtcattcacagcaggggaacgagatgcatgctcacatcgagatgagctcggcatgggctgggccctgctgcctccgcctcctgacacacccgtccatcgggggtccccatggctgcccccgcctttcactgacctcaattcaaaggccaaggcccctgcaaggtggtcaccagccacgctccacctcaccagccaggatcactgctttgcagaattcctgctgccctaagactgaggccttgggatgtttctgtgtctgctggtctagactgtaaagtcccatgagggcaggcacaggttctccatcatgctggccgccagccccagaactgcagagtgagcacataacgagcacgtgcagaattaacccaggaacgcgagagcagctgctctccggagagggatcccctgtcaggatccagcgcagtctacagggaagctgctttgctttcgatgctgccagcacggccaggcgcctcattcccagctctcgctcccacctctctgagccacagaccccgtgtgggtgaggcggagcctgcagcagctcccatgacacacctgcaggaggctgtccgtggccagctctgtgcggggccctgggaggacgccccaccccgaccaccgcacccacaggagatgagcctgtgccacaggggccgagtgaaggaggtgcgggaggtgcgccagggcgggaaggggcatctgctgtttggggagccagcagggcctgggagtggggaagactgacaggtgaggtggctgggagggcccagggacagcagcagcccaggcaccagggcagggggcagaggctgcttagtggacagagaccaggccaggtggcctctcacgccctttatcctatgggagggaaaggcaagaggcaaggtataaggtggcaagtgggcatccttcaattcatctgtggagtcagcgcctaactcggcgtcaggcacaaagagatagtccatgagccagcccaggacaagctgcatgcggggcctcccaccaccactgctgccccggctggaactgccaagggtcccctcaccgaggcacggtgcgtttcctggtgggaatgacaggaaatcaggaggccaggggagccctccacctgtgtgtttacctgcagagtccaagcagtcggcaacactggagacctcaaacttctggtcaaggatgccgggataggcgtccagaaagtccactgacttcagcggactgcggaagcaagctccatctaggacacacattccagtgactttggtggaagacaggaacccaaaccattgggaaccccaagctgggggcaccccaaagcacagagagtgtccagaggacccgacggccacagacccacaggcgagggtctgggtctcaaggaccctccccaccccagcctttgcccatgccttggggagttggtcggcactatctaataacatttctttccttctgcaaacctaggatgcattcacagaacagctgaatcagtgaggccaggagaacccacccctgccccagttgggttccagcgcccccaccagtgtgcagcagagcctcaccgtggacctggtgtgccaggagacccagcaaatagttgcttgtctgctgcagcaggatgttgttgtcaccttcgtatgtgcagttgggatcgttgtcatctctaaggacacccaaccggttcactgcaacaaagccacaatagtaccatcatttaagacgcatatttgagaagcagcctgtcactatgtgagaatttaaaaagccttaagaggctgggtgcggtggctcacacctgtaatggcagcactttggggggccgaggcgggtggatcacttgaagccaggtgttcaagaccagcctgaccaacatggtgaaacccacctctactaaaaatacaaaaatagccaggtgtggtggtgtgtgcctgtaatctcagctactcgggaggctgaggcaggagaatcgcttgagcctgggaggcggaggttgcagtgagccgagattgcgcaactgcactccagcccgggtgacagagcaagaccctgtctcaacaacaacaacaacaaaaaaagccatgagtttgagaccagcctgggcaacatagtgagaccctatctctataaaaaatgaaaaaaaaaattagctgggcatagtggcacgcacctttagtcccagctacccaggaggctgaggtgggaggattgcttaagagcccaggcatttgaggcaaaagtaagccatggtcatgccactgtactccagcctccgggacagggcaagactctgaccaaaaaaaaaaaagccctgaactcagcttgaccagacacaaagaactgccacctgtgcttcatatcccacctccagctcctcactgctgtcagcaagccctgcagagcctcccctggcatggggttgctgataggagggagccatctcagcgagctgatgcccccagggctacccttcttccgtccataactgaatgaactcttcttttaacacaggaaatttcaagataactgttttttgtctttcctatcagttagctggatgccttcacatatgttgtcaggcttgctttccagaccctcacacacttgagcctgcctactgtgatggaaagtgttctctgaatgtgaggctgggatgggcctagcaggaagggagtggagctgacttctcacactcacgtactgtgactgatggatcctgagagcatgaaaggagtcctattgcagccatactgccaacacgcttgtgattagccttgtgatcacctagaacacctgattttctcctgacttactgtcaaatcatgccacgagcttcctgccacgtaacaggttggccactgaacaagagctgggagaggcctcagcagaaacatttgcaattgattttctaaacctagatggagcctcggtcatattggtctcaatcccagcatatgtatatgtatgtgtatatgtatatgtatgtgtatatgtatatgtatatgtatatgtatatgtatatgtatatgattaatcttgattccatcatctttgttgtctgcagtactgcaagattcaatttccttattcaactatttatagaatcccgatgagttacaaagacaaaaactactaagggcattgcgcagaggacaaagcatgcaaatgagtaacttgtgtacagccatggctacccgcatgtcagtaagtgacaaagacagattgtggtgggagtgaggggccacgttgctaacagcccatgctggaacaggtgcgagttagaactgcagtggtgggcggatgatcgctgaaagtgtgtgtgtagttctagatagagcatcacaaaaactctcacaaacttggcaaggaccaagtgctcctggagggcaagagagttttgctgatgctgtggctgttttgagtgtgtacatggccttctttgagcaaccagtttttgccagttaattatttaagattagcacacgggaagttttgcaggtaagctgtaaataatgctgatgataattctaataataacagcattagcaaataaaaaagtcattgggcacgcactacatgccagataccatgcttacacttcatacgtggtaattcacttaattctggcaagaacctatgttgtgggtacactattatcacccccactttaaaaataagaaaactgagcacagtgaggttaagcaacctgcccacagttaccaggctgttagatggagccaggactcaatcccaggcaagctggtggcctccgctcttaaccatataacagctgcctcagtcatcatcaatgccgatataactaactctttatctaagtgtaagaattttctattcaaacaaaacatggtgctagtttactaccaagctgttaaccaaatagttaaaattcaaatgagcagatcagctgctctctgcctatattttggccaagaagcatcaggcatctgaaagcagtgggatctatctagggcaggggttggcaaacttgttctgcaatggaccagagagtaaatattttcagctctgtaagccacatggtctctgtcacagctgcgattactcatctctgcccttgcagtgcgaaaacagctgcaggaaatgtgcaaatgaacgggggtggctggctgtgttccaataaaactttatttgcaaaaacaggtggcaggctggatttggtcctcaggccgcagtctgccgacccctggtctagagtcaaacagcagggctaaggacaggaaaccaccatgcgcttctccaaaacctactggccagatagccgtgtcctccacacgcctcccggcattcctgaattccttgctgggtggtccacgaggccaggggcttgctggccgatgccagggcgtggatctcacgtccaagctctgcctttgggtgagggaatccaacaagaacaggtgaaaagagactttagacaccaaaaagtcataagtcagcaatagcatcaaaccaccatatcacctctagtctaatacaagacatcccgaaaatgacagaagaggaaacctaattgtaattagaaataaaaaagggtctttatccaagtatggatacactgtggtacgctcataccatttcacaacaatgaaaacacagctctacacagcaaatagctctcagggccctaacacgggtcccagaagcaaactgcagaagaatgtgcgtcatggcccactttatataaagttcacaaacgtcaaagtgaatgacacaccatggaaggttgcaattgtttgcagcgaaaccatgaagaaaggccagggaaccagactcagcaccgcagacagtgctcgctcccaggacagggaagggccgggaccagtccattcccagaaggctgcaagcgcctcggtaactgatggtctgctctgtgtgggggctcaccgtgcctccctcaggcctaacatgttttattgagactcctttgctgtccatggccaaactaccctgaatgagcctgatctcgtgaagctaagcagggtcgggcgtggttagtatttggatgggagaccgcctgggaatagcaggtgctgcaggcttttttttaaggggaaaaaaaaaagaaagaagactcctttgcttctgcttgatatctaatgatgaaaacttaagaggctgggccaggcacagtggctcacgcctataatgccagcactttgagaggccgaggcgggcagatcagttgagctcaggagtctgagaacagcctgggcaacatggtgacaccctgtctctactgaaaaataaaaaaaattagccaggtgtggtggcgggcacctgtagtcccagctagtctgggaggctgaggcaagagaattgcttgaacccaggaggcagaaattgcagtgagccaagatcgcaccactgcactccagcctgggcaacagagcgagactccgtctcaaaaacaaacaaacaaacaaacaaacaaaaacttaagagactgattcagagtaaaagaagaatttttaattttaaaaaagaaagacaattaaaaaggaaaaacaattaagaggaagacacacacacgcacacacacacacacacacacgcacacacacacacacacacacacgcatgctaagtccagtgacccattttatgagtgttttcaacttcacataaggggctgagctgaggccctcctctgcctgggttaaaccactgagtttcagaaagaatcagcctggtcaccctttacaacattattcacaggagaacaatgcaagtgtcagctggcaaaagctccactgactcacgctccagggaaaacacaggcttaacccctttagtggtcagaagcgctccctcctcaggcctccaggcctggggtttgctctgccatcaatcctgcaggtcatcccttcgccatcatctgccgtgaatgtggacaccgataatatttcaagatatgctaattagatacaggctttttctgatgttgtacataacagcaatctgtggcgtttctcctctgctttcaaacacggttatttcttttgattcacatttcactcttgctcaggaggcagcaggagggacaatggaaaatcagttcataatcatctacaaagaaatccgttcccgatgtctctttatgccgaggctgatctcgggatttgcacgctcgtttctggcacaaatcctctgactgtcaactcaaatccagtcagtgggattcagacctttgtgcagctgtttacaaaaggctcagaaccatgaaatccactgaggggcgggtaacgtggattttgcaaaaccgtcatgttctcaaaaggagaccaacagctgaactcacagactggaaccgggagtcgtgtcagcacatccttgagaggcaggggtgtggacgcgtgcccagcccgttcaatcgcggcagaggccaagagctccgagtgggtgggaacaactggaggaatgctctgtcctcgcaaatcaaaggactgattttgctttgaaatgaaggttgaatctatgctgctccaaccgtgtgagatttaaacgatgctgctgaggaagcagacaccacctcacctgtctggcgctgcggtctcccgatgcaagtcctcgctggagctccaccaggtccaggaagagcgacttggagaaatggtctaaggcgtagacagctgccagatatggaagcaagcgccattgctagaacagacaagacacctgcgtgaacacatcgtggttcccatgaagggcagcccatcccagggaccatgaaagccagtgcagggagaggccgtcagggccacacacccactagcgctgaaggtcttcacatgtcttcccggcacatcagaaagccttcaccctgacacgctctcaactcagccagttcggctttcacccatagcccttgacagacaagctcaaacgcaattcgctaaatggccgctattcacagctgtcccatcaaagtcactacagaacaaagtgccagtctatctgtgaattaagaaggcagcactgctaggggccaactccccggcacacggactgactggctgacagcatgagcctgtgaggatgaggccgtcaccctgggacagatgggaaagctgaggcccacacagagctggcagcccctcgaaaggctgagtgcatgtctttttcactttgtctgaaacaggatagggtccacctattgttggatgggggggtgggtgggtgggtggatggatgcatggatggtgggtggtgggtaggtggatgtgtgggtgggtggatggatgaatccgtagatgggtagatggatgggtgggtggatgcgtggacaggtggggggatgcgtggacaggtggggggatgcatggatgggtgggtgggtggctgggtacatggcaggacaagcctgagaggatcctgaggaaaccgccatcaccaccatggtctaacgtgtcaagagtgctgagcagacatggcgccagctgcctccatgccctaactttgttaatcctcacactgatcctaggaagaagttttatcatcagttctaacttacaaatgataaagcaagagcacagaaaggctaaggaccttgcctgggggcacacagccagctgggggtggaccttggtggtaaggccaggcatggtggccccagtgcgctctcttgaccgccgagctgcccttggcacccagagtgctgtgaccacacacgggaggggatgggtgccacacaggcatgaatggcaacacttactaaacaggctcatagccctggtcaaaggatgtggacagaaacaactgcaattctgttacaatttcctggaagtttcacccaaatctacctttattcatgcacagcttggcctgggacctgggcctgagttagcctgtgcactttaactggatttcttatttgatcctcagttctctcacctgtaaagtgggactaagcccaaccctcttagctgtgaagaccaaacccagagcacagggcacgttcgctgtgacagttcatcccccttccatgtaacaatgtctgtgcttttccacgctgctgcctgggctgcatctgtgcatgtcaacagctgccccatctctggggacgtgtagggccaacgctctgtgcccacgccactgttctaaatgccatcacagtgaacagggctgcacgctcagctgctgcttcttccagatcacctgccaggaatcatttcttagggatgggatgaaagtgtcaaagagtgtgcacagggcgtgcaaggccactacccgccaagctgtggcggcctcacctgaacgtgcggccgtgcacacacccacctcccagagccgccccatccttgcttctttctggccgggcacagtgactcatgcccataatcccagcactttgggaggctgaggcaggtggatcactggaggtcaggagttcgagaccggcctggccaaaacagcagaaccctgtctctactaacaatacaaaaattagccgggcatggtggtgcatgcccataatcccagctactcgggaggctgagacacgagaatcacttgaacctgggaggcggaggttgcagtgagccaagatcatgcccactgcactccagccttggtgacagagcaaggctccgtctgggaaaaaaaaaaaaaaaaaaaaaagacttgcttctttccatcttccttttttggctacttcgtatctactctttttaaattaaaaaccatttgctggaagccttgcggcctgagatgccgcactcccgctaactaatcatcctgttaattgccttaagagctttgatcaactcccagtaaccaaacggcaactatgtaaaagaagtgaatttgcatataaaatagagagacagtgaaaggatgcttgaaaacctcatacctgcattggatactcaagcactggtatttcctcctcctctgtgggtccaaactgacgccgagtggctgagaagcgaagagcgatggccacggccagctttaggttaaggatggccaggctcacgatggagacccggcccgaggacaggctccccagggacgctccaaagcgctgcctgacgtcctacgggagggacacagatgataagctcaagcccggctgcgcggccaccttgggcagagtggctcagaggcgaaggtgccctcgtttgttcatccaaagtagacctgtgcccacctgcccaggccccatccccagggcgcccaagacacaggacggtgcggcaggcgggtagagatgtcactgatgaaccgtggatggaatgggggtgccagggaggggacacccagctgcctggagaaggtacagtcctagcagagggaatggtatgacagcgctgggtgagggtgctcccactgtggggacttgcaaaccatctgcctggagattccaaggcccacctttaaccttggcaagaatcagatgtggcctgtactgccagagggcaggggcggagtccattacaggcagcctttccagggggtttcacggacacctcttgatccttgtgtgcctgtgaacaggcagttcctttacgtgcgtctagctggaatcttccgtccactatctcctcgcacgcatcagcggcgtcagcagaggctgttgctaaggcctgtccaggctgcggtgggcacatctaatctacagcccttgccacgtgatctgaccgtccttcctgccctgccccgtgctgccccatcgggccactcctctgaccatctaggtccttcttccaaggcagcatggtaattgtgtgtctgagcgtattaatcacactctcacataggaatcacagtctcgttgtgtttaaaaatgtatttaagccgggtgcggcggctcacgcctgtaatcccaatgctttgggaggctgaggtgggcagatcacctgaggtcaggagttcaagaccagcctggccaacatggtgaaacaccgtctctactaaaagtacgcaaattagccaggcctggcggcgggtgcctgtagtcccagctactcaggaggctgatgcaggagaatcacttgaacccgggaggcagaggagaggttgcagtgagctgagatcgtgctgttgcactgcagcctgggtgacagagcaacactccacctcaaaaaatatatataaatatatatttaaagtgattttcctttaagggtataaaatatgattccactgtcttcatgcattcactgtcatgtttgagaaatctgaagttcaagtgttttttattccactggagtcagatctggaagattctagaattttctcttagaaattcctcaatttctctaccgtgtgtctgggtacgtgcataggtgcttccttacttttcctctttggtcctccaagagtcccttcaaccaaaagccttcttcccctctcatttagagacatttctctcctttatttctctaaacttcatttctttctttccttctcttttgagacagggtctcgctctgttgcccacgctggagtgcagtgatgcaatcatagctcactgcagcctgacttcctgggctctagtgatcctcccacctcccaccaagtaacggaccacaggcacacgctaccatgcccggctaatttttgcatttttagtagagacggggttttgccatattgcccaggctggtctggaactcctgggctcaagcgatctgcccactttggcctcccacagtgctagggttacgggcgtgagccactgcacccagccttcattttctttaatcctctccttctgccttctagaggacaagcttccaatccctaattcatcctcctgagatagttatcccaaatgctgtgcctgttcttccaatcatttatttttaattgatgttggattaacatctccgtttgtgagcagctcctggtctcgtgttgctgttcccactctgcgcaccctgtgtgtctctgggcatccccatcatgctccttttccatccgtgcttcctgatgtcagatgctgcatgctgctggggactgttattccaagggtgcatgctcggggtggcccacctgctgtgagctcatgattcctgagggtcatcagctatgacctgggccatcgctccccaggaccacggtctctcttctgctctccgtgaacttaagccaggcgtgagttctggacaccggggaactctgtttgtcgtccccctttgtggacagttcgccaggagacccgtctccttcaaatcctcagggaagcatcactggaagcgagcagtcctctaatcgcagcccccgatggggagtgggcattgtaaggcccggactcaccccctggacaccagcacctggtgctgtggctgccccaagagtccccttctagcgggagcaccagaacccgagccaggagaagtatgccccagcgacacctggcctacgtggaggggtctcctttccaggtgcagggaggagcacagagccaggccctgcagaggaaggcacctgggaagcacggcacacgaacggccccccatgcctgtaccttaaaggggctgacataggtgccctcgggggtgacgtctcccatccggttcagaaggctctggcgaggaactctgaccttgtggaacatggcgaaactgtggggaagcagcagggcttctgttaaacaggggtcctgccctgaggctcttctcttctccaagggcagcctaaaagctgatgcaatccccgaggacaaagaaaatggcagagggcaagtagacaggaacattcaaccaactttctattcaaaaaagtagtctagtcaggaacagtggctcacgcccagaatcccaactctttggaagactgaggcaggaggattgcttgagcccaggagtttgagaccagcctgggcaacacagtgagaccctgtttctaaaaaagaaaaaaatgtaggttaaaaaataggctgggtgtggtggcttacgcctgtaatcccagcactttgggaggccgaggtgggtggatcacctcaggtcaggagttcgaaaccagcctgaccaatatggtgaaaccccgtctctactaaaaatacaaaaaaaaattagccaggagtggtggcatgtgcctgtagtcccagctactcaggaggctgagacaggagaattgtttgaacccgggcggcggaagttgcagtgagccaagatcacgccactgcactccagccttggtgacagagcaagactccacctcaataataataataataataataataataataataaaagcattgtgtatatggtaagttgtactccaagtacagaactccagatattcaacagaaaagacgggaactgtgtttccaaagattggaatctctgattctcatatttcaatcttaaaccagaacccacagtgtaataatattggcaaaatgaggtttaaaactcttcagtcaaacaaaataactggtgtgatggcattggtgctccctcggcaaggaaattcacttcttttgaacagctgagcataggattacacacacattgttatggatcatgatgtattaataaccaaagatacctgttatggttgtctggtcaggaaaacctattacacaacagtctagggaataaggctatgctaggttaagaatattacataaactgtgcaaaaaccccccaaaacaaacttcaaaatatcaatagttcctatagcaacttgtctgattcctaagttcacttgcaatgccttagggcagcagtccgcaacctttttggcaccagggaccggttttatggaagacaatttttccacgaatgagggggaggtgggagtggtttcgggatgattcaagcacattatatttattgtgcactttatttctattattattacatggtaacacataatgaaatgattatacaattagccataatgcaaaattgcaaaatcagtgggagcctgagcttgttttcctgcaactagatggtcccatctgggggtgatgggaggcagtgacagatcatcaggtattagattctcataaggagcgctcgccttagatccctcacatgcgcagttcacagtaggattcacgctcctataagaatctaatgccgccaccgatctgacaggaggcggagctcaggcagtcatgtgagcaatggggagtggctataaacacagaggaagctttgctggctcacccgatgctcacctcctgctgggtggcctagttcctaacaggccacagactagtaccacggggttggggacccctgcctacagaatagtcttttactaaaccacagaagactcatctataaagaataatctcacatgctggaagggaaccagaggcacccgtttcctgcgtgggctcttccttgagtcctgctcaggatgcccccacacccccattgtcacccggtcctgggctgccagctctgctgtgctggcccgattcactttctcccctccatccccacctaggacccagcacctccatccctactcagctctcctgggctgatttcctgcagcaaccatattggctctttcctaactctgcctcttcagcccatcctccctgtgggagctgggccgtttcccaaaggccttcggaatggcggaggccaatgtggaggatccccccaagctgacctccatctgcccctctaattgcatcgccaccttgccatgaggtggtcccacctgcctgtggtgccccatctgcccctctaacagcatcaccgccttgccatgaggtggtcctgcctgcctgtggtgccccgtccaccaggttctctcctggcctcatgccctccatgcagtcactgttgacaccaggcagccctcggcccacctgggaattctatgccccaccctgggaagggtatgaggcggaccccagggtgggatccctcaaccatcaacgttcctggttcctgggtgagctagctgcctctcagcagtctcccggggctcacccccctccatgagggggccaccgtgcatggggcctgccagacttaagggacgggcacgtaagtggcatggtatgaacaagtcaggtggggcagacgacatcctctgaggcacaagggccaggccatgatcctgactcccaggacagcctgagggaaagacacagcgacagtttccacactaccaggaggagcaaggccctggggccgggtggggacggggctggagctccttagggaaacctgggtgacctggtgagggaagagctctcggctgctttgccaggcccctgcccacctgcaggaagtgaagggcagcgggggggccagctcctccaaagccctaggcccagctgcccagtttggtagcagcttcccccatgccacagccgcacactcagaacaccccacctcgtgagaaaaaccttgcctcggtgccaatggccccagcgtgctccagcctgttacttgaaagccaaggaatgccttttccagtatgatccggtcacagtcagcgccctttttaaggagtggaaattattcccccattctcaccacacagaatatatttatacttgcaaaaacattcccgtgagtttcaaaggaaagcaaacttccacgaattctcaggggatcccttctgttccacaaaagctattacagtggtggtcacatgtggccaactcaaatacaagccagatccagtgtctccagcgggagacgtgtgcgtgtgtcacaggtgtgtgtgtgcacagcacaggagttgtgtgtgtgtgtcactggacatgcacgtggcacgggaggcctgagtgtggcacagaaaccctcactccaatcccagaagcgcccagacctcagcacacaccccgcgccctggacatcctgcttcttattgcagcagcttccttcctcctttggggcctggaagggccccccaagcccagcccagccaagccgccagagcaggccgttgagttcggcagccatcctcccagccaccgcctcagctcagggcaaacgcacgaagaaagacccttaaggtgcagcccaccttaagagtctggctgaaactatcacttgagaagatctttatgattttgcttttagagctatttggctaaaattaatccacacaatttacgtttaccttggatttgtaggcagtcatcccacatactcaggagttcttgtaaagtgacaaaatctaacctacaaattgtaaccacttttttcaagataaatgatttcaacattggtaacaaaaatcactaaattataatgctgatcttggaaaagacagacatccaggcagaaactggctgggaaacccggagggaacactggtatcactgcgccccctgctgggtgccctgcccagaccctccagccctggatgggaaatgtgcatttctggaaaggggcggagagcaggccgcctgcatcaccccggctggctcccatcccagcccaacctaggccttcaaaggctcagggatcaaagatggacgaatcccactgcatccctgtcaccctgcagagagacacggtggaaaggctctgggggctcagtgacctggcttggtggagcagctctgaaccagcgtcaaagggcggtcgttattgtgttagtggcgatcctataggagaccgtatttctgagtcttacaagaggctttaccatatcagtgtgatgtattaatcattaatggtttgatctaatgctcctttgaatattatcccagtaagaggtgtggattcaatctctagaaatacgtttattaggggggaaccaagtgcagggtttctctgcaatgtcccaaaataatgtcaaagcctctcattcatgaaactgaatgagcagtgaagaagagccttgctcacacccgaggccacccactggatgtgacaattcaccaccgccatatgcccgggtggagatgcctgtcgggccttacgtgcacacataggacacttcagtagatgggtaacagtgcctgtggctgcagagccctgaaagggatcagccgggtctaataaaaggatgcagattctccagaacaacacagtgcttcctacaccccatttcctgcacagcgcttcagagcttctcaccctgaggccagagccatccttctcaaacagaccaagccgcattacatcctccagatggctggggcttcccgctgccctgagggcgaagggcctgaacagcgaccctccatacctgctacacgggcaccgtccatgccaagcgcctcccaggcaccctgcgaaagtagtcattcaagagaactgacagccgcaggtcggggtggcgctctcctccctgccagctccaacattaactagcaggttccttgtattattttagtataagccagtgagaacccagaactctgcaggacaggtggagttaggagggctgtgcatatgtgtcttgttttgctttttttttttttttttgcctgaaatcacaagaatttgctttttaacaatgtccttttactttcttctcaagttgacactgtataaaaatcaatcaagattttcctctttagtacagtctggggccctgcctgttttaaagggccaagcagagatttaagacactccctgcccatcaccctgacttctcagaagagacaggcagaaggaggtttctccatcgctgagcgctcagatgcccactggcccatcttctccctctggagacaacctggtcatgataaccagttatttccaactcctgtaaggcaggctcctctcctctccaccagcctcgctatgaaacactatatgaaacacgcatatctagaaacactcctgagacatctttcaggctatcaggctcaggcatggtcataccttgtcccactacccccaagttataaatcatctcgtgggcacagaggggtctacaccctgctggatcaggctctcgggggagacagcgtgtggagtccagcattcgcagtgagggaggcaccaaatgggccagtggccaggaagttcaagcccggcctgctcaggcagggcctggcagggccctggcacagggacctctcttgtcacctactttacagatgaggaaatgccaagaaagctggtcaaggtgacacaaagggccggctgcacatctgtctcattccaaaagtcatgctgctaatgacctggagctccaaaatccaatccctcaaagaccctcaaggcccttgcggcctggcctccctaccccgcctgcatcccagcacaggcctgggcctgacacttcccactgcttcctccacctgaaacgctgcacattccaaaatcactggccacttctccccggccacccaggcctccatgtggccatcaagcattcattagtctttctaggcccctcccctctgcacgccccatccaacccttcagccaggccttggccacaccaacccggtgtcacatgtgtgctgctaaatagatatatgtgggctgattaaacaaataagccagcggaattctctttctaagtgctgtgacactgggattacccggaaaggagcaagcctactctggaggcagaaactgcagatatgggtccctcgagatcagcatggatgtgtgcagaggccgagccgggggaggctcaggatgctgaggaggacctcacacagaggaggcagccccccaggcaggggccccaccagttgtacacagaggtctgggtctgatctgagagtgtggagccgcctgccaaggtgaagctggtttgctgaggtctctgatcaagttggcctcccaaagtggagttcaagcaggacgtggccagtgcatgcacgggggctaggcgtaggtccccaccgcatttgagtctaagagggcagggcatggcatccatggggccagtgagatctcagacatgagcgacaacgcagcctgggccttggcaggaagctcagggctcagcagcctctgtcactcacccattatccagaccgttctgcccgagtttttttcctatgtcgccaaccatcactccaggcatgggaagaagggtcttcgggtcccggatctatacaaagccacagaaagcagcaaacagcaactgttacaatcacacaaaaatcaaaacaaatgtgttcagaaacccacagggtgggccatgggctcaacgctgggcggctgtgggttaaaccatcctccagaaatgatacatccaagtcctaaccccaggacctgggaatggaagcttatttggaaatagggtcctgcagatataatgaatttaagagcatcaagataaggtcatcccaaatcacccaggtgggccctaaatcccacggcaagtgtcctatgagaatcagaagaggagtgggtgtggggaagagggggccatgtggagacggaggcacagagtacagcgctggggctgtagggatcagccccacagggtcagtgggtttctccccgtgtgtggagacaagagagcatagagataaagacacaagacaaagagataaaagaaaagacggctgggtccgggggaccactaccaccaagacacggagaccggtagtggccccgaaggccaggctgcactgatacttattggatacaagacaaaggcaggataaggagagtgagccatctccaatgataggtaagaccacatgggtcacatgtccactggacagggggcccttccctgcctggcagctgaggcagagagagagagaggagacagagagaaagacagcttacgccattatttctgcttattagagacttttagtactttcactaatttgctactgctatctagaaggcagagccaggtgtacaggatggaacatgaaggtggactaggagcgtgaccactgaagcacggcatcacagggagacggttagtcctccggataactgcgggcaagcctgacaaatgtcaggccctctacaagaggtggaggagtagagtcttctctaaactcccccagggaaagggagactccctttcccagtctgctaagtagcaggtgtttttccttgacacttatgctaccgctagaccacggtctgcttggcaacgggcgtcttcccagatgctggcatcactgctagaccaaggagccctctggtggccctgtctgggcataacagaaggctcgtactcttgtcttctggtcactcctcactatgtcccctcagctcctatctctgtatggcctggtttttcctaggttatgattatagagcgaggattattataatattgggataaagagtaattgctacaaactaatgattattgatattcatatataatcatatctaagatctatatctggtattcttattttatattttattacactggaacagctcgtgtcctcagtctcttgcctcggcacctgggtggcttgccgcccacatggggccacaggcctggggccaccaggagctgaaagagataggaaggatcctcccctagagcctttaaagggaatgccgccctaaagattcctcaatttcagaccccggcctccagagttgggagaatacgttatgctgtttcgagcgccctgctttgtggtgctttgctgtggcagccatgagagactaacacgggggccggtgctgccgggaggacgtcgggaatttcatattcacgttttagacacaggactccctgctagattttagtaaagtgacaaaatggctgtgcaaataggtgtagtgggagaaacggctatgaatattctggtcaatcaccgctccccaagatacaggtccagccagctaatggctgcgcactgtgggaactcgacggaaggacgtggagcttcatccttgggcactgttacagcagggattcccaaccatgagacgtgccaccttccccttccccaccaggggacacgggtggtgtctggagagattctggttgtgttaactgcaggaagctatggcacagaatggccagacgccagaagtgctcagcccagccctgggcatacagggcgccccagtgagtactacccagcccaaactgtcaacagtgccaaagtggaaaagctgctttagagacacatggaggtggtgctacggggaatttagctatgtgcatgacctgctagctggcttctgtttatgtctgtcaattcaccatctaacttcactgaactttaaaataaagaaacactcaaaaagggctaaaacccaaatgtaaacatcctctccttttctaaaatctttcagcaaggcccagtaaagattcagacactgtctcacaaaaaaaaaaaaaagaaaaaaagaaagaaacctgcaaaagatgcctgcccctccgcccaccagctcaggtctggggcgcagatcacaatcctgtccaaataaccccaagaccactgtttccatccctccttatcaggcaggaggccgtggctctgggaggtggactcaggtgccctgagcacttggtgcagtggcgagaggggcgacacaatcctgcggagtgtttttagcacaacataaacaagtctaaaacactgcggctctatgtccccaaaatcagacacgccgaaagctgctgaattctagtccaggcaactcccgcaagaagtccactccaggtagaaatctataatcacagaaacaaggcacactggcctcaggtaactatgatgctgtgataaatacatatttggccttgtccctgcttcccagcacacgactcctaaaaccctggactctctgcagtggtgacagtcttttgtgtgctcatgagatggttgcagacccctaaatagcttcaggatgaagaccaaggtacaattaggggattgatcagaggcacaggccacaacctggacttgccattggcatccaaagggttggggagcttcttgtgggactgagccctcactggggggggggggtggggggggggtgggggcggtctgaggctcaccccaggtgaacagcatcagtatggagttaaattagaggacgcccagctgctttctgctgcagagctgcctgctggtggggagaaacccacacacatctaatgtcagaagcgttgtgatggctgcatgacagtaggaaaaacactttggttttgtcctgtaaccttacaatgaaaaaaatctctctggtctgcaacagctcaaacgtcaggtcaactgaaaaataagaacatgagcaacaaaagaaaaaaacgtaaaactggacttcatcgaaattgaaaaactttgtgcatcaaatcaaccagatggtctcagaggcctgcagctcctgtggccaggagccttggccaggccctctcagctgtgtcactgggggacattgggctggatgtttctttctaaggcaagggtggggctgtctgtgcactgtgggcagggctgtctgcaccgtgggaggggctgcgggatacactgtgggtggggctgcctatgcaccctggaaggggctgtgggatataccataggcggggctgtctgcactgtgggcaggactgtctgcactgtgggtggagctgtctgtgcactgcgggtgggcctgtaggatacactgtggggagggctgtgggatacactttgggcgggcctgtctgtgcactgtgggcagggctatctgtactgtgggtggggctgtctgtgcactgtgggcagggctgtctgtgcactgtgggcaggactgtctgcactgtgggcagagctgtctgtgtgctgcgggtagggctgtaggatacaccgtgggcggggctgtgggatacactttgggcaggcctgtctgtgcaccgtgggcagggctatctgtactgtgggtggagctgtctgtgcactgtgggcaggactgtctgcactgtgggcagagctgtctgtgcgctgctggtggggctgtaggatacactgtgggcggggctgtaggaatacactgtgggcggagctgtctgtgcactgtgggcgcggctgtctgtgcactgtgggcagggttgtgggatgcactgtggacggggctatctgcattgtgggcagggctgtggaatgcactgtgggcggggctgtttgcactgtgggcggggctatgggatgcactggggtcctgggcagtgtccctggtccactcaccagatgccagaagcatgccccacccttgttatgacaaaaatgactccagacattaccagtgcttcctgggggtaaacactgcccccactgagggccaccccagcgtcctacctgcacgataaagggatgcagcccatggcactggtcccctggcacacacagcttagcaaacaccaccgcgtgagtggctgtcttgcccatgttgccaacccaaaacttggcagcttcgaaatcaggggaatgtatgatgaattcctgcacaagggaaaatttaggttagttataattagcaactaaagcacatgcagaattggtgttttccttttagacagattccattttctacgttcaaaatctctgaggcaagagttgaaactaatcgcacattttagttcttgtatggcacaggcaggcctattttttaaacacagcctattcctgggccttatgacttaaagaaccttcagatgcaaaatactccgcaggctggcaaacgcttccagggagttttcattatcatatagtcttcagtccctaaccacgccccttaggtagaaacactgtggatacactgtgggcggagctgtctgtgcactgtgggcggggctgtctgtgccctgtgggcagggctgtgggaatgccgtgcagtccactcagttctttaggacctctaattcacaacacactgctgcccccttgctgtctctcccatccacagctccgtgattgacagttatatcccaaatgccccgagcacaaggcagccgctcagaacatcagaaggaaggaaggaaggaacgcatgcgtgaactagcagatgggctgtggcatcacagcgttcggtgtttggctagaaggggtgtggacagatccccaaggaacactgagggtgctgcatgggtcagaagcgaagagcacgtgggaacaggcaggagctgggccgctggggctgggcctgccccaggggcgtctgctgggagcccttcgagtaaggctgggagggaggatgcggaccagcagtgctgcataatgtggccgggatccgcaaggggacaaagatgagcgccttcaggcagacagcccgcaggtggcccacagagctgccctgggccgcctcgggagacactgatcctccacgcggagcttgccagtcactgctaggggctgtcgtggctaagttttggttctggttccagcccctgcagggtgggaggctacaaaataacgtgccggggagggcttcctcctgtctaaccagtgggattctgtaaacagagtagtgaacaatcatcctatagatcctgaagtttcactgaggagaagtaggaggtggggtggctgccagccatgccttctgttctcttctctcaggggaccaccagctcttcgcctgcgagggtaaggagggctcccagtctcagccaggccctccccattcattcttcagcacgcggcagttctgatacctccacctgtcactcattctccgcagtgcaggtgtgcactgcaacaccggcccaagccggctcctcggggcctgcactgctccacacagatctttcccactgtctcgactgtctggctgcctccctgcgccccggcataccagctttgctctctggagggcctccatggtgcccagcacatctcacttctttctgttggtgtctgtgtctccccccagcccacaacttcaggacagcagagacctgtctgctgtgctcgccacttccagcccagtcttggaaagctgtgcctcacacacaacaggtacccagcaatgcctgctgtccaaataaatgctcagccagcagcccagcctggatcctgggcaccccaactctacggatctgatgccacactctgacctccacttagggatcaaatgccaaaaagaaggaggtggaaatgggaagtggtcctctgatgccccaccccaaggctacctgggtgctgttgtccatctgcctgtcagaaagggccccacctcctggcactgcaggccacaggcaaagaggacagcaggaggagaagcagccatggggccagaaagacctgggttcagataaagatatcttatggcttaaaagaaaattctgaaaagaacctcatgccctactttctcctagccccactctgagaaggagccttggccccactcccaaggccccacagcaggggcaccctgtgcgaggaccacctcttatccctgctgggctacgggtccgcttgagttcattcctgggctcttccatgcagtaccccaggcacagtccacacagcccaggctgtggaatgaatggatggatgaaagaatgaatggatggatggaagaatgaatggatggatggaagaatgaatggatggatggaagaatgaatggatggatgagagaatgaatggatggatggaaggatgaatggatggatggaagaatgaatggacagatggaagaatgaatggatggatgaaagaatgatggatggatgactggttgagcacatccgcaggtgcagagcttcacttcctgccacacaacagtcctccctgaccactgccaatgggggagggtggaaggcgggtgaggaaagactggcagggagacctaggcctcagggacaagcggaggccaaggagagtcatgtggtggcagggaggcagggccagggaacagaacagggtgggtgaggaccctccccatcctccctcgctgccctgcgcccctccacagcactgatagccctagggcatccatctgtggcccatctccctccacccctgtgcccctccacagcactgagagccccagggcatccatctgtggcccatctccctccaacccgcacccctccacagcactgacagccccagggcatccatctgtggcctgtctcactgcacccctgcacccctccacagcactgacagccccagggcatccatctgtggcctatctccctccaccccgcacccctcctcagcactgacagccccagggcatccatctgtggcccatctcactgcacccctgcgcccctccacagcactgacagccccacggcatccatctgtggcccatctccctccacccctgcacccctccatagtactgacagccccagggcatccatctgtggcccatctccctccaccccgcacccctccacagcactgacagccccagggcatccgtgtcccgtctcactgcacccctgcgcccctccacagcaccgacagccccagggcatccatctgtggcccatctccctccacccctgtgcccctccacagcactgacagccccagggcatccatctgtggcccgtctcactgaacccctgcgcccctccacagcactgacagccccagggcatccatctgtggcccatctccctccaccccgcaaccctccatgcacccctccatgcactgacagccccagggcatccatctgtgtcccgtctcactgcacctctgcgcccctccacagcactgacagccccaaggcatccatctgtggcccatctccctccacccctccacccctccacagcactgacagccccagggcatccatctgtggcccgtctcactgcaccccgtgcccctccacagcactgacagccccagggcatccatctgtggcccgtctcactgcaccacaccagaactcccaggcagcagccacaatgcaggtaccagagaggtcaagaggatggcaaggacccgaggagtcagactgcggtggcggaaatggacaaggcaggctcttcgcagagggacagccacaaagggcagagggcagggagcatgttgtctccatggggcccaccgtagaaaccacgggccatgagaacggtttatgaatccactacgcataggcagccaggtaaacaaggcaataaattttacagaatgagggcttcttcactgcactcaaattacacacaaatccaaaccacgatcaattccccataaagttcatggtgggcacaggctttgtcctccaatgcctgatctcctgggccccacttttcagtgtgatgaatctcagtgggtatttctacacaagtgtatgtggacaggcctcttgctttaatgttttttttttcttattctgggcaacggcatttgcactcatgacgtctcatatgctccaaactcagggacccgggggaaggtaatacctacctcagtggcaggatcgtagtgggcagttgtgcgaatggccttggtattactgccgtggcttaattcggtcagagcaaaacatccaaaaatctaaatgtcaaagcacaaaatgatggaaagcaagaaaagttctttgtgcacattcccagaaggacctcactgccatctttcctttaaagatgaaaccacatatcaaagccccaaatttccatctacccaactagtgacttgactgagtcatgctgccacactcagctggcaaccacagcagcctaaaccaagctgaccgcagctgctccacgtcagcaaggtggcaggaactgctcatcaggaaaagacagtggaaggcctcagtgacaattcacctggtgctaggaagtcaatgtgcctgtgtttgctaaagaacagtgctagctatttggtgagaagcctgagaacactaggaaacaagaagagcataagccccctgggcacccccttctacaatcttctcttttcacaaatctctacagagatcaagcaagagaaccaggctcacaatttaccatgaaccagaacttacctccatcctgaagatcttttgaatatatgtgagatgtctttcagaaccagaactgtaaactgctgatccaaaaacctgaaagtataacatcgtcctatcaacagggggcaggtaagaagagtactgctcttccggaacatcacaacagacaacggcactcaacaccatgcccacgctggttccctgccacactgcactttccccaaggtggagaacaagtgctgagaggttagccagcagcctggatgcccaaggccagggtctcctgacacacagctgccccgggtccctgagttcatgtgagtggtaagacctacatctctgtgccgagcaccttgtataaggcacacagaaatcacctgggaattaagatgcctgcaaggagtcctgggggtctgaggacagcagggagagctgtaaggagagcagagcccaccagcccatcaaacaatgcaggcaaggctaagggcaaagccattttgcccaagctcagctctgctggtatgttacaaaggaaggaaaaacacaggtttctccctttggcctactttttaaatttttttattttttttttaatcatttgtctctttttttgtatgaggtaaaaaaaaaaaaagtcccaacagctcctcttctgatgggacttgaagcttcaccacattgtattttattcaaggacttatgggtgcaaatttacaaatacatgatggtggatgggcttgaaaataaaaaaatgaaaagggggactgaaatttttttaaaaacattaaaaaaaagataatttttaaaatttgcaaatatagctggacaaactggtgtttctctgcctcttggttggccctgggacaggcatccctcaaggctcagcgcagcatgaaagccgtttccctctcccctaggccgcatgctcaccaagctatggaggaggtacttggcagccagagaagagtcatacatgcccaggcactgaatcaaggcggggaccttcagagggctcttgaacatgtcttcgacactgaggaagtcatactcgaagatccgcttgcatcgaaggaagttcagctcgcgatacttctccaaggacagatcggctccaggggaacgagcgaaaagagggtcattctcaagagctgagaagatggttttctggaaatgcaggagatgggtaaggcttatttggagtaaaagatggactctccatgtgcccttatatagttgacctccaggccacaggcttcatgggacacagtctgacccggagacacccagacagagatatgactatcattcccaatggactagaggactggaggcttaagaaacatcaacaatccgtgttcatttccagactcctcatcaattccctgaggcctgtcctggggtgcagagaggagagaggccgcgctgcctgggatgagcctcgcccggcagaggaggagctgtgagagccagaaatcccattctgctaacgaactaagaccccactgggaaaaaagacaagctgcgcacaaccgcacgcctcaccttaaagcggagcatgccctccccttccgtgaacagcgccagctccttccagctgaaggacgctcttgctcggtaggcatcgaggggccccctggggaattctgggagcagagctgtgtcgcctccttccacagtggatgccatcgcgtgataagagcctgcacaaaacatgcaacctgaatccatgctctcccatctatgggttcaaactacccccaccaacaggagagcccgcaacaccttacaaatcagagaaaagtaaacttgaaatccaaaaggatggcaaaagagaatcactctgtgaatggctagcatcattttcccagaagaaaaggcgagaagaattccctcgtccactcctgaacacagatgccaaggacacagaagagagccaggcacagcctgggggtcaccaggcacacagggcagagggtttgtcagagtcttgttttctgtcacacagccttgcctgagagtaccctgccctcttgggagcaccccggacatccagactcatccccaaggctcactaaacccagggtcaggaagcattccctctggaatccagccagtgccagctggtccactctggccacacacaatggtacctcacgtctccacccaccgccggtccacctggacacagggcctccagcacagaacctctgatcacaggcttctgcactggcttctcctcgacatatagacacctggcttcccgctaacacagcaggcctcccaaaactcagctctcttgaccaaataaccattctggaattttctggatagactgggtccttttccaagtggcttggctgatgaaggcattgaagggaatggctggtgaacccaagtctgtctgagtcctgggcgtgggccgcccaccttcactgtttaaggcctagaggaaagaggaacttttgagtcctttgagctgaaacagcctgcggtgctggagcctgagtctggccgctcaggatgctgactcccctctgtgcagggaggtgggagccgcaggtctgagcacctgttggtgggcggcggcaggaatcctgccttctatagtcttatcttatttcaccctccaacagctgtgagccaagtactactgccccccatgaaagatggagaaacggaagctcagagaggctgtgtttcccaaaccccctccgctgagaagtggggagaagggctccaagcccagcaatgtctaacctcagagtcatgcctttcaagtaccaccttaagacactggaaaagaaacacaaagtaaacttaaattatttccttccttcttaaagcagaaggaagaaaataataaaagatagagcaactgtgaatgaaacagagaacagaaaaatagagaaaaatcaataaacgatcaagttggttccttgcaaagactgacacaattggcaaactttcagctagactggccaaataaaaaggagaaaacacaaattcctcatcaggaatcaaagacgggacatcaccactgaccctaaagaaataaaaaggattataagggaatattgtgaaccatggtatgccaacaaatgatatgaagtggtcatattcctgggaagacacagctaacaaaactgccttatgaaaaactgaaaatctgaacagatctataatgactgaagagattgaattagcaatcaataaactgtccacgaagaaaaaccaggggttccattgtgaattctgccaaacatttaaagaagatcaattattcaagctcttcccaaaaacagaagagaagataatacttcccaactcattctatgaggccagtattactttgacaccaaaaccagacaaagacatcacaagagaactagaaataaacatctcttgtaatacagatgcaaaaatcctgaatgaaattttataaactgaatccagcaacatataaaaaagattatatgtgccaggcatggtggcacatggctgtaatcccagctactcaggaggctgaggcaggagaatcgcttgaacctgggagacagaagttgcagtgaaccaagattgcaccactgcattccagcctgggtgacagagcgagactccatctcaaaaaaaaaaaaaaaaaaaaattcttaagactcaataataaaatgacaaaaaaccaattaaaaaatgggcaaagggttcaaatagacatttctccaaagacagacaaatggccaaaaaatacaggaaaggccaggcacgctcacacctgtaatccctttgggaggccgagacgggcggatcacctgaggtcaggagtttgagaccagcctggccaacacggtgaaaccccatcgctactgaaaatacaaaaattagctgggcatggtggcgcatgcttgtaatcccagatgctcaggaggctgaggcaggagaatcggttgaaccgggaggcagaggctgcagtgagctgagattgtgccattgcactctagcctgggcaacaagaatgaaactcggtctcaaagaaaacaaaacaaacaaacaacaacaacaacaaaaacacagaaaaatatggtcaacatcattagccaccaggaaaatgcaaaccaaaaacccaatgagagaccacttcacatccactaggatggcaatgagcaaaaagatactaaaatactaaatgccggctatagtggcacgtgcctgtggtcccagctactctggggaggctaaggcaggaggacagcttgagcccaggagtttgagaccagcctgggtgatacagcaagaccttatctcttaaagaaccagataaataggccaggcgcagtggctcatgcctgtaatcccagcactttgggaggcccagacaggtggatcatgaggtcaggaattcaagaccagcctggccaacatggtgaaacctcatctctactaaaaatacaaaaaaattagccgggcatggtggcaggtgcctatagtcccagctacttgggaggctgaggcagagaattacttaaacccgggaggcagagattgcagtagcctagattgcgccactgcactccagcctgggtgacagagtgaaactctgtctcaaaaaaaaaaagaaaaaaagaaaaaagaaacagaaaaataatcacaagtattgagaggatgtggagaaatcagactctcatgcccttccagtgaaaatgtaaagtgacccagccattctggagaacagtgtggcagttccacaagtgattaaacatggagtgaccacatgactcagcaattccactctgaggtatgtacgcaagagaaccgaaaacatcacgtcctcaatgtgtgcaaggctccccgattcacacctccagactcgtgagctcatttggcagtcaacggcaattccccacctctcatgttctggagatgcccatactgagtgttcaacactgaattcagcctctcagccctgacccagcttcgcctcctgcaccccagttccacactgccagtcacccaaggattactggaattacaaaccccagtgtcatgttggaattcccctctccatgcgccataacctcagtacattaccaagtccacagtgcatctctaacaccttacggaatcttctcatttctctccagcctgataaaaccctcataacaacctccagttactgagctggtgctgtgtgcaggtgactgtgttaagcagctacatagacctcaactgtgcccaccaagcccaagtactatcagtagtctccttttccaggtgaggaaactggagcttcttagagacattgaccatggtcatacaactattatcaagcacagctggctccaaatccccagatcctaacaagtacctatgggcccatgccacttgaagtcaccaaccttactgcattatggtacaactgttagagataaggattgtgaagccagactgtctgggttcaaatctcaatgttacagctttctagctgggtgaccttcctaagatctgtgcaccttgggggtgataatacagtgatgctgagagacaggactagctggatttccaaggctgactaagaattcctaagcctagctggggaaggtgaccacacccacctttaaacatggggcttgtaactcagctcacaccagaccaatcaggtagtaaagagagctcactaaaataccaattaggctaaaaacaggaggtaaagaaataattaaatcacctatcccctgagagcacagggggaggcacaatgatcaggatataaacccaggcattcgagccagatcaggcaacgccctttgggtacccccccgttgaatgggagctctgttttcactctattaaatcttgcaactgcacactcttctggtccatgtttgttccagctcgagctgagctatcacttgctgtccaccactgctgatcatcgccatcgcagacccaccactgacttccacccctccggatccagcagggtgtccactgagcttctgatccagtgaggcacccattgctgctcccaatcgggctagaggctcaccattgttcctgcatggctaagtgcctgggttcgtcctaattgagctgaacactagtccctgggttccacagttctcttccatgacccacggcttctaatagagctataacactcaccgcatggcccaaggttccattccttggaatccgtgaggccaagaaccccaggtcagagagcaagaggtttgctgccattttggaagcggcccaccaccatcttgggagctctgggagcaaacactcatcggtaacatttgctgggctcgtatggggattctccaaagcggtgagtaatattgaaccactttcacttgctattctgtcctacccttccttagaattggaggaaaatactgggcacctgttggctggttaaaaatgattaatgtggccaccggacttaagactcaggtgtgaggctttctgggaaaaggctttctaacaatccccaacccttttgggttgggagcattggtctgcctggaaccagcttccacttttacagttttcttggggaagcagagggctgactagaggcagaaagctgtcgtcccaaattcccggcattggccggtcaagatcatggcgcagccagaagtctctactcaacagttgcccatgcgtgcacccctatctctccttctggcccatacctcctgggtcctaaccatgactttcttgaaagtgtagccccaaaattctccttacctctgaatctacttcctctgatccctgcctcctaggtactaatgcttcagactcacttcctctcccaagtattagagcaagttgtatctccaaagggatctaaggaagctctacgctgtgtccttaagcacctagggtatgaacccagggagtcttgtccctggtgtccctcccaatttagatatacagctctcgacatgggaagttatgtgggacctaccacccttgccagggccccaagtttgtaaatggctaggaggattgctctcccattgtgtaagatgctctcctcccccaatttctacccagcttacctcccccactgcaatacaatctctaagcctagactccttggccagggccttagaattgatgacccagtactttaacaactggaactgtgtctacgacaacagaatagatcaggaagaaagcgaattgagtaaattaaagggaggcgcatattcctatagaggcaaatgggggcaacgagcgaacattcttccgctgtgttcccaaaatccatctatcaagagagagaatgagagggaaagagaaacagagagagaaaggaaagagagagagaagagagagaaagaaagagagaggggggaagaaaggcagaaagtcaaagagaaagagagagacagtcaaagagagaaagaaagagagagatatataagtagttaagaaaaaaacagtgtaccctattcctttaaaagccagggtaaatttaaaacctataattgataattgaaggtcttctctatgaccctataacactccaataccactttgttgtcagttaaacagtgtaatgcaaacattaggaaaaaaacttcaaaagtccaccttaggcccagagcaaaacatagaaactctaatgaacttggcaacctcggtttttttcacaatagagatcaggaggagcaggcagaacaggacaaacgggccctcaggcaagcagaagttcacttcttgcccccatttgccactataggaatatgcacctccctttaatttactcaattcgctttcatcctgatctattgtgttgttgtaggcatagctccagttgttaaagtactgggtcatcagttctaaggccctggccaaggagccaaggcttggagattgtatcgcagcaggggaggtaagctgggtagaaattgggggaggagagcatcttactttggaggctctggaaaagggaaacgctgggcaaatcaaatgcctgatagggcttgcttccagtgtggtctacaaggacactttaaaaaagattgtctgaatagaaataagctgcccctcatccatgcccctcatgtcaagggaatcactggaaggcccactgccccaggggatgaaggtcctttcagtcagaagccactaaccagataagccagcagcaggactgagggtgcccggggcaagcgccagcccatgccccaggtatgcttgaccattgggggccagaaggttaactgtctcctgaacactggcatggccttctcagtcttagtctctggtcctggacaaccgtcctccagatctgtcactacccgaggggtcctaggataggcagtcactagatacttctcccagccactaagttgtgactggggaacttcattcttttcacttgcctttctaattatgcctgaaacccccacacccttgttagggagatacattctagcaaaagcaggggccattatacacctgaacatgggagaaggaacaccgtttgctgtcccctacttgaggaaggaattaatcctgaagtctgggcaacagaaggacaatatggatgagggaagaatgcccgtcccgttcaagttaaactaaaggattccgcctcctttccccaccaaaggcagtaccctcttagacccgaggcccaacaaggactccaaaagattgttaaggacctaaaagcccaaggcctagtaaaaccatgcaatagcccctgcaatactccaattttaggagtacagaaacccaatggacagtggaggttagtgcaagatctcaggattatcaatgaggctgttgttcctctatacccagctgtacctaatcttatactcactctgctttcccaaataccagaggaagcagagtggtttacagtcctggaccttaaggatgccttttactgcatccctgtacatcctgactctcaattcttgcttgcctttgaagatcctttgaatctaatgtctcaacacacctggactgttttaccccaagggttcatggacagcccccatctatttggccaggcattagcccgagacttgagccagttctcatacttgggcactcttgtccttcggtatgcggatgatttacttttagccacccattcagaaaccttgtgccatcaagccacccaagtgctcttaaacttcatggccacctgtggctacaaggtttccagaccaaaggctcagctctgctcacagcaggttaaatacttagggctaaaattatccagacacaccagggccctcagtgaggaatgcatccagcctatactggcttatccttatcccaaaaccataaagcaattaagagggttccttggcataacaggcttctgccgaatatggattcccaggtacagtgaaatagccaggccattatacacactaattaaggaaactcagaaagtgaatacccatttagtaagaaggacacctgaagcagaagtggctttccaggccctaaagaaggccctaatccaagccctagtgttaagcttgccaaaggggcaagacttttctttatgtgtcacagaaaaaacaggaatagctctaggattccttacacaggtccgagggaccaggttgcaacccatggcatacctgagtaaggaaactgatgtagtggcaaagggttggcctcattgtttatgggtaatggcagcagtagcagtcttagtatctgaagcagttaaaatgatacagggaagagatcttactgtgtggatgtctcatgatgtggacggcatactcactgctaaaggagacttacggctgtcagacaaccgtttgcttaaatatcaggctctattacttgaagggccagtgctgcgactgcgcactcgtgcaactcttaatccagccacatttcttccagacaatgaagaaaagataaaacataactgtcaacaggtgattgctcaaacctacgccgctcgaggggaccttctagaggtttccttgactgatcccgacctcaacttgtatactgacggaagttcctttgtagaaaaacgacttcgaaaagcagggtatgcagtggtcagtgataatggaatacttgaaagtaatcccctcactccaggaactagcgctcagctggcagaactaatagccctcactcaggcactaaaattaggagaaggaaaaagggtaaatatatacacagactctaagaatgcttacctagtcctccatgcccatgcagcaatatggagagaaagggaattcctaacttccgagggaacacctatcaaatctcaggaagccattaggagattacaattggctgtacagaaacctaaagaggtggcagtcttacactgccggggtgatcagaaaggaaaggaaagagaaatagaagggaaccgcgaagcagatactgaagccaaaagagccgcaaggtgggaccctccattagaaatgcttatagaaggacccctagtatggggtaatcccctgtaggaaaccaagccccagtactcaaaagaaataggatggggaacctcacgaggacatagtttcttcccctcaggatggctagccaccgaagaaggaaaaatacttttgcctgcagctaaccaattgaaattacttaaaacccttcatcagacctttcacttaggcattgatagcacctatcagacggccaaatcattattaactggatcaggacttttcaaaactatcaagcagatagtcagggcctatgaagtgtggcaaagaaataatcccctgccttatcgccaagctccttcaggagaacaaagaacaggccattacccaggagaagactggcaactagattttacccacatgcccaaatctcagggatttcagtatctactagtctggatagatactttcactggttgggaggaggcctttccttgtaggacagaaaaggccgaagacgtaataaaggcactaattcatgaaataattcccagattcggacttccctgagacttacagagtgacaatggccccgctttcaaggctgcagtaacccagcgagtatcgcagacgttacttaggcatacaatatcacttacactgcgcctggaggccacaatcctcagggaaggtcgagaaaatgaacgaaacactcaaacaacatctaaaaaagctaactcaggaaacccacctcgcatggcctgctctgttgcccatagccttattaagaatacaaaactccccccaaaaagcaggacttagcccatacgaaatgctgtatggacagcccttcctaaccaatgaccttgtgcttgaccgagagacggccaatttagttgcagacatcacctccttagccaaatatcaacaagttcttaaaacattacagggaacctgtacccgagaggagggaaaggaattccaccctggtaacatggtattagtcaagtcccttccctctaagtccccacccctagatacatactgggaaggaccctacccagtcattttatctaccctgagtgcagttaaagtgtctggagtggagtcttagacacatcaaaccctggataccgccaaaggaacccaaaaattcaggagacaacgctagctattcctgtgaacctctagaggatctgcacctgctcttcaagcgacaactgcgaggaaagtaactggaatcgtagagctccatggccccccccgtcatatttttctctttactgttgtcttacccccctttcactatcacctcaccccctccatgccgctatactaccagtagctccccttaccaagagcttctatggagaatgcggcttcccagaaatattgatgccccattgtataggagtttttctaaaggaaaccccactttcaccatccacacccatatgcccctgcacttcgggccacacatttcaatccctgtatctttaacctccttgttaagtttgtctcttccagaatcaaagctgtgaaactacaaatgttcttcaaatggagccccagatgcagtccatgactaagatctaccgtggacccctggactggcctgctagcccatgctccgatgttgatgacatcgaaggcaccactcccgaggaaatctcaactgcatgacctctactacgccccaattcagcaggaagcagttacagcggtcatcggccaacctccccaacagcacttgggttttcctgttgagagggggtactaagagacaggactagctggacttcctaggccgactaagaattcctaagcctagctggggaaggtgaccacacccacctttaaacatggggcttgtaactcagctcacaccagaccaatcaggtagtaaagagagctcactaaaataccaatgaggctaaaaacaggtggtaaagaaataatcagatcatctgtcgcctgagagcacagggggagggacaatgatcaggatataaacccaggcattcaagccgaatcgggcaaccctctttgggtcccctcccgttgcatgggagctctgttttcacgatattaaatcttgcaactgcacacttttctggtccatgtttgttccggtttgagctgagcttttgcttgccatccaccactgctgatggctgctgtcgcagacgccccgctgacttccacccccctccagatccagcagggtgtccactgcgcttctgatccagcgaggcaccggttgctgctcccgggctagagactcgccattgttcccgcacagctaagtgcctgggttcatcctaattgaggtgaacactagtcgctgggttccacagttctcttccgtgacccacagcttctaatagagctataacactcaccgcatggcccaaggttccattccttggaatccatgaggccaagaaccccaggtcagagagcaagagccttgctgccattgggaccggcctgccaccaccctgggagcaaagaccggccagtaacaatgccttgctagggcccagtgtctagacaaggtctactgtctgggctgctgcattccaaatacggcgacacctggctagtgcccagggtctactgtctaggctgctgcattccaaatatggtgatgtctgcctagtgcccagggtctactgtctgaggctactgtcatccaaatacagtgacgcctgcctagtgcccagggtctaccgtctaggcttctgtcattcacatgagacgcttggagcagtttctggcaaggaagtggggcttcaagatcactattctggcaacagctgcctccagtcttctctgcgatgtgaatcacttccctttcgtgaacagctgcctagttcaatgtgtaaagtcctccgaatgcccagcacgtgggccaccggccctcctggcccctgctctgggtaaccctggcccccccgcccgcgaatcctcacagcccccacacccccgggcctggcactttcagtgcccccgctcccgccccgtcgcgtccgcgcccctggcgctaacgcagcctccaccttcgggctccccggtcctcgctgctctgcaccgtccaactcacccagcaggcgctcaggggatgcctgtcggcccgcgaccgactcggagtactgggactagctgcccgcacagcgcagctgtctctggcctggccccactgctcccccgccacgcctctcggcctccgtccgtcccatgggcggggcggagccgcgggcgccctgacgtcatcgaaccgcgccaccctcgttgccctggaaacgcggacgccgctgccacccgggcgggctggaagccacgaagcttcgccaggcgctcccgggcactcttgccttctctgcttttaggcaaggcctggctgaccgactctggcgagtcgctgccctctcggagcgccgtagttctgagatgcagttcacaccgcggcccttcttggggcccactccaaggctactggatcaggacccccagtctggggccgggcattttcaaattaatcagcaggctctaggtggtggctcatgcctgtaatcccagcgctttcggaggccgaggcaggaggatcgcttgaggccaggagtttgagaccagcctgggcaacatagtaagacccggcatgcccaagagcttgctgaagtttgagaaccgtggttctgcagagtttctcagagagcccctagtggaagtgggccctcattgaccagagcagcaaccagctcaatcacccaccctttacttgtttttctttgtctcacactttccacttcctcactcgtgcactccgagatcagctccattttcaattacctgcacccaaagcctcgtctcaaggtctgtttggggagatccaaactaagacacacacacttcttatgaaatttacagagacagtgttgtacctgagcgagttagagaaaacgccactctttgagacgaattaagagtgcatttatttagccagcggccaagagacagctaacgcttaaagttctctcggccccgaagaagggactagattttcttttatactttggtttagaaaggggaggggagtctagttaaaacaattttacagaaataaagtaggcaaaaaagttaaaaggataaatggttacaggaaagtaaacagttccaggtgcaggggctttaagactattacaaggtgatagacgcggggctttgggcgttatcaatcagacgaattcctgggaattgcggatattgctcgccacagtatcttatcagttaattgtattcttggatgtgctgggagtcagcttgcacaagttaagtccttgaggaaggggctgccagtgaaagagcgaagatggagtctgtctggctctcttagcgaagggagagttaattcaggtggaaacaaggctaggtgattaaaggaaaagggagagtctaaaaacagggttagtaaaaacaaggttgggcattacaacagaatcaactagacttagcaatttgccatgtaaagaacaaggaagagccaggcgttgtgcgccatggttctctcatctgcagtcccaactactcgtgaggctgaggcgggagaatcacttgagcccaggagtttgagtctagcctgggcaacatagtgagactctgcattaaaaaaaaaaaagtgaaaaaagcacaaggaaaactaaatccaaaggtttgcatttatagggaactaaaagatgggcagtgcagctcagttatggggaggagaaagagaagtacaattttaaatgtgtatcaagtttaagatgttggtaggacatctgggtggggatactcaggtcatgtttggaaattctgtctacttctgttctactctgaaataccttctccttgattccatggcaacatttttcttcacagttattactgttatttaaacagacatataattatgggtatcagtgggagcgtccgattgcaaaagcagaaggaagggactgaaagatcatttcgggcctggcaggtaccctgctaagcagtcggaagtgatccttagtctagactagccttcccagccaggggtctattgtgtttttgcaaaggtccctgaatccccaggagcaacaaggattgcctgaagacaaagcaatcatggtctaataaaaaatacacaccactgtttttcaaatgtttggagatactgttgagagtaataaaataaccatttattgcagaactcacacctcctttaggtcacaatttctgccaaaattacaactactaatcaattgggttcacatgtgttactgacattagaaaaacatctttcggctgggtgtggtggctcacacctataatcttagcactttgggaggtcgaggtgggcagatcacttgaggtcaggagtttgagaccagcctggccaacatggtgaaaccccatctctactaaaaatacaaaaattagctgggcatggtggcgggcgcctgtaatcccagctacttgggaggctgaggcaagagaatcgcctgaacgcaggaggtagaggttgcagtgagccaaggtagcaccattgcactccagcctgggtgacaagagtgaaactccatctcaaaaaataaaaataaaaatatcttcccactgggaaatgatttgggtccattgcaggagtgagagggagagggaagccatttctaggtagacattggaaggcaggctaaaggggaagagctcagggcatctggtggccagtacaggtaaaagacaagggcctgagataaggccatcttggtggagctggagggtggagagggagctgagtggctttttattgttggttctatttaagttagggcatcatcacaaaatgacatggagaaaacaaagcacaggtttccagccttggccaggtcctcaggctcccctcccttctctgcctgtcccttttcaccctcctcttttcacacttgtcttcctctaccctctggcttgtcagggctggcctgtagcaagttttggccccctgacttcactctctccatttagtttcccagattggcatctgcaggtcagactgtagttctcagctttgaccgtggcttcacctcggggccaccttctggcatttgcctgctcacgctgtagcactctccatccaccgtgctcccctcctgggcctgaggacactgctgacctgcatctgacagggaacacgggcctctctgtgagtcagggtggtggggaggtaggaagagaggaaggggtcgtgctacactctgttgtatttgggacctgggtggatggagatgccactgggactgacaccaagggagcaaatttggggaaaaaaataagggaatttggctttatacatgtttgttagctatttctgggtgaaaccaccaggagctgcacgtggacccctagtgtgaacagtaggggtggggtgagtgtcatcagtaactcagtggacaatgacccacgggagcactgccatagggcctcacccaccccctctcttgtttatcttgacttctgtcccacttctgctcccttcggcacaccgattccctgctcagttttagaccttggtgctattgactgtcattggccattgttgttatgtgcacacattgttaaagctaaagttgcctcccaccctccggtcatttgtctccatttatcccttctgtctttcccaccaccacctccttggctggttctgcattcccagaagagtggctggaagaagtcaccaggtccttgggaagggaatgggttctgatgattcggcaccaagaatgatccatcacagctcagccacagtcgtcaccaccacccagcagccacctcacttcccctagtcacatcacattaagtggtaggcagctgaaaacggtgttgggaaagagttgtggaacataaatgtggttttgtacaagatgcacaaacaaatggctgtccctatggcaaatgttactggcttgagccaatgaattttttttttcgagatggagtctcgctctgttgcccagactggagtgcagtggtgccatctcggctcactgcaagctctgcctcccgggttcaagccattctcctgccttagcctcccgagtagctgggactacaggcgcccaccaccacgcccggctaattttttgtatttttagtagagacaggttttcactgtgttagccaggatagtctcgatctcctgaccttgtgatccacccacctcggcctcccaatgtgctgggattacaggcgtgagccaccgcgcccggcctgatttttttttttaattataaacccaacatattgaatttaacgggtttctatgctgttaaggtcttggcatcagatgagtttctggctgaggccctggaaggtaatgggggctgctgtgaagtggctggagccatcattctgatcagcacaacagggctgccactcagggcgctcagagcagccagggacttccggttggagcctccactgctgcttctcgagttccacccagcttccagcacttagacgctgacaactcagaatggaggggctttaagggtcccaggtgagtgtctctagtgctgcattgttcaacagtagcccctagcctcatgtggctacttaaatgtgcagcagttaaatacattcaatttcccataaatctaatttaaatcagttccctagttgcactagctgcactcaagtgtgggtcagtagccaaaagtaactacggtattggacagtgcagacatagaacattgccattatcacagaaagtcctacaggacagtgctatgtagacactatttccagccccaggcagtgggtcagatccttgacctaagcctggatatctccagctttctccctgctccctggacccagcagcctctggctggggcctgcttccccaaagggaaacagtctgagatagttctgccatctgcaccattctcctgacacgctccctaatctcagtgactgtttcattcagcagttattcactatgagattatactggattagggttggccctaatccaatatgaatgttgcccttattagaagaagaaaagagatctggagaaacaagaacaccacgtaaccacggaggcagagattgaagtgctggaggcacaggtcaaggaatgccaatgattgctggcaaccactacaaactaggagagatgaatggattctcagagcctttagaactatgagagaataaatgcgtgttgttttaagccaccaaacttacggtaatttgttatggaagccctggaaaactaagatagcataaaaatcaattactgtatgtgatcaaacactgaatgggctagggtgagccagtgtgtctgggaggatacgtctcatttgccttttacttaattctaccaacatttggtctgtgcttttatctctaataaatcacatgatttgagttagttttcacttttcttactccgacagagatcctttagggaatggcaaaatcccaatggagggattaatgtacaaaagtaattaagaatattggaggtttttggattttactagagattctgcagaccagctgctgataatgttgggctaaattggcagtatccaaccttctctgttcctcctggggacatgtagtaaggaaggagaccactactactgctgccctcctacccccaaacttgcctagttcataagacaggaggaaagagagaaagcaaaaagttagaaagaaacaaaagtaagataaatagccagacaaccttggcaccaccacgtggccctaggagttaaaataataataataataataataacatcaacccctgacctaaactacttgtgttatctttaaattccagacattgtatgaaaaagcattgcaaaactttctgttctgttagctgatccatgtagcccccagtcacgtttcccacacttgctcgatttatcacgaccctttcacatggaccccttaaagttgtaagcctttaaacaggccaagaatttctttttcggggggctccgctcttaagccacaagtctgccagtgcttccggccgaataaacctctttcttctttaatccggtgtctgaggagttttgtctgcagctcgtcctgctacatttcttggttccctgactgagaagcgaggtgattaagggacgttcaagccagccccttaggcagcttatgcctgccctgtagagcatccctgtggggggctccagccagcttgcgcgatgcagatcctgagagtgctcccgggtaggcatttgcccccgtggaatgcctcgtcagagtggtgcatggcaagcccccgtggaggatcaacgcagtggctgaacactgggaaggaactagcactttaagtctggacatttgaaacttggtaagactggtctttggaacttgcacactccatttgagtggaagcgtggcctgatcacccatggcgtgcctgtaccggcactttggtttttgtttttgacttgacttgaaatgcttgatactttggtttttgtttttgacttgacttgaattacttgataaacaggcgtgcctttattggcactttggctttggttctgattttgacttggcttaaattccttgacaaacaggtgtgcctttaatgacactttggttttagttttgattttcctttagtgtgaattagacgagtgagtaaccttttaccctttccttcttgtagtgtgaatgttgttttgtctcaagagaaaaataggtcaaacacaaagtaagcccactccgctagaaactgtgttaaaaaaaaatttcaagaagaaaaataaaaggaaagtcatctaatcatcaaaacttactctattaaaatgcatgttacagaaccttaagaaaggttttgcaggggattacagaggttaagcccccagaggttaagaactctatgtgaattagaattgccctcttttgctgggcgcggtggctcacgcctataatcccagcactttgggaggccgaggcgggcagatcacgaggtcaggagattgagaccatcctgactaatagggtgaaaccccatctctactaaaaatacaaaaacaaaaaattagccaggcgtgctggcgggcacctgtagtcccagctactcaagaggctgaggcaggagaattgcatgaacctggcaggcggagcttgcagtgagtggagattgtgccactgcactccagcctgggcaacagagcgagactccgtctcaaaaaaaagaaaaaaaaaaaagaattgccctcttttggtgttggatggcccaccgaaggaactacagacagggaacaattggccatgtatttaaggtggtgacaggggttggaggacagccagtggacctagatcaattcctttatattgattcatggttaaatataatatagacaaaaaccagcataaatttagccctgtttaacagcttattgcaaaaaagccaaaagtgaaagtaagaacagctgcaccagcagacacagagttgaaaaggggagtcccagaaagagcaagagaagccagttttgcaggagccgccagagataacagaaattctttctccatatggcccagcctacccccctttaccgaggccaacagccccctgagaaacgagattaaggagctaacatgccccaggtctcaccttgaaggggaagatcggagcctcaagaggccaaggaaggaagtcaagatagtcaagtgggccctctcagatctggtcttgctggagctatgcaaatgcctctcagggagacacgaggacctgtctattataatgaccaagcccacatccagggggtggggcaacagactttcatctatcagccctttttaaccattgatctactaaactggaaacaccctgaacccgccaccttgttcccagcagctagagccctgtcgagcattaactgtgtagaggtgttggactcaagtttactctagcagacctgacctccgagaccagccttgggcatcagtagactgggagctatacatggacgggagcagcttcatcaacccacaaggagagagatgtgcaggatatgcagtgataaccctggacactgtcgttaagctgagctcattgctttaattcaggccttagaactcagtgaaggtaagactaaacatttacactgactctcagtatgcctgtttaaccctccaactgcatggagaattatatttaaaaaagggcctgttaagatctaggaaaaaggggaaaaaagacccagagaatgcaactcagcttcagcatttgcagcagtactaagaggcacttctgcagaggctaagaggtagtagaaaaaaagcaattaatataaaaaagatttcagaagtgcttcaaggagctgacaagagcctaagtcagttttataagagactctgtaaagcattctggctttacatcctatttaaccctgaggctggtggctcacgcctataatcccagccctttggaaggccgaggtgggcagatcaagaggtcaggagatcgagaccatcctggctaacatggtgaaaccctgtctctactaaaaaaaaaaaaacacaaaaaaattagctgggcgtggtggcgggtagctgtagtcccagctactcgggaggctgaggcaggagaattgtgtgaacctgggaggtggagtttgcagtgagccgagatcacaccactgcactccagccttggcaacagagcgagactccatctcaaaaaaaaaaaaaaaatcagcatatatatatattcgaaaaaatatatataaatatatatatacaaatatatgtaaatatatagaaatatatacacgtaaatatatatatttacatatatatgtaaaaaaatatatgtaaatatatatataaatatatatatagtgaatacttcgtttgtaaagcaagcccagggtaacatcaagcagaagctacaggcatgaatatcacccagtctataaaagtggccaccaaggcgtatgttagctgtgaccaaggaacaaaacaggaaagagcaaaagcaacaagtgcggcagctaggcacgccaagggttaaattcctctccccggctcagctctatctagaaaaaaagaggaggctagagaccggtgccaagagaagagcaaaacaaaaagaaagactcacagtaagtgtaaaaaagagaatcagaagaaaatgggagagacagcagtgcgcgggggcagggcctgtgccactgcctggccccgccaggtggccatagaagcaggagaactcaggaaggaaaaagaaaaacaaagacttaaggaaaaaggccaatctgttagcaacagctcttataaaaagagagattagcaatgcgagaggacgtggacacggatgtagacgtggaagaagtcaagttaggcaaggattcgagagccggccaaggctagagagacattaatgtgtgagatgaaaaaagaaaggacactagaagggtgaatgttcagaaggcaataaaagaaatggccaaggctgcaagacaaagaggccattggccaagggctgccgcaccttggaggaaccaaatactgatctgatcaggctggcaggagctaaagaatgtaaagactagggcagactaggcaccttcttattaggctcccaggagcccattgtcacattagaagttaaaagcagcaggattctgccatatctggattccaatttctcactgatggctaagccactagatagagttacaaaggggggaaagaaaaagaacccctcctctaagaaacttaaacaggaaaaagagccataccttgtgaaaacttgcttatagactttacagaactgcctcatgctggaggctatcggtacatgctagtgcttgtttgcacctttccagggtaagttaaagttttccccaccaggacagaaaaagtacaagaagtgactaaagtattgttaaaagacattatccccaggtttagactgcctctaactttaaagtcagacaataggccagcatttgtagctgaaatagggcaggatttaacaagactgttaaaaataaaatggaagttacacacagcctattggctgcaaagttcaagaaaaagtggagtgcatgaactggacactcgagcagctactgaaaaaaatattgccaggaaattcatttaagataaaatcaggcttttgcctatggtcctccttcaagtcagctgcaccctcaccaaacaaactaggtatttaccctataagattttgttcggtcggccacccccaaatcacaggtcaaattaaaggtgacctccaagaactaaaggaattaaccttaagaaagcaaatgcagattttagaaatagccatacaaagtgtttataattaaatacataaaaatgcctataagcctgacacccctttaaatctagtgactctgtttaagttaaaaagtaaaatctaatttttctaggacccatataggatgggccttatactgtaatcttttccactcccactgctgttaaaagttgcaggtgttgtgtcttagatccatcacagtcagctaacactggcagctcaggacaagtagaccagccagcaggacacagatcttcctacccggctgattcggagacgagaccaagctgttgctgaggacgacagccctgctctggtcactccggaggctgaccagtctacacacggctgaagcttgaagaaacaacaagcccggctctagtcacgcactggcagctgaatagtctacgcatggccgaagcttgaggacttgtcaagcaagtaaacgtagttaaaaatcttaagactaatagttttcctgtaatactgttttcctattgttctgtcactgtattcaatctttttcccaggtaaggacctcttttgtccttgctggatacaaatatgctgtatattgttttgttattgttaccccccataaccatgctagaagaaacacctatataaggtgtccccattgtacacatactacttagtcaggaaacccagacccgtccagcccagcaacaattccgagtctttaagtcattctttaaacacataaaccagaagttacaagagcctcctcctttagcaaaacaaacaaacaacctatttgctcagctggctgaaaacattgccagcagcctagacgtttcttcatgttatgtttataaaaaggctaacatgagagaccaatggccttgagaagcaaaagatttaatgcctcaagattactttaactctttccccaagcagatgccaagttcaagcatttggctcttaaaaactcctattattaagaaatactgtgttgcttgctaggaaaaaagcttttaagacccagtaaaaaaactaacctgcttaggacatgacaaagttggcacatgtgcctgtactggtttaacacaggtttgatcctaggtctttatttaaaagatagtttccagctataagagaatttaaaaccctcactgcaagtgtattacataaaacactatcactctgtctcccaaagagactcaaagtaaaaataaaagcgagaactcccactaatttgtgaaaattctcaaaggaagggataaggagaccactactactcctgctgccctcctccctgccaccttgcctagttcataagacaggaggaaaagagagaaagcaaaaagttagaaagaaacaaaagtcagataaatagccagacaaccttggcaccaccacgtggccctaggagttaaaaaaaataataataataacatcaacccccgacctaaactacttgtgttatctgtaaattccagacattgtatgaaaaaagcattgcaaaactttctgttctgttagctgattcatgtagcccccagtcacgtttcccatgcttgctcaatttatcacgaccctttcacgtggacccttaaagtcgtaagcctttaaacaggccaagaatttcttttttggggagctcagctcttaagacgcaagtctgccgatgctcccggccgaataaacctctttcttctttaatccggtgtctgaggagttttgtctgtggcttgtcctgctacagtaggtgacagatgactttcatccctcatgggacaacgttacatcattcttatgaaacagccatggctgcactcagacttaggaaggcactggctgtaatgccagcactaaaagcaaaccagaacccaagtggagaaaagttagctttcataagaggactcatcttttacgttcacaaacttaggctccctgacttttatcggtaatcagtactgaggacaatgcgttccacacccgctggctggctgatgtttgattctgtaactataccacgcccagaattctctcaaaagggaataaaacacaggtcaaattcctcacccacacactccacagttcaacccctgccagggaaaccaaaagcaggaaaggatctccagcggcgccattctcatttccggtcccagcaccccgcctccatgacgtcaacgcgccgcgccaccgggctgcgtcatctcggcgcgccgctgccagggctgtacacctgctggctgccatggctgaggtgggccgtaccgggatcagctacccaggcgcgcttctcccacagggcttctgggctgcggtcgaagtgtggctggagaggccgcaggtggcaaacaaacggctttgcggcgcccgcctggaggcccgctggagcgccgccctgccctgcgcggaggcccgcggccccgggactagcgcaggctcggagcagaaggagcggggtccgggacccggccagggttcccccggagggggcccgggtcccaggtcgctatcaggacccgagcagggcacggcatgttgcgaacttgaggaggcccagggccagtgccagcaagaggaggcacagagggaagccgcctcagtgcccctgagggactccgggcaccccggccatgctgaaggaagggagggcgacttccccgccgcagatctggattcgctttgggaggatttctcccaaagtctcgcccgtggcaattcggagttgctggccttcctcaccagctccggggcgggatcgcagccagaggcgcagcgtgagctcgacgtggttctcagaaccgtcatcccgaaaactagcccacattgcccccttacaactcccaggagggaaatagtcgtgcaaggtaagagtgttttgatagtggacggatatgattagataaaaaagcattcatagaacctcgggtcaatgaaaaagtcctaagggtactagttcctctgcgatgtcctagggaggttgttaggtgtttcatagttttttgagtgggcgcatagaaatgtgtgtccttagtacagaagatgggataattgattggggtggtgtctggaaggcttcaaagagacagtgaaggactagctggatattgcgtaatacctaggagtttagcaggtaaagctgtaggtgtaaaagtgttggggaccagcctcaacaccacccgtagggtactcaaagtccggtggcgacgaaggaatgagacgagacaggttaagagtgcataaagattgggggccagggggccaattgcaaaatggaggctgccaaagcctgggagctctggtctccacactattgagtacaatcacttagatctaagaagcggacgttcggggcgaaagggtgaaagggagacagtgcatcatacatgtcatctatagcagtggcggtttaaatgaatctcctttgtgctcaaacagcgttatctttaacttgtcggagaataaccagtgggagcgtgcttaactaggagcctgcatgtctgaccacattgtagtgattcaaaggagtgtctttctccttgaacacagtgtttataggtaagacagtaggtctcgcccagagcatgggaacatcatgacaataagaaggctttcctcctcagaggcctcttgtggctttccacaacttat

SEQ ID NO: 8 - DNA, 73466 bp, Homo sapiens
  source 1..73466: mol_type = genomic DNA
tagtcaatttaatagaaacagagaataagtggtggctgccaggagtttaacgggaggggagaacggggggttgttgtttaatgggtacagagtttgcctggcaagatgaagagcttatgcagctggatggtagtgatgacagcacagcagtgtggatgtcctgaatgccacggaactgtacactgaaaaatggtgacggtgctaactttatgtgaatttcaccatgattttaaaagagcccagtgtttattatcaacctcattgcaagaggagctttgttcaaaatttcaagtatttgttcaaaaggtttatttaatgaatatctattagtttctaagccctgtgttcagtgctaagggagaggggagaaaggaaaggccttaagaacctcacacttcatcaggagagaaggggaggaaggtaagccctgaagacatgagaaggatcttcattaaaaaaaattcctgccgggtgcagtggctcacgcctgtaatcccagcactttgggaggctgaggcgggcggatcacctgaggtcaggagttcgagactagcctgaccaatatgatgaaaccctgtctctactaaaaatacaaaaattagctgggcatggtggcgtgcgcctgtaatcgcaattacttgggaggctgaggcaggagaagagcttgaacttgggaggcagaggttgcggggagccgagatcgtgccattgcactccagcctgggcaataagagtgaaactctgtctcaaaaaaaattcttttaaggggcaggctggactcgaactcctgggctcaagggatcctcctgcctcagcctcccatgtagctgggactacaggtgcacgccactgccccctgctaagataaggatcttaataaataaaagtggaagaatggacaagatagcatctgcacatggcttgatgtacacatcatcacaccaaacagaatttaagacaggaaactagatttaaacacaacaggcttggaagaaattagggggttgattcattaatacctgtggaaaagaaaatctttaaaatggtaacagaaggaatagggtggagatagaagaaaagaaacaagaaaaagttggctgctataaagagacatctgaaataattctacagtaagagaatgactaaacagtgctaaaatacaatagtgggattacattcaccacggaatcaccagttacagccagcgtcgcctgaaatacattttccagcaaggaagctgcattttcaggaccttctctgttattcacaccatgactttcttttccacaaccagttaggacttttgccacagacaacctggtgggaggctcgggtcagtgtctgtcagtgcctgaggccagctgagttagaggagggtgactaagaagaaaagaagacaactgggaaggattccaggcccagggccattcttgctcttcgcttgtgcacattacaggctgttccgaatattaaacatgacattaaaaaagatgcctcactcacctgaaatgcagaaatatttattttggtttccttcattgtttttggaaattttgttttggtttataaaacatagaaatagccaacacttaaagcaaacattcaaaaccccaaggtgacaaattattgactttttgtgcaattaagaatacatatatgaagttaggctaccaagtagtgttattacaatgacaattctttagtgcaagccctgttgtgcttgtatataatacatgtactctcacagaccccaaaacagctgctttaaatgtacaaatgacagctcaattcagtcaaatgtggcaaagactcacaataaagtgaactgctgttaatttcccaaattaactttaaaaaatccctggagaagtgaatcccaggaaatgaactttccagatttctacatcctagaattttggcttgtcaaacacatttcatagaaatcaggtagcattataagaacatttgcttattactgtccatttcaataagtactcaagtatatactcccttaatagctttaaagaaatgcttgcctgagagtttattttttggggaaaaaggcaagttaatcccaacatgatcttttgatatgaaaaccacattaaaaatctgttggcctttacacagagtgagtggttcagtgaagataaagtagacagttattcaggcgtcacagctgagcatggctgatccaggtaactctttcttgaaatgcttgtcttcactatagaatctaaggcagatttttaaataacccctgaaaaaggatggagtcggggaatcaggcctggagaaccgagtccaagagcattctgccatgaaagagaatccacgcgttctgatgagcacccatttgccagaggctccttatctgcatggttctgagttggatctgccctcccgcttactggaaaccttatgctccaacagaaaccacaggggactggagaagaacatgagtttcgtaacccttacgaatcagaagggttctgtgaatgcctgtgagaagggacagtagcagggatttaaaaagatctctggtccgcttgtgagattctccagccaggacagttgttcttatttttaaagggaacacttccctctagtgcactgtactctttagagcagcagacagctgcagaatttgcagcaagtagcagacatctcagagatagcaaagtcctaaccccttgattagagaaacagggagacagaagatttaaaacccactttttaaactgaggaagtctcaaataacttagcacatttatagtatcccctttacaatttttaaggctcattttggaaagtgtgtattaccataaacatggtctgcaacatgaggtgactgtaaggcagtgttctctttcctctagcattcctatgagaagaaccccgaatggacaagtcaaacacgaacgcttccttccctacacttgctgtattcaaaattaacaacatgaaggccatcagcaggagaagagattgtggaactgtgccatttcctctgagctttcttcttcacactaaaccttgatagtggaatagaggtcatctatctgcgacctgaaatagttccgcagctctggccttttcgccttcattgttggagtcagaaggccattgtcgatagaaaataattcagggtgcaatgtgatgcctttgacctgccaataaacaaggcagttaaaagaggaaaaaggacacgggccaccagtctcaaaagcacgtaagccttggaggggatcaacactctccagccatccaatccatcctctcatttcagccaagctgcaccttctcaacaaaggacaggcatcctattcttaggataggattcgggatcatattctgatatccaggaaaagagaataaatgcttttgatttaaaaacctttcccctgtcaaactactccattatttattcctcatgtatgtctttaggtcaccccatatgtttatataatctacctgtaaaaaaatcttaatggaaaatttgttttacaggaattcacccactcagatgaaggtcatacctgttcaaatggtttcagaccagaatccttcccaagtctcaccatatcttcgaggatagcttttttgacatcctaaaagggtaagaaaaataaattacttcctctgttagaggtccctgaatatctacaggtacatttaatgccaagttatgatgaggacagactggacccttcagaaccttaccttatttctgcacagttcctcaaacgacccttcaaatcctctcttttgggcccaggaacataatgtctcaacatctggtaccacaattgcaatgagaaatgcctttaacacagacaaatgagttattacatagcttgatccaaatgctctaaaatagtggttctttatttttccatcttgtggccccctgggagaatatgatgaaagttatggctcatctattcagaacatactacccccctcccccaggagttcactcagcccagattaagaactcctggctctaaaatgtggtaagcatcaggaattttgcaattaatgtttttaaaaaaccactgggaataccaatctaacaaatctctaattcgtatttacttttatatacttatttttttaaaagcagggtcaagtaaacaaggtgatggatatcagataactgcttttaaaaaaaaaaggaaaaaaaggaagcctgtctcatgcttgtaatcctagcacgttgggaagccaatggggatcacttgaggccaggagttcgagaccagtctgggcaatatagtgagactccatctctaccaaaaaattgaaaatcagctgggtgtggtggcttgcacctgtaatcccagctactcaggaggctgaggtaggaggatcccctggaacccagcaatttgaagctgtaatgagctatgactgccattacactccagctggacaacagagtgagaccctatctttaagaaaataaataaataaaatgtatataggttcatttttaaagaaaaatctctaatatcccattctttataatctactaacaataaaattaaaaatcaaaagaatgagaagattctagatcaaacgaaaatagctgcaatctcaaagaaaaataagtgcattctcttataagaaaatatcctaaaataattttaaaatctaacaactttttcttttttttttaaattatactttaagttttagggtacatgtgcacaacgtgcaggttagtgccatgttggtgtgctgcacctgttaactcgtcatttaacattaggtatatctcctaatgctatccctccctccctccccccaccccacaacaggccctcgtgtgtgatgttccccttcctgtgtccatgtgttctcattgttcagttcccacctatgagtgacaacatgcagtgtttgttttttgtccttgtgatagtttgctgagaatgatggtttccagcttcatccatgtccctgcaaaggacatgaactcatcattttttatggctgcatagtattccatggtgtatatgtgacacattttcttaatccagtctatcattgttgtatatttgggttggttccaagtctttgctattgtgaatagtgctgcaataaacatacgtgtgcatgtgtctttaatagcagcatgatttataaatctcttgggtatatacccagtaatgggattgctgggtcaaatgtctaaaacatcaaaagcagtggcaacaaaagccaaaattgacaaatgggatctaattaaactaaacagcttctgcacagcaaaagaaactaccatcagagcgaacaggcaacctacagaacgggagaaaatttttgcaacctactcatctgacaaagggctaatatccagaatctacaatgaactgaaacaaatttacaagaaaaaaacaaccccatcaaaaagtgggtagaggatatgaacagacacttctcaaaagaagacatttatgcagccaaaagacacatgaaaaaatgctcatcatcactggccatcagagaaatgcaaatcaaaaccacaatgagataccatctcacaccagttagaatggcaatcattaaaaagtcaggaaacaacaggtgctggagaggatgtggagaaataggaacgcttttacactgttggtgggactgtaaactagttcaaccattgtggaagtcagtgtggcgattcctcagggatctagaactagaaataccatttgacccaactttccaaaaggttaattttcaggaaaccagatcctctcttccttggcatcatctgtccaacattttggcaaataccatacatgtttcactgcaatactgattttgattttcaactttgagtattcttggttcacaaccaccgtttgctcaaaaatgattaggaagcatatcatcaataggctgggtttaatatgtttgaaaattgtaaactttcttataacccatgtcaatattttctttcataattggaaacatatattacccatgcccctgtcccccagtatgtttatccaacctccccttggtacatcagacctctctaagtaaaataaaaatgtggaaattaaagagaacaaattttcctgagcaggaaatgccaagcaacaaaaatcagtaacaggtcaatgatattctagcagattagacatgaaagccaagtgataggcgtctcaaacttccaatcacatttaaagcccctggagtaccaggcaatggcaatgtgtatgcagcaagattcaagacccagaaagcacatacctgcaggctttctccgtggacaaacacctgagcaacaggctcacttcgcatgtagatattttcaatcttttcaggggctatgtattctccttgtgccagcttaaatatgtgctttttccggtcgataattttcaaggtgccattctgttgatcagaggggagggggttatgaatgggctgatggctggtttccaaccaggatggatcccagtacaacactgaaaggtatttaatacacactattgattaattctaataacatcccacagaggtcagttatgatcccattttacagagaggaaaacaaaggcttagagagactgaggaacttgtccaaggctatttggccaagtgcagagacagagaaggggtcctagagcccgtgcttattcagcgtcaccacttggcaccactgactggtcaacactagcaaggctttgctggctcatttagcctcctgtctgaattaggcgcatacacatctggctcaccaagtgactcaagttccttaatagcaggaacacaacttttccttccaaagtgctctgcacagagtaagagttcaagaaatgtttcctacacaaaggccaaattcctgttttcttcctcgatgtctggaggggtgctcttggccctttgggaagagtgagtcaactgtggaagtgctctagcatctctggaccagaccagccacatcccagtagtgccgtaagcaaaaccctagtcccacttttaccccatccccaccccggggccactctcatgcctccaaaagtcatctgtagaaagtgtctagggttcttttgttccacaccagttctccattttcaaaaggagcaaaccaaggtccagagagactatgggatgtgttcgtgagtgccacagtagaattggaactgacatttaatctctcttgaaccggaagagggggacttaatttagctctaaatagtttgggtattgcaaaatctgaagtaattttgggaggtatttttctaatcaatacaaattccaaagaaataagcacctaaaatctacaagaatctgccaatacacagtaataaaaattatatttgtaattttagggcttgcaatcagcatcataataacttcgaaacagcagattactggtcaaaccaacaggtaggacaggtcaggcttcttgcacaagcttctcactcttaagatagactcttcagaatttctctacagtaaatggttctgagactacattcaactaaattcaaggagttcgcctaatctgtgaaacaccctatttttaatgagatgacaaacctaagaaacacatttattcccaaatccttacccatcctacattgctggaagtctaccacaacttcccccagatcttatttaactgaggcctcaacatcacggctcagtacggatattgtaaaaaagccactgtctctttgtattccggttgagaagcaacaaccagaattgatgttaagcatcaaaacgggccaggcgcggtggtggctcacgcctgtaatcccagcactttgggaggctgaggcgggtggatcacctgaggtcaggagtttgagaccagcctggccaacatggtgaaaccccgtctctactaaaaatataaaaatcagccaggtgtggtggtgggcacctgtaatcctagatacttgggaggctgaggcaggagaatcacttgaacccgagaggtggaggttgcagtgagccgagatcacgccattgcactccagccagcctgggtgacaagaacatgattccgtctcaaaaaaaaaaaaccccaaaaacacaacaaagaaacaaaaaagcatcagaacaaaacatattcgctgaagtgaaagtgaaaatccaaccaaggatgctaagtgtaaccctgtcccctgcaggaaatggaacagtctacatcataccactcaccaaggaggaagggaaagagaaaattcagggtgccactgccacatggcagctgcacagtagataagacattttcttccccacagtggaactgaactgtttgtgacctgaggaggcggcaacttactggtaaccattttccaatgtcccctgtgtgtaaccagccgtctttgtccaaagcttctgctgttttcgctgggtccttcaagtagccctgaaatacatttggccctttcacacacacctaaagaaaagaagatcatcagtgaacagcatttactggggtttttccagagaaaactggtgtgtgcatgtgtgtacgtgtgtgtctgccccaacctttagctggaagccctaaactccaggatgcagagggagttaccagagccccaccagggtctgcgagagatctccagtgcccctacttcccttcctgaattacctcagctctggccgatttgtagggcaaatgcttgccctaggttctggctcaaagctgttggaaagccccgcaggggatgaaatcacttttaagtaattaggcttcccatccagcagccagcagctcactaataggtacccagggcaatcaacaggcaggaccttcgtcccaggaactgaggccaccgggcctttctttgcaggctctccagcccaaatccctatgaggcctggcagaggaagacaggcatcagtgtccctcctgcccactccccgagagctgaacataaatgtaccctcagaaagaagcctggcagactccaggatcaccaatgaagtcaagttcaatggctttattgagctgttgggaaataccacagcattcgcaaaggccagcgatcacaggaaatggcagcgagggaaaatgactgacggttttcactcacctcgccctcgccctcggcagccatgtaattcatttcttccacatcaacaagttttatcaaattgcacggcatcggggccccaacatggcctgtatattaaataagcaaatggtcattcctaagggaactactcataacctcaggtcaaattattttgatagcaaacaggattccacataagaaaaacggctgggataaacttctgatttctgcaattacagccattctcttcctagtataatttaagagagtctattcttagactagggaagaacatatttagtgtcttcaggaccttttccaagtgtgatgctctgagttatttatgagtaatttggcctctatgtgaaggttcctacaaacacctggaagcagcctctctcaaaccttcactcggcttccaccctccgatcgcccccacccattacttgcactcatcttacacagaattcttagcatcctgttctctgtaagaagagagaacatatgcagctttggcaaacctcacgcaccacctggttctgatcaacacggcctttatttccttgcgtatgaagaagcatgtcttacagtttttactaagacgggacagtgcttatttctacagctaacttaactctcttgccaaaggctgttaagactgggctgtcttttccaaaagcagcaacaacagacattagatatgttagatatcacattagatatcacaaataattcttcctatgttttaataatttgagcttctagagatcagtattccaaattctctgttaaggaaactgaggttaaaaattaaacaaataccataaagaagattcacagactgtctgcgttaattccaggacaatgatgttagtggacagtgctaggttctagaatatatgttactaaatggtgctaatacttataatactccaaataagctgggaagtttatttatcacagtgtagaatttactactcaggtgacacagaggaagcacagaagctctgcagtcaggccggggttgaaatcctggctccaaagcataatgccgcgtaaattctcatacatcatttatgtgttacttaagcaacaatctataatttcctctgagaagtaccagaacttatctcacagggacactgttggggttacactgacattaggtacatcctaagcacccatcacagaggcttacccatgacagatgctcaattatttttgtttgtcctcctcctttttccttttgagaaatgactttttgagaaaaaggacttgtatttattcctattggtagtcccaacacctagcacagcacacagtacaaattcaataactatttgttgtttaaaatgaccagcaaataacgagaccctactcaattactaggaagctctgttgggccagacactctcaatctggaacacagggcccctctcagatgtcactagtagagtctaggcaagtctctgctgccaccagctttacagtcagatccccagcgccacccctcagttgcaggaggtgttctccccacagtgccctgacttacaagagtgtttgcccccagagcctaatgatcagaaacatagcacttttgtttaagatggttaatgaaccagtcagtgattaacccaattccagacataccaataacccagtatgaataacaaaattccaaaaaggagcctcctacagccatacctgcggtccagtctccaggcatggtcaggcagcacccggcagtgcactctgtctgtccgtatccttcataaaactggggcaccaagagatgcaacattattaaggagagcacaatcacacctttactggaagtgcacaagcaatgaagtctcactaactcccaagtcatggctgactggtgaaatctcatttcaaatggtctgttcagtaagttcattcaatggtccagtgtgctttacgccaacaccagccgtcacccaggtacaccttctatttaacttccagtggccaagcgagggagaacccctatgtgactggtcaccacccagcagcagtgaactcccttggccaattcacaggacatgtaccccacacatgccccgtctgccaccaaatcctcctttctccctttactacaggttgtcagcatggtgtgcgggtaggctcatcacctgtgacccattccacagctgcatacctgcttctaaaggttgtcttgcacctgatcctagagaaaattcaacaaatggcagacacacacattcccctgcctagggtaaaaaatatacatatggttgcttctccaagcaacctaataataacatatcttccaaacaaacataacacacacacacaaagtagggggtgggaaggataggggtgatgttggtgaaaggacacaaagtctccatcaggaggaactggttcaagagctccatagcaccacgtggtgactagagctaacaacaatgtatcatatacttgaaaactgcccagagggtagattccaagtgttctcaccacgtgggaaaaaaaagtatgggtggtaagacacatgttaattagcttcatttagccattccacaatgtttacatattacatacatcaaaacatcatgttgttacgccataaatatagatacgcttgtcaattaagaaagaacacacacacacacacacagtacagatgacttttggtgcagaagaggactgggcatcctagtgtgggagaatcaggcgccgtgacatccacctcacctgacagcccagggctgctctgaggaacgtcagcacagtggcagacaccggggcggctcctgtcaccatcagccggactcttccgcccaggctcgactttcagggagggagagtgggagaaggtgagggttacacacctggaagtcggcggcctctccgccaagggggcctgcttgggaccccgttccctaacccatagctgcagaccacacggaggccacacggagaactcacagccctcatgatggcagcacagggctacggtttgtttccacccgtgactgccctgttccctcccaatggggatggaagtcagccccacctctgcagaagctatttcagggaattagaacacaactgggcagatctgtggcaactaccacaattctggccttctggggggcatgatattgttacacgttatcactcatgcttgaaaaattacctcaagagtgacacgcttgttccggaaaaacgcaacaaaatggagaatgagaaaggctccactaccctgactccttttccccctagatggctgcaatactattgatcttagaaactgaggcctccttaatggctttgccttagtttttaaatgtgtgccagaattaacaaaaacatgttattctctcccttaccttcatctctccctctcacaaaaaaggccctcccagaactctgaaaagcgaagtcggtttccatgggagcagtggctgtgagtcacgtgttacctgtactttgtggaagatcagccggtcccacaggctgttgtttctgatgatgccgctgcgaagctctgcttctttcctcttggaggcaaagtccaagagccatcgcttcagcgtggtgtttgcttgtccgaaaatctaatgaggcaagacatgagaaagttttcacacctactaggatggccagagtcaaagagtgtggagaaatcagaaccctcacacacagctggggaacacaaaatggcacagctgctctgacagcctggccggtcctctaacggccccacatggtcagcacaggacagcaattccacacctcggtatacacccaggagcaatggacacatacatccccaaatgcccatcgagtaggaatgtgtaggccaggtgcggtggcccacgcttgtattcccagcactttgggaggctgaggtgggcagatctcctgagctcaggagtttgagtccagtgtggccaacatggtaagaccccatctctacaaaaaatacagaaattagccgggcatggtggcacatgcctgcggtcccagctactcaggaggctaaggtgggaggactgcttgagccctggaggtggaggctgcagtgagccatgataacaccactgcactctagcctggatgacagagagagagaccctgtctcaaaaaaaaaaaaaaaaaaggaatggataaataaaatgcgttatacccatacagtggaatactatttggccgttaaaaggaatgaagtgctaatacgtgctacatggatgcttgtgaaagacgccagtcacaaaggagcacatatggcatgattccatccacagaaaagtccagaatagagaaatacacagatgagcggatgctgaagggtggagggggtcggggagctgataaagaataggtaagggtttctcttggaggtcatgaaaatgttctaaaattgattgtagtgatggctggagaactgtgaaagtactcaaaacctttgaattacacactttaaatcagcaaattatacagagtattatatgttgataaagttgtccttttaaaaagaaccattaaaaacataagaacgttctgagagataacaaaagtcctgcctcaaaataaagagtaagtgaacactctttctggagattgctcatgcccctcgcgcctggccctggctgtgcggtccacgcaatgatacccaccgcagaggggctggtgttctcttgggctctgctgtggcttagtcacttctttcagtgtggccaattaagtaatgttttacatgtccatgcaaggagctttacaatgaagaaaaccatttcatagttactattcttacgtgatcccattagcaacttttggagacaaacagtaggagagaagaggtaaacagtccgtgttacacatgaggaagcagaggctcaaagtgtttattgtaaaaataaaatgacctcccacattatgcttgtgttgtgaccatggtttacaaagtgtgttcatgcattttctcttataatccttatcagccactctgagaggtaaacgcattctaactttacagatgagtaaactgaagttctgtaagattgggaggattgtccagggtcatacagatggcacatggcacagcccaattcaagcccaagcccctgcgtccaagtcagtgctcagtcctgggacttcgctgcttggaacttactcggtcaaacatccggttcagcagtcttggaaccacggggaagacagtgggttgaagcaccttgaggtcatccatgagcagcctgatatctccttggaaaaatccgattttagctccatgacacagcattacacactataggggtaatggaaaaaacaaacattttatcaccacagcaggggttacacaacatatggacaacatccaacatttcagttttagcatttcaggccagtttccagaaatcttaaatttcctaaatataggtaacttaaaaaaaatgtgcatttactagtcattgtacaacatggaaatgtggtatttctcttggttatcctgaagatatgggactcagtaaaaaaccaggctatgttgtttttagtgatgaccacagaggttctactcttttagtgcggtggtaagtatctgttcaatgaatgacatggtattacatattctaaatatttttagtggctgggcgcggtggcttacacctataatcccagcactttgggaggccgaggcaggtggatcacttgaggtcaggagttccagtcgagcctggccacgttacggtgaaaccccatctctactaaaacaaaaattagccgggcttggtggcgggtgcccatagtcccagcgactcaggaggctgaggctggagaatcgcttgaacccaggaggcggagattgcagtgggctgagattgtgccactgctctccagcctgggccacggagggagactctgtctcaaatatatatatatatatatatatatagccttccagaaactttacatttaatttattctcaaaataaaaacttaacttcttgcctagagtccaagtttgttaaagtctcactttcttttgtttgaatctaactagaagtttctgaaaggccaccaagtatgatgaatttgtgacaccagggtatctaataccagagtggcttgccattcagctagaatacactgcatgatttttttcctgtctagtacaaaccatgctggcaagccatatggacctgacagtttgcctattttaaaatttaaaaagaaaagattcaaaagatgacacaagggaagtacaaatgttctctgtcttagaagcagaaaccacgagaaaggtacaccatggttcactgtttaacaattacagctcagaaagcttttgttcagcgtggcctgccttctaggcacacctctaaaactcgttaggtacagcaactcatgtgagattgctttataaacccagaagactctgaggtgtgcaggaagtagaaggaacagatggcagatgggatctaatcgccttcgatcctttgggatgagcaaatccgacagggcagctgtcatccaaagcatcggctgatagtcacctctgtctccaacacagcagagggcacacagctagagctcagtaactactcactaaatgaatgaatggtgctcattgttttttcctacagcataaaatccaaaattgtcaaagaaggaaaaaaggtggttcttggtcagttttaaaattagtcacacagttgattacagggagcctaggcaaaggtcaactcaaggatcatcctctttctccaagggcacttagaatattgctgaaaaaattagtcgcaagccaacttgtgcattaggaacaagcacaatcaaaaatagagacttctcacagaacggaagcctcgctgggctttgtagaactgaattaataatgactttacctttatagttggtttttctggactcatgtccacattagtatccttcaaaagtctgaactcctaattttaaaatgagtgattaaattccagtatcctgttcatactcagaaaaagaatttatattctttcaaataatctgcaccatttctaaaacggggctgagcagagaattctctatagggatgacagtccgcacgccacacttaccttcaataactgttcataaatgtgagcaagtggtaaatatgaaatgtgtgtgtcactggcactcaagggaagtgctttctgtaaaacacaacaacttagcagaacatacacaaacaagcaaggaaaacaaaattaaatgcctacctctacaactctctcaaacatatgggcgagaggcaagaaagatatcaaagtatcatctgggcaaggattgactgtattctgtaagcaaagacaccagcaaggcagaaaagcattaagactcccagtgaaggggaacatcgcacaccagggacggttgtggggtagggggaggggggagggatagcattaggagatatacctaatgctaaatgacaagtttatgggtgcagcacaccagcatggcacatgtacacatatgtaacacacctgcacgttgtgcacatgcaccctaaaacttaaagtataataataataaaattaaaaaaaaaagactccgagtaaacttccattttatttctgagcacatagtacctcaacactgaggagaaacggcttttgcttatggtctgcaatttcttctcaccaaagaataaaatgaaaaacaaggggcatggtggctcacgcctgtaatcccagcactttgggaggccaaggcaggcagatcacttgaggtcaggagttcaagaccagcctggccaacatggtaaaaccccatccctactaaaaatacaaaaattagccagacatggtggcacatgcctgtaattccagctactcaggaggctgaggcagcagaattgcttgaatcagggaggcggaggctgcagtaagccgagattgcaccactgcactccagcctgggcaacagagtgagactctgaatcaaaaaaaaaagcaatactttaattattcaaacaaagtggaagtcactccccatgacaaagtaaatccacttcagggctttaatcaaaacaaggaaaattttgctcaaattggaaggttaagggattatatgctctaatcagttagtatttcatcactacagtatcctagtacccagcaagttcaattttaccttaagaaatacaggacccatttcaacataaaattgcattttatgttgttaagggaaaggaggaaagaagataaaagaaggtggatttccaaggtccttagagtattttgagtttgatcaatatttttaataccttaaagccctactttacatatcacaatttgtttaatgcaacctcagatctggcacccaggaatttgctctcctataaaatgctgatcatgatgggtccacagacagattaagtttggacatctggtttccctcagaatgggccttacttagggcaggcacagtgagggtttgtatagaatattcatgttattaacataaagaattctggccaaaacagggggtgtgcaagagcagctgctgtcataccaactaagaaatgagggcattgtcgttacctaggggatgatataccaagttctgagccatgccccttcctttcctaaagctgggtcacccttaataataatgtgacaatggatgaaagcatcaatcctgagcaaacacagcagccccagaagcactggatgtgggctgagcatgctataatctcagctggattttattcaagtctgacaggcatcccaagtagtacttctcaggatgaaattgttatattaatataatgagaaatcggactccattctatctatacttttcaactttctgactcagaacaaaaatattgtccattatcatgattagacatcttacaaagctgagaagatactgatattgtaattgatttgatattgtaactgactttaaacaaagttctgtaatcatttgcctcaatgagccaccaatgcattttaagttttgtttgaaggccaattaggaaattaaaatttcactttggtaaggtactaaatgttgaactctgtttagaaagtatacatctttaaaaagggcatttggaaagtgtgagccaagtaaagtaagtggcaagatccctcaaagatcagttttctgcagccaccaaacatgtccattccccaaagccattaagctcaggctcctgctacaaaaatcagagctacagaatacttccaaagagactgcaaaagccaattatgttaaatgtaaaaaagagtataaggaaaaggcatatggttcaataagcacctttttaaaaggcaagtttggaataggctgttggtgttatggactgaatcacatcacccccttctaaattcgtatgtcaacatcctaactcccaatgtagatggggccctgctgtgactggatagactaagacactggatagtaaactttaaaagcatgggaaattagctgaagtgcaaggctttactacttctagtgcaatggaagtcacactgaccacaacagataataatcattcaaaaacttttaacatatcattgccaatttaaaataaattatttcccaaatacagggacgctggataaaaacacaagagagtccatctcttctctgtcctttcttggacatgtttctagggcaatatccaaatagagtttctctatataaatgttgcagtgaacttcatctgtcaattcaccttaattatcataaggcaagggttggcgattaggttcaaagtgaaaaaagagagaaggtggacttgggcctaaagttctgaccttacccatatgtcacatcgtttctaaatgccacatggacctaacacactggtgcccaccttcagcactttcattctcaaggactaatgtcaatcaatgaggaaagatgacgacatcccaaaaagttacctctgttgctttcacaaaagctgaacaatcgctcactatgtttcggtgagtgaccattgctcctttggggttgcctgtggagcacatatgaagcagaacaaagttaaagaatgacagaaatgaaggaggcccagaaacctcacataattagggcttcagacacctctactgttagatatatcgtgaaaaccaaatgttgaacactaaattcctaagcaacctgcaatccttacactgacttatctttaaaaacctttattaatatgggcacattttaaagggtatatacgtagtcataagagaagaaaaaccagaaattttcttcctgggagccaccgatatagtctgtcctaggaagacaggtgaatctaatatcaccctcaataaatgtttgaggaattatccggcactcttggactctgagaagatcttacagagcaacaagaagacagcacttgaaccgcttccttctcttctgcttttggtccgtctactgttagctgataagtcatccaaaagaggtaggggagagtccagaccaatggctgccatatgtagaagcaattctatctcaaaactcacctgtagttccacttgtgaaacaaattactgcaagatcttcaggtgctggaggctaaagattaaaaaaaaaaaaagctggtataaatcagaacagaaaagagaactataagccacaaggtaccaggctagatattgaaaactacaaagaggacagagcagggtctgacacggtgtgcttaccttgggcttccgtctgttggctcttcccaggtccttaattagaagagaaaaaaagtcttaaatggaaacgttttctaactgtaaaggataaggtcacatcgagtcacttaaagctggctttactgtggggttcattcacacctggctcgaaaacagcataattttctaattaaagaaactatggcagttttaattaaccagaaccaaaatatttattcattgttctgagaagccattttccagttacctcttctcttacataaaactacataaacggtattaggactggtctttgaaataggatgtattaaaaaaacagcagccaaagtctttaccatgcatttctggtccccacttccacttcttattagggcctttaataaagccctgttcttaaccataacgagatactgcagatacttcgtaggttcctcaaatcagagcacagcactacctcacccccacattctgcacaactgacatctgcaatctgggaagaagaaaaatcaatctctgctcgattgaaatgctaggcattttggagaggctcaaatatctgctcaaatatctcccctcgtagagtggagataggatttgggagcccccaattataaaacaggccacagcagaccctctaagactccttcctgaatggacttgaaggttaagaatgacagaagcattgcgcggggacagcatttcccagcggcaggcttccagtcactaccactgatggggttcggtttactgcattagggcagtcttggtggccactttaatatctattaattttaacaaatgaactatttatattcttttcctattcaaatggaacagcttgaatgaggatatggaatgaacatgccattgaacacgccattgaacatgttcaattcacgtggaaattagatgggtgtgctcagggcttagtgagtttctgcccagcatacattaagttttcaatcttaattacattttaaatgatgtagtgacagaccaccgattaagaacaggaactaatatatccaattagaggtcagccaaaagctaaagcaataattctgtacatttttttcaaaataacctttattagctccagatttctatttgtctattaaaaattcttacataacttctggagatgcccaattcttcaaaaactgatgttaaataaaataaagcaccagttacatacaatttggctcttaatttattgggaacaaacattatccaaattagtgcactgttgccgcaaaagtttcacagccttacatctctcttacagtatcacttaggaaaaatactgcaattattattattttttgagatggagtctcgctctgtcacccaggctgcagtgcagtggggcgatctcttcaccttttgctcagaatatttttaaaaactaagtacagatcatattaaacaggtaagtgtaaaacaatgtcttctataaattaatattttaatataaactttatattataatcttcaatcaactaaataatttttaaatttcaacattacttctttatcatacagcagtcaaaaaacaccagaaaaattcttgcatctgtgggaaggtaagggaaaaagagattacattatagtaaaagagggttaaaagtaaaaaaacagaagtggggaaacactaggtaagaagctataaaaccccaattcaacaaggaagcacccgggtcagcacttgcggaatcacgttcgatgctactgagagagagagttgggcaggggcgcacacatgcacaagagagaaggttctgttagaacacccgcgcttccctgtgcctactgggttcctcaggaaaggttctacagatccttacttatagcctcaaattctttgtaggaggaggaaaactacacataaaaatttaaaatcctatctataacagtttcagaaaaatatttctaacaccttcagaaagagaaggactgactctgttttcctatgacttgttatgatatgtatatgaaaagatcttcctccggccatgttccttggatggaactctaatccaagtccaactgacggggatcaacttcttatatcatctgacatcaagcacccaagctgagcatggaccaccacgctcattctcctggaatggctgcctttaaacttgtgattggtatgactcttaagagtcaatatgaaaacaaaccaaatcaaacatgcatgttggaaattcaccaagactctccacgagccatccagggaaaagaacgatgaggctgatttctatacttggcttggcattagagacaaattagtaagtaaaaggcattaaagcccaaaggagacacagaaactgaaagttccacctgcctgaagctgtaattcccatttctggcatttccgggcacagcttgtcagtgctctggaataaatattggagtgctgaaagcacttgggtaaggtgtgaggtgttaacactgggcacacatgtagaatcctttttccagcaatgagacagaagtttctgctctctttcatgggttgcggaggcaaccggccagcgctgggactgcaccatagcactagatagcactggatagcacgtgtgagccaacacggccccagggaaagccttcagagaagggaaggaggcagggcactcacctccatcgccttcatgctggtgacttccaccccacacctctggcctcgttccaccagttcactgccgtaggcatccatgacaactatgattttaaggcctggtattaacttattttctacaccctctaataagagtttggccttctctggcttgtcaacaaaaaccagagagagttcagctgtaaatgaagagatacaatgaagaataagctctgggatgttaaaagattcactctgtcatatccagcacaaggatacttgaagtactacattctttgaataaaaaggtagatatatatttacatgtaaaatctttgtcaaatcaaatgtaagcaaatgtaaagtcactgaacctaaccaataactatgccaataatccaggcaaagatcacagacgtacctttgttgactatgtacgtgatggcttcatttccaagggtatcataaagtggaacgatcaccatcgaataagcaaagcatccttgttcaataatcacccactaaacaaacagtaaaggtcagggagagaaaacaggatgtcatcatgtaatcaataaggagaacaatactcaagagagattcaaagtgaaaacatttgacgcagcaaaattaacatctgtgttagctactactctgtgccaggtgctataagggattcagaatgagaacaaaacacatgcccccttcttaaaaagaaattaaggccaggcacactgactcacaccagtgatcccagcactttgggaggccaaggttgggggaatcagttgagcccaggagttcaagaccagcctgggaaacatggcaaaaccctgcctctacaaaagttatctggacatggtggcacacaccatgtcgcagctacttgagaggctgaggcgggaggattgcttgaacccaggaggttgaggctgcagtgagctgtgatcacaccagtgcactccagcctgggtgacagagtgagatcctgtatgtatgtatgtatgcatgtacaaagagagggagggagggagggaaggaaggaaagagagagagagaaagaaagatgagaggacagagagagaaagaggagagattgagaaagaaaagaaaaaaggaaggaaaggaaaggagagaaagagagaaagaaagataaattaaaatccgcctgaagaattgaggcaaatatgttaaaagataattagcaataattatcagacagggactgacccagagataagaaagcccaccatcggccaaggtagctacagatgctactgggagggtgtaactgagattgcctttggaaagagaaagaaagagagagagagagacagagacagagggaggcagggagatgctaacagaggggatggcaggatcaaaagcaggggtagtgagagcgatctgactggcacagatggttctggctggagagcacggagcagccactgagagtttctcagcaaaacagcggctgtggggctcaaggaagacccctctggcagcagggcactgtatgccctggaataggggaagaagtaccttgtctagcagcaaaactgttttgataaaatccctctagaaaagtgcaggaaagaagtgagacaataactggccacactgccacatgcaagatgcagtaagatgtgtctgaaggcactggccacatagccactgccctacctactggacaaaggtgaaagatcactctttcactaccatacccaggggtaccccactgcctccggctgcacctttctaatgaaatcatctgcagaactctgacacacaggacagaaaaaggcacagccgggggaagggggcacaacccactcacatccacttggcctggaactaggcttctgagtttcggttttttcccagaaggaattttcagccaacaacatagaaatcaggtcccagctccttaggcacatgtgacgcatgaggaaggctgtctttcctgccactccaccacatgaaaatgctccactcccagacacaggtgtgaacgtgggcattcccttggcctccccgcccctatttccttcaagattctactcaggtgccacctccagggagccctccttgactgagctcccataatccttctgccctgcgcccacacttaccacttgacagagaaagcaccggtgtttaggtctgtcttgccttacgtggtacctcaggaagagaggccgagtcactgtgctttggcaccccaacacagtgtctgacatatagtgggtgctcagcaaacatttgttgaatgaactcataaatacaggaaggaacctatttcttatttgttttgcagttctagattcatgataaaattccatcaaaacaaacattttgatgtgttcatttgggatgaaaaaaactaaattctacaagcccagtcacagtccagctgtggagaatgctgttttccccttgaaagaccacaaaactctaagaagccatctttatttatataaaaaaaaaaaagtcagtagcacagggattgagtcagcatgtcttctggacacaagcaggtataagaataaattcgatttcttcaagccagatgcttccatttttctaagccagctagatctactaatctattgagtcataccataagcaatacttccaaaagagctgctcatttaaactcagtttctgatatgttttggctgtgtccccacccaaatctcaacttgaattgtatctcccagaattcccacgtgttgtgggagggaccctgggggaggtaattgaatcatgggggctggtctttcccatgctatttttgtgatagtaagtttcatgagatctgatgggtttatcaggggtttctgcttttgcttcttccgcattttctcttgccgccaccatgtaagaagtgcctttcacctcctgccatgattctgaggcccccccagccatgtgaaactgcaagtccaattaaacctctttttgttcccagtctcaggtatgtctttatcagcagcatgaaaatggactaacacacttttacacactggtttacagaaaccgtgctgggcttagaccaccaatgacagactgcccaaaggaaggctggctagcagtgagtactgtccccatcacccatggtattttaaactctagaaaccaaccagagggaaagcctcatacctttcagaaaggaaaaaaaggaacctgctattgacaaaaatgtatctgagtctctctataacttattaatgccatttttctaaccacagaggtgactcttaaagtaaaaagactcctttgttagttatctgttctaaggattttatttgggaacctggtttaaaaaaactaaaataatccccccaaaaaagtgatttcttttttctcttaaaggcgattaaaaggccctggttcaggttttcctttctttttttttttttttgagacggagtttcgctcttgttgcccaggctggagtgcaatggcacaatcttggctcaccgcaacctctgcctcccggattcaagcgattctcctgcctcagcctcccgagtagctgggattacagatgtgtgccaccaggcctggctaattttgtatttttagtagagatggggtttctccatgttggtcaggctggtctggaactcccgacctctggtgacccacccgccttggcctcacaaagtgctgggattacaggcgtgagccactgtgcccagcggccctggttgaggttttcatatgtgtaactttctaaggtgtaacgtaaagctatacttttagtagaaatcagactacaaaatctggtctctagcagaagttaggctcttatatctgagaattctcaaaatcatgcatagcaagtacctactggttcatacctcaggtctattttgagcaaagatgccaatgaactgatctggggcagtcttgaagcccttctggatcagtgctgagcctatgcactccgacaattctgcaacctaaaatggagaggaaaaagtcagaagcagcattgggccccaactccagaaacaaagctgaccagacggcaggcttgtatctcagccagcaagcaatgctgcacacagaaacggagagggaacatgcaggtattcctttattgatagattttttggtaaaacacaaggttttattcacaagaaatcagaattaagagaactgaccgcagggttccttctgcaaagaaaattaatcttatcccaatggctgcaggtcacagacaattatatggcagggctatttatacatttttttctattttagttttatacaattttaaaaatgatagagagatggatttgttttatttataaagcagccaaaacttgtttatttggtataaacacagaaacagcaacttttgagagacctataaaaaataagagcaagctcttatccttaagttctacagttccattcttgagaacgtattcttaggaaacaattcaaactcaggaggaggtttttaaaagcctacatacaggccaggcacggtggttcacgcctataatcccagcactttgggaggccgaggcaggcagatcacttgagggagttcgaggccagcctggccaacatggtaaaaccccgtctctactgaaaataaaaaattagccaggcatggtggcgtgaaactgtaatcccagctactcaggaggctgaggcagaattgcttgaacccaggaggcggagtctgcagtgcactgagatcaccccaccgcactccagcctgggtgacaggcgagactccatctcaaaaaaaaaaaaaaaaaaaaaaaagcctacatataaacaatatgcaaatatttcaaaattattgcatcaaaaatctctagggtaaaaaacctaatcatggctggatgattaagtaaatgatggtaaatcactaagaaaatgctacatagtaaatattataattatgaaaactatcaaacttaggacaatattacaatgataagcaacacatgtaaatataaaaatgcatattataataactaagtaaaaattgataggtttgcaaaattcagcagggttatcctatcctctccctgttcctaccccaaataaactaaaatttttaaaaaatcttaaactttgcagttattttcttttcctttttcttttctttgtttctttctttttttttctttttgagacatagtctcactctgttgcccaagctggagtacaagggcatggtcttggctcactgcaacttcctcctcacgggttcaagaaattctccctgcctcagcctccagaatagctgggattacaggcacctgccaccacactcagctgatttttgtatttttcagtaaagacagggttttgccatgttggccaggctggtcttgaactcctgacctcaggtgatctgcccccgtcggcctcccaaagtgctgggattataggcgtgagccataccgtgcctggcctggagttattttctttattctcagttcgcaaattctcaagagtactcttaaagcacacccatacccataggaaataagaccatacctactcctggcctggaaccctactggttctgggccttggcaccatcctggccctgcctatggggaacagactgatcgtggtaaggtgacaataggatgacacaaacaggctcattactactctctccttcacagacgagttcaaaagtcttggttgcatttaaggaatcagagcctgagaaaagcctgcaattggatgctatacagctggtaaatatgattgaataatacacgcacatttatatttctagatcggtcatacattcttaaaaaaaaaaaaacaaccctttaaggcattcctagccaccaaaaggtcatattcattggatgactgaaaaaaaaaaaaagatttgaatgtacaaatccaaagttggcttcagttttgtatcttcacctgcttccaaatgaagtgtgcaagtcatagattcacaccttcagaaaccccagtgattttcaatctgccttgaaaacgcctatctgcaatggacgtgtcttctctcttccagccactaaacaacagaagtaacccaggaggcacagaggattccatgatgcctcaggaccatcacacacaacacacacatgttcaacacacacaggctgttcttacacttgtgaaaatgagggatcctggaaactactatttgtgcaagaaactactatttggctctgacaggacagaataaaaatgggaaatccttccaatcatgtgagatactgcccctagctccttctacaggggaggtgtgagaagttgcttccccttctcttgagagacagatgaacacctctcaagcaaagccttctgcatcctgtcgaccccagaggacggacggggagaaatcatgcacttcagtctgagaagaaccaacaagcactactgcaggagtgtggctccgaggctgcagagaacgatcccttccacagacgcaccccaaatacaccagctcctaagctgcccttcacacaaaacccagaaggaggaagtgcatttgtattcatgaatccgcatgattacctgccccgagagcaggagaaggggggccagggacgggagcctttcctggacagctgtgtggaagcagcaggcagcagagctggcctgtctggagcacgtgcctgttccggggtgccgtgtggactggggaagagctgtggcacccacattcattgtaatcatgataaaaataaaaataaacagcaacgtcttcctgcactgctactgccactcatgagccgctgtttcaacagctgtagccgttgatgggtggggactagagaccgacaagggccaccatactcagatcccagcttcctttgtgcttatacagtaacacaagtgccttccccgaacatctgtgttcctccctacagctgcctgggggtaagtgtcacacaggtggtgagttggccaaggacagctttgagggtcagcagcatgcactaggaaagcctacacaagaggctgcaggccttgcttctggtcctggttctgccactaaccagctataaccttgggtgagtcacctcttttcctgagacaggtcctcctcatctgtgaaatgaagatgtattcccacgttccagcttctgagtttttctagtacccctcaagtggagagaaataatgctatgccgccagggggaccgggagagtttctagaattttatcttaaaaattatacttgacttcacaatgtatccacatcagctttgaaatacaatgctttgaaccacctgttaaattccttaacttgttctccccaaacctttgtgtcaagtttctccttggatgccccatgcttacggcaaggctctgagctggtccagcacatacactctggagaaaccttccggctccaagaatgcacatacagaagcacccctgcttgcaagaggagtccacagagcctgtctcatacaaactcacctgtttatatgaaagccattcatagggttggtctggtttccgagagcctaaacaagggccattatctaaaaaaagagaaaaaacaacagatgggctgaacgtacataaatattcctagattttaatttgtatcccaaccgcactctaatactaaacatcagctagactctactttagtcctcagataagaaatggtggcttcagattggaaatgttttctccctcagttttggtctgattttttctttgcttgtttatttctgttttgtttaagtggggcaggagagggggacagaggggagaaaaggcaatatccaactcttaagggcacttaatttgtgattcctctttaacaccctactggtttagaccaggagtcagcagatgagtggtaaagagaacctgctgtagtggtaaacagataccttttcagaagaggtattcatcaaaacttttcaagaagtctaaagcattctaattcagaatacggaaaggaaaatataattctttatgtgtccaaattttgatgaccaaaggtatcaagaattacctggaatcctagttacatgggtgaagtcatgattgcagaaaaacaaaaacaaagaaaagatgcaaaatgaggtgacgtgaagcggtatctgggaagcaaaagttaggaaataccgagatgtttcccgattcctattcaggtttcaaagaagcaaaaggggaccatagtgcatctggctttagcatattaggtctgagtgttcgtgaggaggctctgatttgacatgaggacctaaggaagtaggatggaaggcagggctggccccatcacacagatcatgccccagacaacggcagtgtgctgcacatgcagattcaggaatcagccacgtggctgaggaggacacaggctggacacactgacttctttgccatccctaaaaacagtcctgatgaaaacaggaagagctattctcggaccctctcccatttacagagactgtaacaagcaccatacaagatgagtccaatcagatgttgcttccagatgggaaaaaaattgcattagccatatgaaatgatgcgattttattcctcaaaaacagagacgggcgcactgcagccaagggccaaatcaggcccactggctgtttttgtagacacagtgatagtggcacacagccacactcattcatttttgttctgtgtgaggctgcagttgagtagttgcaaccaagaccatatggcaccaaagccaaaaatatttactaccaggctttttacagaaaacatatgccagctccagctccagaactagccgttaagctgcaggctcaccaggggaacttgatactataccaggttctactatacccaggctctagaattttttattcagttgaatagggatggggcctgggcctcagtattttttagaagctccccgatggcacaaaagtgcagctagagatgagagccactgagaagcagggagctcaatctttataaatggcttccttggtgcagttttaaagtactaggtttaaaaactctaggcgggctgcttctatcattcaacaaacttctgaccccttatccaagtgctgggtcttgctcttttgtttcagtttaattctacagtagcctaagaaaatcaaagcttagaataaaaagatcctcctgggcgggggcgggggggggggggggaaggaagcaaatcgagacctgcaaagcagctcccttcaatgagtacagatcaagaagactggacatactttccttcaccttctctgacacatccataaaaggactttcattttccagggggagcaagcgaccaaagaaaagttatgtgacttgtcttcagatcagaggagagtcaaaagcataaagtaagtcaccatgctcctcgatgaatgtatatacatttacatgtatacagcaggtcctcaaataacggcatttcatttgcacgttctcctcacatctatgtggtttttcctgggaactctgggttcctcccacatcccaaagctgtgcctgtgaggtgaactggtgcatctctacggtcctagtgagtgtgggtgagcggagtgagtgtgtgagtgtgagtgggtgtgagtatgagtctccctacgatgggagggtgtcctggccagggcagttcccacctgacatcctgagctgcccagatgggctccagccgcccacgacccttaactggaataaacaggtaaatatcttatttttatcaattgttcctaaatgtctgtatcgctcacatttatttcatgtttaacataagaagcgtggtctttatttagaagtttggtgatgtttttgtgactagaaatacgctgtgggaatgtaactcctgttcgtatcaattagcctatgggaaaaactggtttcattatagtggttttcaagttacagtttccaagaacccatcaaagacattaactgaggacttaccgtatatgtgctctgtggtggtggcaaagcacacacacacacacacacacacacacacacacacacacactgtttcatgtgccatatgttaggctgatccacctgatggatatttactatcacagacaaaccctgaccttgacaccaactttgagaatgttcataaattaaataatacacaagtaagcttgcttttcctttgtaatagggcttaatgcacgtgctatgggaacactgggacaaactcgccaagctgagacatccaatgttaccagtgtcaagtaaaaaacaataggcactttctttttttttttttttttttgagacggagtctcgctgtgtcacccaggctggagtacaatggtgcaatcctggctcactgcaacctccacctctccggttcaagcgattctcctgcctcagcctcctgagtagcgggggttacagacatgcaccaccatgcccagctaacttttgtatttttagtagagacggagtttcaccatgttggtcaggctggtctcgaactcctgacctcgtgacctgcccgccttggcctcccaaagtgctgggattacaggtgtgagccaccatgcccggccaataggcacttcttgagtgcatattacatgcaacctatcatgagggatagagccagcaataccacatggttcctgaccgtaaaaagattacaatgtagctagcagtggcccaaataaaagctaagcatcagaggatttaaataacaaagcacagattccaagaccatttttagacaagtacctggtataagcaaaaatgaagtggctaaaatagaaagaggggtggagaaaccagaggtactccctccttcactgaggatgcattagtggggcgctcactgtgtgccaggcactgtcagtgctgtgaaaagagatgactgataaccaccctgttctcaaggagctcgggctaggggggcagaatgccaggtgaacacctctgtgccatcaggagttatgcagaaggaatataacatgctgggagggaaaagggaagaaatgcttcactcagaggtaggggatgaaaatgatagactaggaaggttttagagaaaaggtgaaatgcagtgagttttgtaagattaaagaatacatcaagcacccaggctgggggtagaaagaggctttatgatcaagaaaaaaaagtgcatggccgggcatggtgactcgcgcctgtaattccagcactttgggaggccgaggtgggtggatcacctgagattaggagtttgagaccagcctgaccaacatggagaaaccccatctctattaaaaaatacaaaattagctgggcgtggtggtgcatgcctgtaatcccagctactcaggaggctgaggcaggagaatcacttgaacccaggaggtgtaggctgcggtgagccaagatcatgccattgcactccagcctgggcaacaagagcaaaactccgtccaaagaaaaaaaaaagtgcacaagtctgggcatggtggctcacacctgtagtcccagtgctttgggaggctgaggcaggagactcacttgaggtcagaagtttgagtccagcctgggcaacatagcaagaccccatttctaaaaagcaaaatagaactgcacaaagcctcagggctgggagagagcagaggtagtcgtggctctgcaggaagttcagtatgacctgagggccctatacaggaggcctgggagggacagaggctggaaaggaggtatgctggatatcacagggtttcttacactacagttaataattaagggtaatcccatgagccaacatttcccaagtatctttaacagaacactgccatcctgggatgtcagtatttctttctcaaaatatgggtctcatggtcaagtaagcatgaaaaatgccggattgggcccagttcaacagacctctttattgcaggaaacgtcagagcctattgtgcactggtgtaacatgtgactcaccataaaatacaggatgtgacactcacatatttgaccatggagcccccagggccacagggaacatctagagggtccagtgagctttgggaccgactctgggaaagttacagtggacacagaggggcctgagcgatcctaaggaggcgaaagataggagcaaatgtgcatttctgaaaggccactcgttcttcatgaaacacggcgagcgggagccacgcaaatgcaggaaaatgcttacttgacacctgtattcccctctggaaaccttcgtataatgttgtgacatcatcatagaaatacaccaagggctcgtcgctgtcaagtagtgcggatcttcgtgcaccaccactaccctatcaaaaaagaaaggggggcaggttagaaggcagtgaaacatctatgcactgtggaatggctaaatcaagctaattaacatatccattcctttacattcttgtcacttatctgtagtgagaacacttaaaatctattctcttagtaatttcaggtatatggtacattgttattaactacagtcaccaactaatagtgaacatggtcaccatttttattaaaaatagatgtcctgaactcgttcctattatacaccataaatacacataatttgtatttgtccattaaaaaataaaatgcttaaaaattaaatataaagtctaatatgcccctgtggtatccgcacccctctaggcggccacctgcggaacagctgcccagtgagtgagtgctgaaagactgcagtgcaagatgtgctgatgtaaaccaatcattcgcctggaggtaaacacaggcttcggggaaccacggctaagtcagaaagatgcctgaagagagaaaacaggtttacagacctacaagtgctggtcctgccggataaggccaaagagagcaagagaagagccacaaactgccaccactacacacattgacagttctcaagccactgccatccacagcacagaggactgatcctgttcagctctggtggaaatgaaaccccatttggttatacttctaaaatgttacctatattctttttgagactatttccactattttatctcctcaccaagcgcaatatcatctgttagaaacttcactttcttgcatagcatctctaacagttaaaatcatcagctacaaaacatatgcatgtgcagacacaggtctttattagttttaggtgcaacatttataggtgtgcagatttgacatcgctgtgcacctttctctaagtcgtcttcatctgttagcttcctgagtatatttgctatgtgcaagaactcctaatgatggataaggcggcagggcctagcctcccacagtagcagcagtagtctttacaggtagcaggtctccaatgtgagctgctgagtcctctggggccaaaggacactgtaaggcatccagacatccacagaaagccaaaaagcagtctttagagactgataaataaaagctcagtgactatgacgttagagcctacctttttttttttttttaatttcagagaggggccttcacttttacaacagtctggaaacccttggagaaattagactgtgatatgataacctctggtaccaagaggagagagctgtccaaaagtggaagagatcgtttctggcttaaggtgtgatgaaacaaaacaggagacaccaaaaagaagtgtggaaaagctaggtctcagagtagggcggcaggctgaggagggccgcgctgaggaggaagtggatgggtgccaggggatgaactcacagggagaccctttagaaggggatgactgcctgatctgtttccatggactcttctatttttattaggattatccatttctcttcctacaagctcttttgctttttgtccacccttaagttataatgtatatactgtttaaaaacatttaagtgatacagaagtatatcaaggaaaaatgatgactattagtagtttggtaaattcctcccagtcttttttttatgcttatacatttatagacattctgtcaatatctactgtgtgctacatgtgtgtatttcactcttgatcccaaactgctaatagttttctggagtaaatatgacctaaccatatcttttaatcatcacaatgtcttctctctcggcagaaactttctaacacctatggctgtgattccaaacatgcttactaactacagcacactactttatgaagcaaaaacgttattctctgtgtgcataagaatgggagaatatctttgcttagtgtcacgcattattgttacttaatcgctgagtctgttttcttttctgtaaaatggagacatcatgagtccacttccagggttattttttgttaaagaggaactttcctgtaaaatatgattgtgtagaatattacttgtgcacccgataacatgctctaactacagtacaagtcctccatcacctcagtcttgactccaacaaatagcctgaaattcagaagcaattttgtggctttgtagtgaatatcagaagccttttcaacccatgaagccaccaaacacaccgaaggcaccaaggctaaggtaggaagagaaagggggaaaggacaaaatgagagaaaacaggaagaatgagtgggtgtgaaaagagataagaaaagtaccaagtatgatggtgaagtgtggttgtctcagcatggcctagacatgcaggtggcctggccgcccacagggaggtcctcacgatgctctgcttacaaaggtgccttctatacctcttgacacaacagaaatgcattcatggtctttttcagtgctctctcttcaaaagcaacaccactttctgcactctgcagaggagttcccctagctgtgaatgggcagatggggataaggtgaacaagacacaagcttgttctgaaggagcccacgtcttgtctctaagtgaccacagggactccagggaaccctggctgagcagaagagtgcagggagagtcaggatgaacagacagaagcaagcctgaaatctcaggtgcacaggctcattctagagccaagcttctcaaagtgtgctctgcggaacacctggcactggttaggaaagcaaatcacaccagacctgctgaatccgaaactctggggatgcgatccagcaatctgtgctttaagaagccctccaggggatgctaaagtttgagaagcaccttcctagggacagcaggtttccagcagggaagttttcagcagggaagtggtgaggatgggctaatgggttagaaagaaatctacaagaagcgtaagcagtgtgtggaacaggagggagggaagagactggggagaaaccaactcctacagacctggatagggcagtgggagttgggagccgggaaggaccaaggcactgggcgtgctgcagcactcaggaacaggatttaacaggtaatggggtgtaagcagaaagaaggagggctgagaagaaaaactgtcccctttaatcaaatagaagactgggtactgggggtaggcttcagaaaagagatgaagtttagctttggacatacagagaccatatcccttcaagacaggtcaaccaccttggtcaatgtcccaaattttattttgagaaccactgctctggaggaccattttataacaaacttttagctaaataattttttagttaggtttaagtttttggtggtgtataatcttctggaatccgagaaacatggaggcaaacaagctaaatcaaagttaaagaagtgaatgatatccccaataaagcaacatcttgacatgtaacctggggcaagatatttattattaccctaattagcaattagaataatgagaaaagcttgaaaatgaagcagtaaatgagacatctgtcaaaaggagacactaattgaaggctcgatgatacgggataaaaggtcacactgtcactcagttgtcagacataactgtaatttcaagaaagggggttgaataagaaggggaagggcacaaaacattaggatctgtgcttcaaaatctgtggctctatgaaaagaccacacattctaataatgaattatttttttttcccgaaacaggggcaggctctgtcgcccaggctagagttcagtggcattatcagagctcactgccgtctcaaccgtctgactgagctcaagcaatcctcgcacttagcctcctgagtagctgaaaccacagacacgtgccaccttgcttggctaatctgtttattatttgtagaggcaaggtctcactatgttgcccaggctggtctcaaactcctgggctcaagggatccttccgcctaggcctcccaaagtattgggatgacaggtgtgagccactgcgcctggcccagtgttgctattttttgaacagaaatgctatatttaaaaaagggtgttagcaaccttagttatatctacacaagcaaggggttgcaagctgagtgctgggaagcaaagctgtaacaattggagtctgaaatgcttgtaggttttacaagacagaatcacttcaaaagctggggacttaaatactatattaggtaagtccacgtagctatttctagggacgcctatttaaatgaaaaatagcttaaatttggcccttacggccttctgacataacctactgatcagcaggcagtgtgtgtgggtcgcttgggctcaagaaacagggcaagcaaagcagacaaccccagctgaatgtgtaggaaatcagtcatgagccagtgagtcagcaggctttaggagtcttttattcctcctgctatagacctctttaatgtggttacatagtgttcccagttaaaaaaaaaaaaaaaaaagatagtgagtcaaacccactacagtgaaatcggtggtcatgagtatattccgcaacatctctacaagctcaggttcctcctgaggtcagtctccccacaagggctgaattaggaaacaagttcaagtcccccttgggggcaggaagggcaggaaaaccgtgaacatctgcatatcaaaggtttccgaggccagaactctcaccaatatttgactaacaggaacgcgatggccagttattttgtgccactctcctatttaagtgcaaaagcaaatgatgccgttgaggatttcttaggggtagagaagcccaagctttaccactcatagactcattcatctccatctccaaatgggcatctgccagccatagcagttaaatgccccttgtgttgctactgtttatgcaggagagggatagggaggtggacgcagggcgaaagtgagaagggagagtgagagagaggagggcaaggagtagaagggggagaggcagagccaagtaacttctaaagagactgccaaagacgtggctgggttctaatgcgggatccatctctagggtgcaaaggagcatgtagaaccacagtccgggggtaaaaatgattcctttttgttccttctaatacctaacatgtggtctatacagctgttccccttcaggatacccaaatccagatgctcaagtccctgatataaaatggcatagtatttgcatataacctatgcacatctttctgtatactctaaatggtctctatattactcacaatacctaatatgatgtaaataagtagctgttataccgtattgttcagggaataatgacaaggaaaaaatgtctggcaatgttcaatagacaataccatccatttatttccatggaatatttttaatccacggatacagagcgccaaccgcgtccttctcagcatttacattttacacgcatcttagcctgctcagaactccatcatgtgcttctttttgtaaagacacaaaactacttttccatccagtgacctttcagagaggaactctggccatcaattctcatatctagcagactacatctttgatatattacactaggtcttttaaaggccagcccctgggcaactccccctccacaataatttctaaatgacaatggacagatatttttaaaattcccagattccccccaatacagtgaactgtaaatgtcacaaggtaacaatgaggcctcacgctcactattcgtactcactactgaactagctgacttcccaagatcctttcctcccagctgagcacagaagggcagaactatcctgacactggcatgcaggaaagatgggaggtgagtgaatgtgtatggagcctgctaaaggccagcccctctccagatgaggaagctcagacttgggggggctgcttcccttctcagtcccatgtccaccacatagtggagcagagcttcgaacctagctcaatgagacatccaggtacgtcaaggtttgcttggcggttcacaggcaggtcccaaacatgcccacacctccttcgtctgtgtgtggagacatccttcatccttgaggaggcggggtccaggtcacctgtgcctggctgggttttctgatttttcaacacttgctcctaaccctcagaaccttttttcttttcattcctagtccatctccagtttccaacttcccggctccccactatcccagaggatttgctgaagagggacgggggtaggggtaggaggctgacacggtacttcgcaaaacatctcatcaccagaaaaaaaatcagctgaccacaaacccgcctcaatgaaagggaagaaaatttgaagtcacaatgtccaaattcctacaaatacacattgttccagaaaataggactgcccgtagaaatttacatgccaaccatttgaatatacaaggcatctgcttcacttctgcctagttcaaagggagccacattcccatctactacctttggtcagcttttggacaatgggtgctgaaggtgttttgtcaagaaacacagcctacgctggtcatttttcatttggcaccagttggttccatctggctatttttaaacataagtaaatattacagcacgcatttccgtcctttatgcgtttctgtcatcaaacacgttctctgtttaatgaagcctgtgagaagcgacatcatttgtacaaaatcaaattgtgttttcagacctgctttatcatattccctacgtatctgtagtgacctttagctttttcttcctgggtaaagagagcccggaaatagttttttaaatataacaatcaacctctttctttctttaaattcctaagccaggcacttaatactcctgtggcctggtcttggcataaagatcagaaactctgccttcagttctcaccctgcaggccaccccacccaaccaccactgctcattaccagctctaacacttttcccacctaattcagccacctaaaagcgtccctaagtcagcagacaggtcttacagtctcttagaaagcaactcaattgtttcctgtaatgtagatttgtaagaaaatgtaatttagcaaggtttttcataacttgttattaagaagctcattaagttttagaaaaggtgctgaagttacctcaaggcatgaaaatgctgatgtttgcaccctgccagaataacatttctaaataaaaacaccccctctaagcatagtctctccatcccagctatgctggttaatactgagtgtcaacttgattagatcgaaggatatgaagtattgatcctggatgtgtctgttgagggtgttgccaaaggagattaacatttgagtcagtgggctgggaaaggcagacccacccttaatctgggtgggcacaatctaatcagctgccagcatggccaaaattaaaagcaggcagaggaatttgaaaagactagactggcttagcctcccagcctacatctttctcccgtgctggatgcttcctgccctcgaacatcagactccaagtccttcagcgttgggactcggactggctttcttgctcctcagtttgcagatggcctactttgggtccttttgatggtgtgagttaatgctccttaataaactcctatatatccatcctattagctctgtccctctagagaaccctgactaatacaccaccccactgccccaactgccaggatcgcttgccgcaaatgtcctcaaatgctggaatacttttcaggaattctctgagcacaacgtcagcaaagttgctaggggtagaattaaaaggggaaatctttgctcccatcttcatttgaccatttgcacaattatgttgctatcaagaccatggaataacaggccatggggaacactgacccggaatctgcaatcacatatggtaataaatggaagttaatgcctaaaaacatcccagatttccataaggatgaaggatagggatgtaaccagagcattggatcaggagattcttctgaagtctcacacaggcttctagttaaatacacatcggataactgatttctgttccaaagcttcccagagatgagaattaggtttacatttacaaatgactgtagaaacagtatttattaggtcatatttacaaatgactgcagaaacaaccagatgctactactgttcctaatacttgtccctgcctctcagcgttcacctgatacctcccacctggttcaaaatcattcatctattgccctgccttgcaactgactgtgacagaccttcttcagacccatcaggctggtgtcagtgagggcgagtgacaccaccatccaactcaaccccagctgcccttcctggacagctcccttcctgcccactcctggcagtttccactaaggcttgtctctaaatgtctgcctcacagacacgtgtaatcctgcccagatcaacaacagctcccgctcacagcgggccccagccactcaagtccagaagggtgtctcgccgcccttagcgtttccactggcatgatccctataggcccacacttgctttacctccacaagtctggtgtgagtcttcataaaaacttatgaatcaacgagctgctctcttctcctgcaaaaattatttctcctagtttgcaagtgggcctttacatgcgtacatgtgtgaagtatggttacgtggaaatgagggattccaccagccacacggggaaatcctacttggtaatatgctccatatacaccctctaaacatggatgaaggatgccagtccttgttgcagtgtgcatgtgagctggaggtctgtggtttgttcatgcaggccatgacactgagaaggcctctggtggagtgtgacttttgagttgtaaaccatgctgttgattgagcgtggctcccacagcctggatatgttgcctttagtttgcttcttccaaatccttacctgagaatgaacccacagctgtagttctatggcatgaaaacaagtcacttgcattgactgctctagtctcaagatggctctcaccctctgccaaggacaaggggtccgagcggtacttcctgctggcctggagctccctgagggcagcagccttctctgccctggtactgtgcacatcatgccagaaaaactcaagtccttgctgagtgaatatagatctgataactattctctgtgacttgtggagaatgaaacccaaagcgccacatcctctgtggcaggctttatgaagcataggattaaaatgctaaagcaagtcgctaaccatatatatgctaacatatggatgtacaaatttcaatctctcatgcaaaagggccaccggccagcatgtgacctggaggtcaagagatcgtttggtgtggaatttagtcatccaactaggaaacgagatcagttatacccaaggaactggttctgtgtattgtaagatatgaacccatgctggaaccaaggtctgataacaatctaaacagtgaatctgtgatagactaactgggttagtcaccagaagtaaaccttaatccaggttctgatattcttaaaattaagtcttagaaaagacgtgaaggcataaaaaagtttttacttgctaaaatttattcccttctccaatatctaaaaacaaacaaataacacatatcacaggtttttgttcaagtacattatgatcttgtagtagttgtcaaaaatctttccgaactaatttgacaagtcagtcatctcaatgcccataccacggctctcataaggagaggaactcacatattctctctggagggtctccatcccgctggcttagaaggagcaggtgaagggcagatgccacttgcatggggctcatcaccaatggccccctctggcaaacagggccacacagcagccattcccattcccgggtgaccctaaggcccagtacccaaaattccagtggctcctctcggtccagcgaaactgcttccacagcaagcagcccttgaggatgcctccaatccagagcagggccaggctggctgtgccagcgtagcactgattgtgatcactggaggtgtagctgcagacggagataaggtagcctgcagagcatctcagacattctgaacttctgtgaatgtcacaggggtccgtactaactgggagcagcaggtcttgcacacaggacttgcctgcactactacctccttcagcaattacaaaggttctcatctatattcataatggttcatggcctaaatctctcaaactctgataggtggacctgaaaccacatcaacaccaactcctgctctgattccatctatgtctgacctggttcagggatagaggatgagggaaggacagagtcactcaggttttcacagtcctgtgcccccttcatgccagtcctctccattacctgattcttttttttttttttttttttgagatggagtctcgctctgttgcccccgctggagtgcggtggtgcaatctcgggtcactgcaacctccgcctcccaggttcaagcaattcccgtctcagcctcccgagtagctgggattacaggcacacgccaccacgcctggctaatttttgtatttctagtagagacggggtttcactatattggtcaggcaggtcttgaactcctaacctcaggtgatccatccaccttggcctcccaaagtgctaggattacaggcgtcagccactgtgcccagcccactacccgattcttgacaatttctgatcctatacccaacagaacttagactctgtttttattttacctgtcccttttgctccttccatttccatcactacctttagactcatttgcctgcatatccattttcaaaagatcctgctctaggccaggtgctgtggctcacacctgtaatcccagcactttgggaggccaaggtgggaggattgtttgagcccaggagtttgagaccagcctgggcaacacagcaagacctcatctctaaaaaaattttttttaattagccaggcatggtggtgcatgcctatagtcttagctactctggagttagaggtgagagaacagcttgagcccaggagtttgaggctgtagtgagctatgaccacaccactgcactccagcctgggcaacagagcgagaccctgtctctaaataaataaacaaacaaacaagcctgctcctgggtttagaggctcaagccactgactcttcatattgatctggacagatccaaactttctatcctggtttactgcccccttccccaaagccctagttataatatacaactttctactactataatgaaggcagcataacagagttctggaccttctactaactgtatgatataattttacctctttggactcagttttcttgtgtataaaatatgaagattaaaagacaaagggaaaaaagtaacattgctgcatacttattgtgggccaagcagacattgcataactcttcagtcctcttagcaacactgaaggaggaaaggtactgtcacttcggttttccatatgaggaatctgaaggtcagaaaatcctggtgaacttgcccaaggttgcctggtctaagttggagtccagtcccacatctgccccatccctcttttccctggtccctttccgctccaacatgctcctgtactttgcttaactgcaaccacgtgtgtctgggctccgaccaatccgaaaaggtttccagtcactccagtgaagatcgttttcactagggggccatggggcttcaatctcagagaagaggctaaaacatgtagccaggctaaaccggaacactggctaacaccagaaatcttgcattatctgtgacagtgatgtaaaaagaaagcaaacccacaaaatctgcttctatccattgctcaaagtcacagagcagcagcagcaaaatccttcagaagatagaagctcttccttggcacgcagggcatcacagttatgactgtgagctgccactacagacacaaggacgtggttctccagacagggccctgatcagtccgggctccaacacttaagaaacactttttggattctgttcctaacccagcttgtctgtcctgttctctaatttaggtcttcattagaggtgaccagcatgagtgttaacctcctctttacaaccctgatttttatttttcttagggacaaggtctcgctctgttgcccaggctggagtgcagtggcacagtcatagctcactgcagtgtccaactcctgggttcaaatgattcgtccacttcagtctcccgagtagctgggactacagccatgagccaccacacccaactaattaaaataaaaaaatttatagagatgaggccttgctatgttgcccatgctggtctcaaactcctggcctcaagcaatcctctcacctcggcctcccaaagtgcagggattacagcatgtgccactgcacccagctctacaatcctgatttttaaaaggaaatttcagaaggtataatttacaaagaacctctgtgctactgccttaaaaatcagtagctgggaaacagccagcgtgggttgtgatgagaagtggccaaaccaaaaagtgcggattcttctcattttagtatccgtgtaaactttattggacaaggagggtgataaaaactgtgcatgtgagatgggggtgcagaatgagggtgggaactggcaaaccctgcttacttgttttcaaagtaggaacacagcaacaatattccactccggccaccagccccccgcagcagtgccagatgcacaggctcttcaccggtaccttatgaagtgaatcaagttcctctttccctgccctaggtgtccacaggatgatgctagctatatcaaagcatctgtaattattaagcaccagaattccagagctacttttaaatttaaacttttaacttcttttttaaaaaggcaaagcaagctcagtatctatttctaagccccacaaattctgaaaatcagagctaaatcaatgtctataaacagagaaaaatcaggaagcctctatactgggcagtaaaattatagattttcatttcttgctgcatatctcaagttttaaactgttctagagagaacatatgtaattattttaacaaggcacaatgcctttatgctaagctaaagctttaaaaccacacgtaagtgcccccacaatttctcatataataggaattactcatttcttacagttactgctaagttatacatgtcttaacactgcacttgccaacaactcttcatggagatggcagcgctgccgtgacacatcaggtgctctgccagtagagaaggaatgccagaacctcacaggaatcccttaggaaaagggagattccactcattccccagcctatgtgattagctgaggtgaaatattaaggtaccctgaccttctaaatagaaatcaagtagaaagttaacttttctcagctgtagttcagtcattctatatttatattttggcatgaattagactgaagaatcttttatatattttaagagtttcacattaatgaatccaagaacttgtctaaaataaaacaaagacctagaatcccataaataacaaaaatgctgactccagccagggctttatgtggaagggcacacactccctctgcggcagtcagcccgggggggtgggggaggccttccatctcttacatctggaagcagtaaatggggggatcttgtgtttcacaatgttcttctgcatatctgctgaatgcgggaaacactgaagggtgactgacttgggtaggggaaagcaagcgaccacagagaaaaccaaagaacaggtgaggagtggaagcaccagtgagcatgcggcctcttcatcttctccacaccctgcctttctcactagggaaggcagggagagcaggagcactaagaatcttcctgaaaggatcctaaggtttccttacgccatccctcctattaagccctaattgcccgcattccagtttcattttcctaacatgagagcacagcctccagtttgcccaagtcacacacaaccacggcgctcagcagcccagccagacgcgcctcttgagggttgtttcttcatgtcctgccccgaattctgcagccgtgttcttccgtcaagttcttactccagccctattctatttgaaatcccaaagtcccttccaacaggctagggatatgttctaagcgtcagatgtaccacgagtgcattcttttggtaacatttgtttgaaaactctcattcctgccagaatctaatccctgtgagaacaggggttctgtgctatatttttccttatggaatcctccaggctgaccacagtgcctaccacagcgtagaaactcaatgtcatttctagaatgatcttccatgtgacgagaggtagacacccaaccgacaccctctcatctgtccctgtgcctatattttgccctgtacctctatttaccaccatcagtaatttggcacatttccatttacaaagtgcagttataaacaaatatttgatcttgatggctatcacattcaacagggctcagctcatctggggaaatgcggagaaaacgcacgaggcaggctgggccctccactcaccgccacttccactgactgcatggagaggtcgcatggcggcttcaggggtttgggtctcgtggcgtaccagaaggtggtgagtgctgcaaaagctccgaagcccataagcgtgttggtcggaagagtacgcacgtactgtcggaagtcaaccagctctggcattcgaaaataccggaacagctcatgggcttgcattgtcctgtgttgatagttctctaagctgaattctgttgggagagaaaaatgtcacgttcgttccagggaagcaggacccctctccagaactccaaaattccaccggccagccatctaattgggtagctgctcggccagtccaggcattaaacccacaatctaatgatccggggcttttcctggctgtcaagtgtcatttttctaaaaacactttaggatttcattttcattctatttctccattaccttgtattgaaaaaaccccattctcttcctttcattaaccatattaaaaagattttactcaagaagaattcttcccataaaaactcaaataagtagatttaagtttctattttcttctttgctactacgtctctgctctcgtccatccacctaatcaaaaacactcgactctcattgtcaaggctaatgggaatatgagtgaaggggaagtacaagcccaaaccacctaagggccatcagtttctatttcttccaacagatctcagaacaagttcccaaactggttaaacacaccaatgtaaatttcaccttctgtactcctcacacgacaacagtggcaatataaatgctgggaaacccatagttggctatctggtaagatgagtttcttttacactccccaagacattatagccaaaagaaacaaacagataaattggtgtgcataaactttaaaccaaccaccagatatctaaagagggaatacagcacagtgttggaaagaaagtacagaatagtatttgagatcctagatgcagccggacgcggtggctcatgcctgtaatcccagcactttgggaagccgaggcgggtggatcacctgaggtcaagagtttgagatcagcctggctaacacggtgaaactccatctcttcaaaaaatacaaaaattagccaggtgtggtggtggacacctgtaatcccagctactcaggagggtgaggcaggagaatcgcctgaatccaggaggcagagggttgcagtgagccgggatcgtgccactgcactccaatctgggcaacaaagtgagaccccgtctcaaaaaagaaaaaaaaaaaaaaagaccctagatgctagagccaaattctgcctccctggcatatgagctgtatgatttgggacatatgacctcccttccctgtgcctcagtttcctcatctgtaaatggagacggaaatagcaccttatctcgcagggcttttctgactgctaaatgactcacataaagaggtaagaatgatctcacacacgttagaaagtgctcaaaaatattagattttatgattatttcctctaccaacgctctgtgattcatcctgagtgcagaacaagtaaagcacgcaggtaaaaacactgcctacaaggagtgttcagacaaaattaagaagcttctgcacagcaaaagaaactaccatcagagtgaacaggcaacctacagaatgggagaaaatttttgcaatctgtccatctgacaaagggctaatatccagaatctacaaagaacccaaacaaatttacaagaaaaaaaacaaaaatttacaagaaaaacaacaaacaagtgggcaaaggatatgaacagacacttctcaaaagaagacatttatgccaccaacagacacgtgaaaaaatgctcatcatcactggtcatcagagaaatgcattgtggttttgatttgcatctctttttctttgttaaaatacagaaattttctgctaaaatttaaatttaaatgaaattaattttaaatttaatggtctctgttttacaggccattaatactaccagaaccaacataatgtatttgctctgctcattcaatctctgctacaatgaatccatgtaagtgtactcactcacacacacacacacaaacacacacacgaaatttcaaggtttaccatgacagcaaagaaagaacagataagcagatttcttcaggccatggttctggaaagaaggcaccagcacttaacaaaaccactcaccatctgtgccaccaacagctgactactaggtgacaccccactgcagacacagaagagggcaatgagcctggaagtgggcgggggttagcagggctcagctgcgctcccccagcctaccaaggtctctcagggcacaagtcacatgccgagccccacgctgctgcccactgggctaaaggtaactagcagacaaaatccacacttgacttctcaggagagcagagggtggaggataggccaatgggcagccagcagcaaagtcaccccactgctccacccatgggcagggacaggcatcagtgagtgttgctgccaggaccggttctgaaaacagacactgttttctttctgctcagcttcccaataagagacaacgggcatatattttttaaaccactgaaatgaaggataggatgccgggtggtatgtctaaccaaggtaaggcataccaagaaagaaacagattgcccagagcatgctgacagcagatttattctagacgaatacataggaattgagctactcccgtcactgcatatctgagcacctagtgtgagccaggctttggccaggcgctgggaagacagtgttgatgacctggtctaggctttcagtgggctaaccttctagcagggaagataaaaatcaaacaagcaaggtctgcaaggcacgggggaaggcctttctgaggaagggatgtacaccaggcgggataagcagacaaatcaagtccatgtcctattgacactgagtgttcagatttcagaaacagtattgcaactccacaacctcaaagcagccttgggaatataatgtgcaaacttgccttgccctcaaatccttccacctctagttgtcttcatcaccctgcagcactccaggcctgaataggaagtactcaccccgacacacactgccatgcctttctctcttctctccccaaagctcctagagtaactcccataaaacctagattgtgtgaatttgcaggtgctgttcaacaggatcacatccctgagtgagaatcttaaataattcctctgtaaacaaatacagtcagacacaggggattaatttgtctattttaagcatcagcagtagccatgctatagactgctttacaccaagaaagtttattaaatctaagaaagaacactttaaaaaaaaaacttcagaaaattatatatttagtagcatgtgtacaagaacatttcattagatactaatctataatactaagggtttgaatccagccaaattcctatatttagtgggtgataatgacaaactatagcagtttaattcatgcctcttaaatggcagccaggtaacaagctgcaagccaacttcactgaacaaactgattaatgctatacataggaaaactatagtctatgcataaagaactaagacaatagctcatttagatatgtgtgaagaacaactcttaaacagacactgatagcattataaatcttttcccttctattaactgctattaaggaaaaggcacttggggtatttaaaaatggaggtacacctacatccaaagaaaatcaggcacaagaaatagtctttcaacgctgtatgtgaacataagcattagactaaggggtctctaagaaggactaagactcatacacttgctaacaaatggtaaaactcagacagattgtattcttattccagtagtgttctggtttgaatatttctttattctttcaaaatcaaatttccatataaacatctaaggaaatttatagcctgggcatgtaaatcatgccgctgtttgccaaaaatataattcaattggcttaaaggcttaaggagccagtatttcccagctgggaacacataaggctactgacagccagcttctccttcctctacagccactcctgtgcaccctcctccccactcttacagaaagtgggtttgctcagctgggttttctgtaaacctggagtctaaaaccacagaaggatggggaaggtaacaatggccaaggaaatctgggcacaagcccagtgtaaagatccagcacaggagattcctttaaatagacctgggcagagacaggcatagcgaggcagggtgatggaaactgaactgcacggactgtcagaaaccaaaatcctggtacccgtctacccaaactttggatagaactaaaaatgcaattagcatttacttagtgttttggaaaggctttcatatccagtgtcttatctgaacatcacaaaagcaaactgatgaggaagaaaccaaggccagagacttataagccttccccaggatgttagtcaagaacgggacaccaaccaatgtgactctaaatccaacctatgctaataattcttaactatgctaagccactgaccctctcccctgagaacacacataactatcacaagtctcctttagcccaacccaggttaggaaccatgaggtcaggtttctaaagtccttccagtactcacactcccaggtattatgacagctccctcctgaggtccacctaaatgctcaatgtcttacaaaaacgttagcatttattgtatcaccctggcctctgaacacgtggtgagttcaaggcccactatacacaaaggttcacctcttcaccattttatttgtaccatgaaaatagtggctcagggccagaggtgactcacaaggacatcattctcttgaagatacacatacacaaacatacacacacacacacacacactgcccctgcaactctgcaaacttttacttacattaacattgtattctcttcatgtcatttagaaaccaaaaaccgggtggtctggatgtttctctccttctaaagttcctcaagctttcatcaagatgaataatggcagtttgatggaatacttcactaggaatgcagccctcaaacaaacccacataaatgacacccttgcccctgcagtggcaaattaagaaagcctgacatctttccttaacgcagcaacccaagctggcaagatgctgccattccgtgccccgcctcctccccttgtacaataggctatttacagaggctgaaagcgccccctttgtcattcactagctgggcagagctcaggcttcagggaggaacaagagagcagcagccaggccatttgctgctctttcaaagcaccactccaaacctgttggattcgtgctccttaaccctggcttggcaaattccctaaagttagatttgcttaagccattcccttttgaaccaaaagagcagtcaggctctccctagagagagggaggtacggcagctcaaaagagatgccagtctcccagctggagaggaaagcagaggttgctgtccaaaccctatcccactgatctccctgactgtggtcactgctctgggcccatctcctcactctgagcatcaggagaaagatttggggtaactttgggatcccataacaaacatgcaagtggttccacagggagtcagttattcccacccactgccttgtggctttttcttcccaattaagtataataaatcttaaacccacttaattttcattaaagtgatcttatagatcaccaattgaatttcctaaggatgtaaaaagaagaaacaaagcagatgccctgattttattaatctgacttattgaaatattcaagtccagctgaatacttctacacttaaaccactccctgcccatccccttataaagttatcagagaaagagtgagacacaaagctttgaactgttaaccagtaaaatgaggaccatacctcaaccattcacattggtcacaaatatcatatatgccccccaaaataaagagatctcaaacacaatatgtcgaatttgaacagataaatttttaggatgcagggtcaaatatcttatagcagtttctgtattcattaaactacatctccagttaaatcacatgaagaactaaattactttagaaatactgttttaaattcacatttcattaggccgggcgcggtggctcacacctgtaatcccagcactttgggaggccgaggcgggcagatcacgaggtcaggagatcaagaccatcctggctaacacggtgaaactccatctctactaaaaatacaaaaaaaaaattagccaggcgtggtggcaggcgcctgtagtcccagctacttgggaggctgaggcaggagaatggtgtgaacctgggaagcggagcttgcagtaagctgagatcgcgccactgcactccagcctgggcgacagagcgagactctgtctcaaaaaaaataaaaataaaataaacaaataaaccacatttcattaatatgttatttgagttctttgaatatgcatcttcaaacagggtttggggcatctctacagccactttttgaggcatcgaatggttttctgtggcatacattcacattttcctcttccactgaagttgttgaaattgaagcagtttttgaagtcatgtatgtgctactagtgaaaaaattctcccaagtcacaagaacacatttgaatgatattagaacaggagaaattttgtcctatgggtccacatttatctaactaaacctcatactctatttatagctttttaaactgatttttaaatgcactttttacagtaacaaccaacatttgcctttgtaagctgaaaccctaagaaataattacccagctagcattacatttgctgtagaaaaagtctaattcagctagttgacctgtacaaggacccatgactaggactggtagagacggtttcaggacaaggtgccctctctccccgaggctgttccaaatacaggggctgagagcacctcatactatgacagccttggtaagacttaactaggaaggctgaaggagaattttgggacactttcatcttatattgggacaggaatcttatattgggcttggaattaaaagacataacataaatgtatacacaaaatagtggataacagagtagcagtaagtgcaaaatgaattctgacagggagcatttgctcttagggagggttgcatggagaaggcacagctgagctggtccttgacaaatgagaatcatctgggaaaatgagctatccttcatgccccagggacagagacaaggctactagaagtgcctcctgacctcagggctcgcactttcgcacattaatctggaacaaacgatagggctcaagcggataggataggataggataggaaaggggaaggaagatgtttggggaaatgggcttagttatgagtttgttaggagccactgtgcttaagcacttgccgtgtgtcaggtgctgtgctacgggactgcgcacagggctaaatgcgtcctcgtcacagtccttactgcacggggttgttactgccttcagctcaaagatcaggaaactgtacaggagtcaaatgtcctgccctagttccacatgagaacaggatgagtgcctgggtctgaagccaaagcccacagacctcaagagctgagcacatcagcccagtcgtgcgtgggtgttcaagtctaaacagagggcataggtgacactgacaatgacaagccacgatgcacaatgctttttttttgttttgttttttgagacagagtctcactttgtcgcccaggctggagtgcagtggtgtgatctcggctcactgcaagctccgccttctgggttcacgccattctcccacctcagcctccggagtagctggaacttcaggcacccgccaccacgcctggctaattttttttttgtatttttagtagagacggggtttcaccgtgttggccaggatggtctcgatctcccgactttgtgatctgcccgccttggcctcccaaagtgctgggattacaggtgtgagccaccgcgcccagctgcacaatgctttaagagcccaggattcaaacccagatttccaacaacagatgaacggatcaaaatgtagtctatacaatggaacattatccaacctttaaaaagaaggaaatttggatacatgccatgacatggatgaagcaaaggacaaatactacatgatctcacttctaggaggtacctagaatcagcaaattcacagagacagaaagcagcagagaggttactgggggctgggcagggggaggaggaatgagcgttattgctgaacgggcacagagtttcaattcgggatgacgaaacattctggaactagatggtggtaatggttatacaaccctatgaatgtacttcaaaccactgtgtaactgtatacttaaaaatgattagcatgacaaattttatgttatatatattttaccacaataaaaaaagtttaattatttttaaaaattgcttaagtggatacaaatggacaaaagagaagtaattttgagcctgagaatgaatggcaaaacactgaagagacactgggaggaggagacaggagggtgatttgtgagcaaccggcccaaccttccagggtcctcagggccctccttcatgtgggaggaggcggcggttccacaactacccagaaatcctacacaatcccctctatgagaagcaatcagtccttcctctgaactccaggacttctttatttgtaacccctgtgtggtacttagcacctcctgtcttacacttacagcgaatggtacttagtacctatgtagatgcttcttcctctccccggccagggtctcctcccatctgtctttatatgcccttggttcttaacacagtcccgagccaaggacaggtgcttaacaaacatctactgagtcatgaatgaccctctgtgattctgaccgtgtcagaccctctgtgattctgactgtgtctctgcagcaagtcccttgaggatatattcatagaacagtgattctccaaaaagaaagggggtattaagcattttccaacttcagtagtctccttctacccgccaccagactcctacaccgcacaccagaaaggagtagagaacatctcctggctgactgggggaaaaagaaaagggtgcgagccactgatgtaaaggggacataaaaatattctcttgctcttattttgatcatgttttatatttctcaaattgtttcacttatgtagaatgtcagcccaagactgccatcaactctaagggctactgtctttagaagacgctgagatacagtgagatttggacagacgactgatgattcatttaaaacaaatcaaggctgccccgggggaagggaagagatcaaataagtacttttcttaagtaaaacagcaaatatcagaaaggcttgagcccagagccccataccagggctggactccaacttctgtgagttttctatgacagaaaagagaatcttccaaaccagggaaacagacaagactcaagcacaagatccagagtcccacgcgagggctctagtgaggagaatgctcccagaaacacagagctagtgggcggccacctgagatgtacggaatgctgacaacaggatatgcccaacattctccagagcaaacaaaacaaaacaaaacaaaacatatagctctcctcccttctctcttcacacacagctgcaaagatctgtcatgtacatccacttgagaaaatgatgattatagttaggacatgccccatgacgatatccaggtcatgtacagcctttgcgtgggacagcagggctaaattttggcggtacatatttaagagggcaagtttccattcaaaaaatttcctatgagaagaaagatgattccacttgtcttccaatactgattgaataaggctaagcaactgttgtagatatgtcacaatgaggcagataagtttactgataagagctagagaaggcagccaacttgggcagatagcctccgtcaacagctttgtggcagcggatggagacaaaaagatccgctttttaggctgacgcaatccttctgcaaagagcaagacagaaaaggcttgtgtagactaaacttctcactcatgaactggatcaatacggcatgttatttcagctgatgttcagcacaggaagagtcggaattgtgtctctatgaccgcaagttgaagaacatgacagcatgttctaagggtattaggcaagacaagcacggcctgttattacgaaagctaaagaaggaaataaaaggctttttgccactgaaataatccagaagactcttcaccttactggactcagctaaccacaaagtaagccctgaagcaagagaccacaccaggagaagagagcacaactgaacagcagagaggatcaaatgtcctttcacagtagccagagctggccccaagctatgcaggcactttcctcctccgagggccatggatggagaggaagctccacttgtttgagaaactgcacgcagagaaggtacctagatcctggggtcctctcaggtgctctgcccaaagtcaggatcttcccatcttcccgtggtgactatggaaataaacagaatatgaacatgtaaggctgggcacagtggctcacgcctgtaatcccagcacttagagaggccgaggcgggtggatcacgaggtcaggagatcaagaccatcctggctcacacggtgaaaccccgtctctactaaaaatacaaaaaaattagccatgcatggtggtgggctcctgtagtcccagctactcgggaggctgaggcaggagaatggcatgaacccgggaggcggagcttgcagtgagccaagatcgtgccactgctctccagcctgggcgacagagcgagactccgcctcaaaaaaaaaaaaaaaaaaaaaaaggagagtgggaacagaggagagctacgcctctttccatcatgaacatcatggtagcttctccaagactatgtaagagaagggaaaagatggccacacaatcctggcgtccaggactaaacaatcaagtttccacctaatacccaaaacccccagggaacagtgatatatgaagaaaagagtcaatgttaaaaccttcaattctatgtggcgagtctatgggtgtttttactactatgttgttgttctttgtatgttgctgtatttttcccaattttttactatggaaaaattaatataaaacttgccatcctaactattagctgtatttttaaaagtttctccagataaagaagctataagtgagtcaggtcagttaatgtcctcctgtatttatgtatttcccacctgctccacgaaggatttaggtagtgacctgtcctcagaacagaatgacagataggatataaacccctcctggaaaatatgtagctatgctttgccccgtctgcccacgctggacccggctcagccactgacctgctatgtgagccacttccactttcgtgcctctttgaaaaaggagtcacaccacaaaaaaagaagcaacactctgaacattccagggggataaccaactctccttagttcctgacaatcagaaagcctgaggataaaatacttacaaggttttctttgccttcagcaagtttaggatatcaatgaagacaaacacacctgcaagagttaacagagctacagaagacagatctgataaccacggcaggtagggccctggtgctccaggaatctaggggagggagaaaacagtacgcatgcaccaggcatccgagggagggctgtccagagagctgagggtggaaccaggccaagtctgaacaggcagagacaggagtgggtggagaaacaccagcaacagccagacagtgctgtgagcaaagaggcagggaggaggccctgaaggagcggcaggtgggctggggactcgcagccgcattgtaaggcaaccgtcaggagcctctgcctctctctctcccatgacagcattcttgtcaatgtcttggctgagtaagaaacagctggctaaaggaggctcgccctcacccagtgggtgtttagttcacagagccctcctgtcccctccaggacccaggcctggggggggaaactgggaagagtaagacccagtccttgtcttcaaggagtccacagcaccccacagctcgcagaggtcacagctatcacatatcagtgacctggataagaaggttaaaaagggcaaaggttgggtagagttactcacacctcttaaaatagaccaaggtttcagagactgataaccacagaaatggcttagcaggacacgggtgagaagacaggacacaaagacctctctgcccagggagaagaagatcagcctctcacgagtttggagaaatccacttctgagttgagtttttacagatttcaacaggtacctgctgttactttaaaaagcagagatgaggccaggtttacaggttcatgcctgtaaacccagcactttgggaggcagaggtgggtggatcatctgaggccaggagttcaagcccagcctggccaacatggcgaaactccatctctactaaaaatacaaaaattagccaggcgtgatggcacacacctgtagtcccggctactcggaggctgaggcaggagagtcgattgaacctgtggggggcgcagcggcagtgagccaagatggcaccactgcgctccagcctggacaacagagacgccatccaaaagaaaaaaaaaaaagcagacatgaatggaatctagaagataatcacaggctatgaggttccccaggactggacgcagcctgcaaaaaacatgggaccctgttctggcctctgaattgtgcctgtcatgtggaagacctcagtggtgttggaggaagcaacaagtgaaatagggaaaaggttaaccaggatttagctcatcgtattgggaaggagaagagaggtactggtgacaaccacgagacatgagctaaaattacacaaagagctcaggtaactataaaaagaggtgactggctctggggaagccaaaatcaaaacaaacctaacaagttgcagaagattatagaataatgaccagtgtttaaaagacagaaagaaaaagagactatgcagttcggccattacctgctcggaatgggtgatactagtttggggtctctatattccctttatgtttcacttaaaatttattatgaaaattcaaatctattcaaaagtagacacagaagtataataaaactatattttatgtacccgtgactccaacttcagcttcagtaatgatcaacgttttgctgtttcattatacccacttcttaaaaaattactttaagttacatcccaacaccctgtctctcaggtgacatttctgaggcctccacggctctatggttctaccgcgtgggggtatcatgtgcaggacagtaaaactgactggcatgtaggctgcatcttgccaactgcccaaaggtttaaacaaaaggaggcaacctgaatattgacttgaagcatccaactcagcataatacttaattatcatgcaagaaaaacgcccatatattcaatttgcaaatattgaggatatgcaagtcagctccagcctcaggggatatgatagtaaacaaaagagaaaaaaataaaaccctgatcccaatgaggcttccacactgctaagttttgggaccagagacaaaacatactctggagttaacctgactctccttaagtcacaggcctatttgacatgaatcacaacctagccagagagcagtttctattcccctttaattgacaaattctttcctttttaaaaaatggcattcagaggtctctcatgatactggtgctagagaaggagttaactttctggttctctagacttctgatgatgtaccccaataaataaatgcacccctcacattaaatgcttttatctataaaccatatacaagtattttctgaccattagaaaacacacaaatatgaatttaaaagatggccaaaaaataactatccatagaagttctaatgtttctattctattctacaatctaatggatggtctaggcagccactatggggcatacaccccactctggagacagtccttccatctcctgagcagccctgcagcctctttggtggcttgcctgccttgtgtctccatctgttccccaccatgggcaacaatgcatgaaactgctaatggaggcaccctgaaatgcgtgccacacctgggaggcagagggacagtgcctgcaaaagcctgcaaaaagggactgtcacatcaaagagggaggaaaagacactcagcatcacccagtgatgaagggaagcatgccagagagagcaggacgctactggtgaccgtcgcctggcctgcctgagagggtgaagagactgagccggcctctctgcaggacagagaggcttgaggccgagacccacgccaggctccagggctggcctcctctgaaggtctgtcctggacaccctgaagcttcagccctgaccccaaggacaaggatcttcaccctgcctgaactctagggaggtcttggcatcggcagagtttgcctctgactcacatcaggagagaaaagcacagactggctgtcttcagagtctaacctgggagtctgggctgctcagccaccccctcaagaactcagttccgtccactgtgaggtgcctggctgggctgcttgacagataaggtcccccgccagctccccatcctgggatgcctcagaagcttgcctgaggcgcaatgtaggtaactgtcctacagaaggaacaatgagccatttgaccatttcactagtggcacagaaacaaggggcaatttgaacacaagaataccaggtaaaggaagactacagtagagttatgtaacattagctggagctcaacactaatctcctcccctctcacaccctgcaaagaccacagccacctgcttctccaacacaagtgaaactacacggaaagaaacacctcagatgtactccgaaacacaaacttcactcagtgaaagcacaggcttaggtccacagactttcgatgccttgatcttggctataagatctacgttttgcacagtatcagaatagacaaacctggaacattacaatgtatattcttgttagggaccaccttctatgggacatctgaccatcggaacctgccctaccctcaatccatcattagataatcttacatgcttactagcggtaaggccctgtattaaacgctgctgaaaacacagagatgacaatgactaggtctcccatgtgcccagagcttagagtgtggctggggtgccaatctgtggaagccagatatgcactcatgaaaagatgcacgtgggacagaggctgggatgctcatcaaaatatttaatagccagtacggccagacaccaaccagccagaaaagacacaggccagtgcaccaaaacagggctccaaagttcctctactgccccatgtattaaccctttagtttccatatgaagggcgggggcacttgggtagcagctattctctagccaggatgggagtatttcgatattttaaccactagcatgatcgctggtgcatctacagctgaatgacagtgagtgtaggtgaggaaggggagagtcactccaggaaaagtgcctctgaggagcagggctctgtgggacaaggaatggcattccaaataggccaacatgggcatcgtaccatttagatgtactttttttttttttttttttggagacagagcctcactctataccccaggctggagtgcaatggcacgatcttggctcactgcaacctctgcctcccaggctcaagggattctcctgcctcagcctcctgagtagctgggattacaggcgcctgccaccacacctggctaatttttgtatttttagcagagacagggtttcaccatgttgtccaggctggtctcgaactcctgacctcagatgatccacctgccttggcctcccaaagtgctgagattacaggcgtgagctaccacacccagcctagatgtactcaacacaaactttatcccagcaaaagcacagacttgagtctagagattttcagtgtcttgatcttagctataggatcaaagacaccatcggaccaggacacaggaaggtcagtcaggcagatgacagcacccaggtacagtgtcttgggtacacagacccattaaccccatgccgccagagtttgctttctagaagcctcaggatatggtggtttggagaggagtggagatagcaggtaggaagcaagctgcagaagcccctgacaggcaaggtaagtaaacacctggagccttatggaggggagcctggaaggcttctgcttaggagggatttgatcagagctgtgatttagaaaaagcaaccatccccctctgcaccctgcccctcttcctaacaaaggccttcactgtttaaattggaggtgacaattctggttcacgatggcaatactgagaaggcaaggaggaaatgcatgtgtgttgggtaatactgcacagagagggtcagaataagcagaactgctgactgactggacttcagggcagaaaccaagggcaataccgacgtccagccattctttgaacaggcacagggcccgggaacaaactccacacgtgtgcatggccagagggtcaggcaggttgtgttaccttggccaagtcacccccctccgatccctgcagactcccaagtagctgggactacaggtgcccaccaccatgcctggctaattttttgtatttttagtagagacagggttgcaccgtgttagccaggatggtcttgatctcctgacctcatgatccgcccacctcggcctcccaaagtgctgggattacaggcgtgagccactgcacccggccagtcatgcgtctcaattgttctccagccttacaagaccaatgtccagggcaggcaaagccttttattttttaattctctagaaagtcacagctacatagcaagtgatcttatcactccctgagccacgctgaatcaaaatttgtggtctctttcagcactctagtggtataaagagataattcaaggcagagtgtaaatgagatgggggtaaaatcaaggagcagtgacaccgaaggagacccagctctgtccttcctgtcttactgccagctgtataacctggaactttctttttttttcttttggagacagagtctcactctgtcacccaggctggagtgctgtggcgcaatcttggctcactgcagcctccgcctcctgggttcatgcgattctcctgcctcaacctcccgagcagctgagactacaggcacgtaccaccacgcccagttaatttttgtatttttagtagagacggggtttcaccatattggtcagggtgatccacccgcctcggcctcccaaaatgctgggattacaggcgtgagccaccgcacctggcctaacctggaactttctaggccctcctggagtgagaacttctagctctggaggggcagtagagcccagcaattaggagcacagaccctgaagccagactgcctaggttcaaattctggtatggggaacttaatctttgcacctgttcctttatcttgtgtacagtaaggatagcagcaggacctaccttacagggttgctgaaggtactaatgagttaacccatcagaagcttagcagcacctggctctgtctgctgctctcatcactgctctgttcctaagcctggccgtgtccaggctgtggctaccacctcggtcagctaccacagccctgctttgtggcagacacctggaccctgaaggagaaactagctccggaagcactttctcatgactctgcttaataaaggaataaatagtattcagagtgtttcagtccttcttatatggacatttctcccacaacaaacctaaggggaaagtgcccatttctatagcagccaaagctgtgctaatggatagagcctacatttatcagaagtcccctccagaatgaggaaatggtctacaggcaggccccgtttcctcctctgatgccctaacttctttccatttctctttccaaaccatgaaatccctatttcaactgcttttgactagaatacatgaacccaaaagtccattaaacctattcattagtaaaaacacttttcaaattattgttaatttcaagagttttaaagcagaacattttttattttttaaagacgtatttaaacatataacaaaggttggtaaactgttctgaaaaatatccaacaaatggggagaagtaactaaattatggcccatacagcaaataatgcagtcatcttcagaacttattttttgaagaatatgtaacaacgtgtaaaaaagcccacaatataacttaggtgataaagttaaattgtcaaaattgtaatctttaattaacaatgtatgcttaaaatttgtttattgtatagggaaaaaagactggaaggaaatataacaaaatgttaatagtatttaatctctggaagagcttcatttttcctatttcccaaattttctccagtaagtatgtatgactcttaaaatatgaaaaacaaatacagcttttctgtggcaagtggtttttagatattagacagctttcagaattttatttaaacttgaagaccagcaaataattcataaagagaatcagcccaggcacctatatggaaccaccagttttgagattttattttattgtttttacttttttttttctagagatggggtcttgctctgttgcccaggctggtcttgaactcctggcctcaagcaacaagctatttgcctccagatgatcacatccttctaaggcaggcagcacaggggagcagggcccttactcacctccacttaagtttttgtccaagggtgacaccctccaagccagccacacttcaaggagtctccaatatttcacccgcccctcttgattcctcaaaggtcataagtgaatcaatactgtgttgtttctaacacagtcaagaacatgaaagtgggctgggtgcagtggctcacgcctgtaatcctagcactttggggaggccaaggagggcaaatcgcttgagcccaggagttcgagacaactgggcaatatggcaaaaccgcttcactacgaaaaaaatacaaaaattagctgggcatagtgatgtgcgcctgtagtctaagctactggagaggctgaagtgggaggatcaactgagcccagggaggtggagaggctgcaacgagccatgatcatgcctgtactccaacctgggcgacagagtgagaccttatctgggaaaaaagaaaaaaaaaagaaagtgaaaatgtcatgatgtagaaaatgaacataactcagattatgtgatagttttctcttcttgccattatatacaacccaaggcttgccacaaactgaaatttcttatgcattgacattcagcatttgatgtaaaatgacaatcttagagtcgctgccacaaaccctggtaaaactgcccctgccttctccagttcactaagttcagctactccttcagggcttgtgctcctttaaaacttttcagaagccccttgaagtaccaacatgttgaaactcaaactcaactgcctgcagcttcagatcagctctggccactgagaattcttctccaggccccagtgtcaaaggcacttttgaccatcatgtgtttgtctgactaccaagttggactgccaaccttcactaaaaactccggcacctttatctacctcctgtcagatcaccgcctgtcagagagggaggcctaaaaaggcttcaggatatcaacagctttgagctgccttagaggaacttcttttctattttgtagtacaggagcctcatgcactgcatcatccaaacaagactctccacaaaacattactaatggattctaattgaacagagtttggttacaagagacagtaaacacaaatgggcacctgttttaaatggcaaacttacacaataaattcaattgatcttaaaaactaaacattcctctaaggttactgactataaatatctagaaattactactcctatagtcttgctatttccagacaagtgaaactggaagggagagaggagaaatacccagttataatgacaagacaaccttatcttttctcaaaagcctccccaaacacacaaccattttccacaaaacagttacatcaaaaaagatgtagcaagacctagacattaagcatgctagaaagtagggacagttttaccagtgtttgtggcagcaactctgagatagtcattttacatcaaatgctaaatgtcaatgcataagaaatttcagtttgtggtaagccctgggttatatataatggcaacaagagaaaactatcacataatctgaattacgttcatttttctgcatacaccatgcatgctggtacactttcagttagcctaaacttcacccaaaagtagaggtggctatgaaaactctacctgcatggtataaatagatacctaaccctacatgcatgggtcacttgtatctacctcctaaataccaaaaacttagaagcccagatttcttttcagtcaggctgcctgcgataacaataaaaatactgccaaaataggaacaacagagacaggaaggaaatatgccaaaatgcttataattgtggggaagggtaattttttgttttgttttgttttttacagagtcctgctctgttgcccagtctggagtgcagtggcgggatctcagctcatcacaacttctgcctcctgagttcaagcgattctcctggctcagcctctcgagtagctgggactagagatgcatgccaccacgcctggctaattatttgtatttttagtagagatagggtttctccatgttggtcaggctggtctcgaactcctgacctcaaatgatctgcccgcctcggtctcccaaagtgctgggattacagtgagccaccacgcctgtctgggtaatttttttttaagtattctgtttacagtaaattcagaaaacagaagtctttaatatgtctgttttaaaggggagaggtataaggtgtgcggctaacaagtttatttttctagtcgcagaatttggactcgtgaaagattttagtctaatgcagtttgttcacaaatataaggaggggggcctcagactagggaggtgttttccgagttgagtcagaacaagaaagtaagtctcccaagacctggtccttttccactatatcacactgcactgtctggctccaatctgatggcgagcaatggttccttaaaaagctccatcttctcaagcctacccagcacagacctacaactcaaactttaagttttagccagcctaaccttccacgtccacttgaaaaaagaaaaaaaagaaagaaacaatcaaccggaagcctttgatttttttgctagcaagaagccaataattgttttctttgggacaatcacaggttaagttgtgaaatgggtggcagaaactgcaagatttaaccagtttctctcaacgctaatcaaaggtcaagaaaataaaagacagggcagtgagagtcgcgggactttagacactcctgcaccaagaagcttaaaagtcttagccagggcactagagaacgcttttagaatggtcactcttaattatgctccataaccttgaaattggactgagtggggaaggggtttccacactctcacaacgcaccgactgggggaacgcctgtccccagactcgaatccacgtgtccattcaagtcatctaccgccactctccgtctacgctgccaggtgacagacatcatctttgcttctcaatttcaaaaaatgccagcactccttagatcaatgactccacggccaagtgcaagggccacgggcactcctctggagtcaccgagagaatgtctgcctctggcagcggcctctgagctgcctgtgggcctcgtgccgccgcgctgcgtggggccggcatctcagcgggcgcgagtgcagtctcgccccacgcgcggtccgaacgcccgcgagcccggcctctgggcaggcgggggccgcggacgagggcaacgtcagcggcccagctgggccacctcctcccagccgaagcgcggcctccggctgcttcgccgggccggtccccgccgccgcacacacaagggtcggtcccgcgcgcatccccggccgcgcaccagccccgcgcccgcgccgcccgcgactcagacacaggaagctgcggcagcacgggcaccccggaggcctccggctgccgagggaagcggggccgcgggcaggaggccggaaaggcggcgcggccccacgagcctggggtggctcacgcgcctccgcggcggccgctgctccgggctcggccctgaagggcaacgtcagccggcgcctcggccggggcccgggcaccgccgcgggagcaggcgcggctccgcacggcgggcgcactcacctcctccgtggaccggccgctccgccgccggctgtcactgcagcccactccctgccccgcgccggctctggatgctatttaaggcgccgctggcgccgccgcctcggcccgctggttgcgcccccgccaccgccgcggctgagccaggatgctgctggtgcgctcgccgcgccggccccgccctcccgcggccccgccccgcccgcaggccccgcccccggcaggccccgccccgccgagcgcccggccgccctcctgtctgggcgcgcgtggctggcgggtggccggcggtcgagaggctgcggcgggcgaacgccgctggagtcgcccagactgcctcggatttcataatgaatctgaggaaggacaaagggtacattggaccgcctcagctcagaggccccgcggaccctgggccccgcgatgcccgaggggcgggcggcgccctccggatcctgcaccctcagcccgtgccccgctggcctcctggcaggccgggcagaattctgctgcgagggccctggaggcaagggccttcctctccgtttttccttgacactgacgggcgcggccccacagggtttcccccacgctccctggccggaagaccttttctgtctggtgtctgcagagcctgacgtgggcagcgcccgcagctcgcgccggtgcaggggagctgagggccgactgcgcgctgcaccacggcggccacctgctgtgcggttctgagggcttccgcggttctgagggcttccgcgtccctgccatgcccatcttggggcttcagaagccaacacgatggttttcgggctcacatcccaaaggctgctcttccttttagcacctgggacctaccaggaacctcaacctctaacaacattggtccccgttaccgtggagtttgcgcccagcgttcgctggagggccgtttgaagaatgattgttgtcgtaaaggcctttgataataatagatactgtttacccagtgcttgatgccaggcattgctacaaacactgcgtacacattattctatttaatcttcataacccagtgaggtaggtactgtcattactgtcctttcacagaagaggaagctggggcacagaggttaaatgctagtgagagcagtaccacacttggcactcaggctgcccccagagtgtgggcacaaccaacgcagggctatgcctgggctgcaggcaggggaaactgaccgtggttcgctccaggcctcagccacactgcagttcactcccacaaataactgaaggactttccctgggtgtctcccacagtgtgctgggcgcagtggtgcagtggggtgaggacaacgcacacaccagcaacctctctagcagctcagtccttttagatctccatcttccagatctagaaaaaatggactccacgttcgttttcactggttcccgcttggctaatccctggtttttctgtccagatctcgcctccccatccgtgattttgtcatctttgcctctcctttttcctcttctccaaccggtccctcagccccagaacctctgcaggcacctcccaagttctgtggtctattgttttcaagggctgctggaacgaagtaccacacactaagtggcttcaacaaccgaaatgtatggtctgtcct

SEQ ID NO: 9 - DNA, 79457 bp, Homo sapiens
  source 1..79457: mol_type = genomic DNA
tttttgttctaccttagccggtgtgttgactgtcatatttgcaatacagaccttcagagctattcgcacaggagatagcaagaggaatgcctgctggggggctcagtgaagatcccacagaggaaaagtgacttggattttgttttgaggcttgtgtaggatttaaaaatgtaagaagaatggttcaagttatttcaaactgtccacattgactcagtaaaggtaagtgggaagaattctcacagcctgtcttggtaaaccaggcaagtcagtcttactcctagtaaaacagttatgcagagaaaaatcaggttggatctttgaatgcttgactgtggatcttggacttcacctcacagttaataggcaggaattggttcaatagccagtaattcttagcaggaggaaagattgtgtcatttggattctatagaacccatttcactctccatttgtacttgcagatccagcttaacacaattttcttatgttctgaaagttcaagcacaagcacttgggggatagttggctgtgtgtttctgccttgggttttctaagactaaccacccagtgaattctacaaaaccctgttaaatgatgttcctagccatggaggaccagggaaagccaaaggcagaaccgtctctgtgagtaatgatacagctgcagaccctgatggggtgcagtgcatcattaatagaacagggcataaggatgcatgctgtcagagctaccccgtctatttttgtgtgacacgggggacttgtagccactgcattgatttgcaatggtgaactgtcatttccaataacaactgtccatgataatatttaaaataatattgaaaattcactgaatataatatttttaaaggatgtcatcttttaaaaaatatatgtggattttaaagacaagtagatgagtagaacaccaacgattattgttaaattatcctaaatttacctgggattgcaataaagttaatgttccctagaaattgtgaatggttgaattaaagcataataattgaatgcaaataccacaaaatttttgcttttccactttggctttttgttttgttttgttttgtattttttgagactgagtttcactcttgctgcccaggctggagtacaatggcgtgatctcggctcatcgcaacctccgcctcctgtgttcaagcaattctcccgcctccacttcttgagtagctggggttacaggtatgcaccaccacacccggttaattttttttgtatttttagtaaagacggggtttctccatgttggtcaggctggtctcgaactcccgacctcagatgatctgcccgcctcggcctcccaaagtgctgggattacaggcgtgagccaccgcaccctgcaactttggcattgctaataacctatagggttgtcattaagttttaaaacagcaagtaattttgtttattgccaccctggttaatctccttccactcctgagaaaaacaaacaaacagtgacctcaataaccatttatttctggcacagctttccctctctctctccaggtgaagtttgtgcaagcgtgagttaagagatttgatgaaattattcacccagatgtaagtgtcggtatgttattaatactttctccaagaacatgcacatcttcacctgggcttgctgctgccccacgtagtaaggatgcaacagtttgtggttctctagagagctttgccaccagttttgcagggagagggcttttagtgtcttagccatagtgacatgtaaacaattgatatgagagtttttcttgagaatgaatttttatacaaagaaaagggagaggaagagaacattgctggccttggaaatctgaaaaacagacacaaaacaggaaaggaaagaaagcagattatttagtttaccgtcttcataatttaaggttaatgtagttttgatatgcccccaccaaatctcgtgttgaactgtaatctccactcttggaggcggggcctggtgggggtgtttatatcatgggagtgcattcctcatggatggcgtgggccatctcttgggtgatgagtgagctctgagttcacaagagatctggtcatgtagaagtgtgtggcaactgcctcccactcttttgttcttgcttttgccatgtgaagtgcctgctcccacttcaccttcctctgtgagtcaaagctccctgagccctccccagaagctgggcaccatgctggtacagccttcaggcttgtgagccaattgaacctcttttctttaaaaattaccccatctcaggatctggggcaaaggtactccaacaatagacgatgctgttggcaatacctgctcgattccagccaaactacaatggaacctgcccctgccagggtttcagcagggccaagctggaagctgattttccaccctagctcctgtcccagggaagcaggccatgggctccagtttctctgcggtgtcagcaggatgcagagtaagcccacttccaccaggcatcgatgatacagaatgaggcaactcaaggtagagtggtccgcgttctgctctcccttccctcccgtactggccctgggcccaaaggagactgaacagatacacagccctggtgctacatctcaacagagaagctggctattaaaaaaaaaaaagagtaggccgggtgcggtggctcgcacctgtaatcccaacactttgggaggccgaggtgggcagatcacgagatcaggagatcgagaacatcctggccaacatggtgaaaccccatctctactaaaaatacaaaaatgagctgggtgtggtggcgcatgtttgcaatcccagctactcaggaggctgtggcaggagaatcgattgaacccaggaggcagaggttgcagtgagctgagatcgcaccactgcactccagcctggagatagagctagactccgtctcaaaaaaaaaaaaagtaaataggattcacaatcttatcaaaatgtccagaatacaataaaaaaccacttatcatagcaagaaccagaaaaatcacaaatgaatgaagagtcgattgagactccaacataaagatgactcaggtgctgggattacctgcaaagaattttagaataattgtcataaaaatgcttcaataagcaattatgggttctcttgaaacaaatgaaaaaaatagaaaatttcagcaaaagtagagcctagaattaaaaatgaaaatcatgagaatacctcaaataaaaggctacgcatgggctcaatatatcatctcaatgaaatggaggtgacagaggatggaatccgtgaccttgaggatagctcagtggaatttgttccatctgaaaaacagagaaaacagttatagggcagcagagtctcatgggtcaataacaaaagagctcacatttgtatacttggagtccaagataaaacagaaaaatgtttaaagcagccagggagaaatgaaatgttgcttaaaggagaacaccaattcaaatggtagcagatttttcatctgaaaccatggagaccagaaatgaatgaagtgcttttccaagtgctgaaagaaaataatagtcacctgccacttctatacccacagaaattatccttccagaatgaaagggaaataaagaggttttctagacaaaagaaaacaggagaaatttgttgcataacaaacctacccttacagaagggctgacggaagcatttttttatttttgttttttatttattttattattattgtttttgagatggagtctcattctgtcacccaggctggagtgcagtggcacgatctgggctcactgcaacctgtggctcctgggttcaagccattctcctgtctcagcctcccaagtagctgggattacaggcgccggacacaacacccagctaattttctgtgtttttagtagagatggggtttcgccatgttggccaggctcgtctcgaactcctgacctcaggtgatccgcctgcctcggcctcccattgtgctgggattacaggtgtgagccactgtgcctggccatacctcatgagtttttaaaagcgatatttgatgtttgaagcaaaagttactatgccatctgatgggatgctcaatgcatgtagaagaaatacctgagacatggatatttaaaagatgggaagtggaaagacacctaaaggaagggtgatcctccactttactccacgtgataaggcctcacttccggggactgtgatgggttagggtacatggtggatccattgacaccgaactcgcagtgctctgcatgtcgcatgtgcaatggggccagggagctgcagggctgccctggagcggatgaggggtggctggagcttcgcagaggaaatggggtagattatgtggggctgttggttacattgaggccactgtaaagtgattggatgtttttctaaatgtaggtatttagttattagaataaatgagcaagaaatgacagaatctgactttttttttttttttttttgagacggagtctcgctctgtcgcccaggctggagtgcagtggcgcgatctcggctcactgcaagctctgcctcccgggttcacgccactctcctgcctcagcctcccgagtagctgggaccacaggcgcccgccactacacccggctaattttttgtatttttactagagacggggtttcaccgtgttagccaggatggtcttgacctcctgacctcgtgatccgcccgcctcggcctcccaaagtgctgggattacaggcttgagccactgcgcccggccgacttgaatttttaaaatatcaccttagctactgtgttgagatttcagtgtgagggttaagggcaggtgcagtacgacggattaggaggctatttcaggaatccagacaaggccattgcgagtggaggggagaagccagtgggttctgggggatggtagtttcaatacagagccaaaggaaatcttgatggtggaaaagagggatctttaggatggctcccggaagtttggcttcagtggccactaattgaggtgaagaagactgcgggagagcaagtggggtggaagatcagaagtctggctagggttgagatgccgattaagcatccaagcagctggatatgtaaacctagatttcggaagagagctacagacttgggataaaaaattggatgtagttactatgtggagagtgcttaaaaggatgggattggatgcggtcacctagggagcaggtgtcaactttattcatggaaccatacaaatgtaaatatggacggaatatctataacatcagcaaacaagaatgaggggcctctctattttttgctggtgtaccccaattctccctatagcacctggcatatagtagtcacttgataatatttactgaatgaacagtgacacgtgtgacctgtccaccatgaccagatcagcatcagatctagagcaacagtggaaatattctcatttctaattcaatggtcgtttattgtccctaactctcctgccaaatttaattctcaatatcttactcgtgttcaacactaaattctgattactttattggttgttatttttcataagttattcttaaacttatgatgtctttaaaactaaaattaactgcgtttttttcctattttaggaaaaaatgaagacaggctaattttgagataaatcaaatttgaaagagagtaagatttttttaatttaataaaaatgcttttacccattttatagaattataacaatattcaacccttttaaaacatggttgctatagattttctctatatcacaaggaattcaatactatattagatattaaaagcctaaaaacctaaagattgatgatggtttgtgtctgacaagttttaaaataataaggaaaataggtatagggaatgtattgataatagaatgtacattttcttaagtataggctaaattagatttaggattgtattaattccaaatgaatcattttattagcactagcttagaggaataatttcttccatacacagaaaattactgtgtatactcaatattactaagatataaaagccattaggtttttgtttattatcctttttctgacttttctccatataagtgagaagcaattatcacttgaatcaacaatatatattaatttttaaaaatagaaataaatataaagcaaggttataatttctatgaccataggctctaagaaacctaaccctgtgttttccatagaaaccatagtccagcgtttgctctgttcccagcaacttcatagaacacagctaccatgaataatgagaattgacaccacctctttttaagcgctttaacttcgacatttcaatttggtttaaaattttaatccctccgtgtgtgtttgtgtatgtgtctgtgtgtgtgtgtgtgtgtgtgcatgtgtgtgtgtgtgtgtgtgcaatgaaagaaaatacatacactaattctccaaaattcctatgggtgacttaatcaacatgtatttctgaagttcttactttcatcagcattttcttaagttctttggagaacatggacatataaagtattcattgccctggctccaaaatgtgcaatttaatgcagcatacattgcaaacaaatttataaggaacatcatattgtaactaataagggctacaggagcttactggcctgtccatactctaaagactaaagtggtctaatgaaggggctgcttggaggatgcagaggctgaaaatggtaagcattagggcaggtcagagaaagggctgtttatttcaggaagaatacatgatactaagcataccagagacattacggaaagtaaataaagagtagatttatactatatgaaacattttagagtaatatgatgcaatttacagctaatgggaaaagactgctaagttattgctgtgtcataactattttattgtgatttaaaagctttgcataaaacaatatccagtatcttcagaactaatattttatttgaagtacctttctattaaaacttctctgaccatctaattgtattaaaaataacatactgggaataggatgtatcctcgaattaaattgcttttcaatggcgttaaggtaaaataatgcctgtgtgtttattgtttttattaatatgatatattgtgtgatatctgggcccaacagctatctcaattgtggatgatatttatataagagcaaactttaagcagatgacaactctgcagattctgcagcggtaagcccttcttgactcttttctgcaggttgtggatgagagagctgccccatggctgggctgtttttacgtatactggctgcttacaggatatcacgctgctgaatgacgtgtacttgaagaccagcagagggtggtggatgtgcctctgcccacgccgtgtaaagatggtggcagagcgggcccaacagcacccttggagtctacacaagaagataaagtcatgcatgggtaatgtcctctggctggttctgaaatatataaaggctgccatttttcagggacagagcaaattatcttacacctctttatcctctagaatttaatttcaagttgcctaagtctgcatagctttccagtctcaggtgcaaatggccctcaagtctcctgatgtccactgaagctgtttggggtttttgtttttacccgattttaatatttttttctgtgatccatgcagagctctagcatcctgacttctttaactaaattaatacctttaatctgattgtagtaaagttttgctgtaacctgagatcccttttctctccctggtgacattgcatcatgcgtctttggttttttgtggattgattttattgtttagctctcagaggatgttcttatttccaagtagctggaaattaccaaataccaatcataatatccagaagtacaaattaataatgggatagtaataaatagtacaatttgtacttatagtttatgccgtttttctaaattacatgttgatcctttttagtggcaagcggcccatcggtattggctattgataataattgaaacaatatgccatgcgatcccctctaactgtgcagatgtaatgaagcatacatctgccagatggaagaagttacagtataatgtaccctgacttgctgttgcagggttgctaagtacagttttttttcgtgtttttttttttcccccagcattttcactggtatcattgggtatagactcagtcagtagggtacctagcagtctgagcttgaaaacttgagaattaatttcaacacacctttgactattccctaatgttctccacttaaatgtgtcatagtgaagccaagggtaactagtgttttgtgatgaagaactgtcctttcctgtacccacctgcaaacttgagtatacatgttgggtgctgagtgctagagagagagaaatgatttacccctctttagagataccccatattgatgagagtgatgtgcttgggcatggcttggagaaccagtggggtgtttggaatgatggcttttgtccatttcaacattggaaccctgatcctatattataataagaaaggtagacacatggcagaatcaagtataaattgcttatcataatgtttgtagttctttgagatataaaaaagcctcccaattgtcctatagaactgatgtttattgtttcttttaaataaacataaaaattgaccttcccagtcttaaaacttaaacatgttacatttgtattatctgagttcctttctcagaaaataaaggatcaggcctcccagacagtatcaaagagcgaaacttaccagatcatggcatctggaccatgagacaccagactcatcacctgtgttgattacctaaacctgcttcctgttgaccagttcttcttctttacccctcccttattcctgctttcccacacttggttacatttcttcctcactacatacacccatcatttcagttgctcaggcaggtggatttaagactgatctgccatctgctctcctacagcacccaattaaagctgtcttccatggcagtgctcgttatatcaatgactggctttcggtgcagcaagcaacaggacctagactgaacccctgacattcaggtaacaaaaccaatttccagaggacataggcttactctgctacatttcctgtcttcctcgaatatggcatcaagtttgaaagtggccctacaactttgatgagttgacttttatgacatttaaataaatatgcattaagccaaattgtccccaggattttccacaaaaatctcataattatagagcctgtggtgtctgagttcacttcattattttccaggaaaattttgaactagaaaaaagaaaataaaatgctccaaaagtcacagcgtaagaacatgtcctaattccctgtagattgcgtgttcaatggaaggaaatgctccttgctggggcgaagatgcttcctagggcaatcagaaatctgccaaaagttttgtaggggatttttttttttttttttttttttttgctttcgagtttttctcttatggagcaggataaatggatcagcctgttaacagactaggcagatgcccagcatatctgaactacatcatttctttagatttagtagggttttgacttgaacgctagtaggctcccatatgtcttcctgaaatctagaccttaggtgccctctgtggggactgctgtgtatacctggactcaatacacttacctagtcagatgaatataaactgtcagtcttggatcacctacccactcccttcagagtacagagtcaagttcactgcaagggagcaggttgcccagggagcccagtgccctttaaaaaatgaacagtgaagagatggctctacatatgcagactcttgctagtaactagcaggagaaaccatttgcagtggcatgtctttggaatgatcgtttgccaacagcaagagagaagtattttcaccttatagtataatttaccccaagacacagctccgtcctttcttaccaagggtgcatatgtgtacatgagtgtgtatatctgaagtttactcattgattaagaaatattgcaggttctctaaagcttgtatatcttgggctattacaaattctatttgactgggaaaataatatttttaggaactcactcaaaaatggacacatgctttgaaatagaaatttaagtggtttctccaagtaacaacaatcatgtgttcctttcttcccacctctagagaaatacaaaacagggaaacaatgtagagatacatgagagtcaattggttatcactaagttgttttaagaccctacagaagctgcatccatgtggctgcaaaggacatgatttcattttttatgacagtgtagtattccatggagtgtacgtaccacattttgtttatccagtcctccatggatggacatctaggttgagtccatgtctttactattgtgaatagttctgcaatgaacatataggtacctgtgtcttcctggtagaacaatttatattcctttgggtatacacccagtaatgggactgctgggccgaatggtagttctgttttaagttctttgagaaatctccaaactgctttccacagcagctgaactaacttacattcccatcaacagtgtataagcattccctttctctgcaacctcgccaatatctgttgttttttgactttcttataatagccattctaactgatgtgagaactgatgtcagatgttaacacaggaacagaaaaccaaataccgtttattgtcacttataagtgggtgtgaaaccctgagtacgtgtggacacaaagatgggaccaatagacacagaagcctacttgaggaggtagggtgggagtaggatgaaggtccaaaaactacctgttgtctactatgctcactacccgcgtgacaaaatcatttgtacaccaaaccctagtgacacataatttatacatgaacaaaactgtgcatgtacccccaaacctaaaatgaaagttgtaaaaaaaaaaataaacacatgtgatgtgggagcagaaagcaaaaacaaaattagttggcttaactgacatgtagagaacattccaccccaaaacagcaaaatacacaggcttctcaagtaaacatggttcatttaataagaataattatatcctaatatattaaaaaccttaataaactcaaaccatatggagtatattcttgaattgcaatgaaattaactacaaataactaacaaaaatgatatgattgtccctgaatatttggaaattaaagtaattctaaatacttatggagaaaactgggaatactcagaaaaatcaaaacatagtttgtactaaaacaaaatgagtatgtaacatatcaaaattatgaggtagctaaagcaggactttgaggaaaaattatagcattaaaaaaagaccttgcagaaggataatgagactgagggctgttgagtcgttaatgggtaaggctggaagccagagggcctctgtgctagtttacaaggaggctcatatctcctacagtggaagggaatgacatagctcagacaattaggaagacctaatttttagaactgcagagctccagggacatatgaatgcatggctgaggtcactgctcaggtgagaaaaggactgagaccagagaccgtggtacaaggacatatgtctggacagacatgtctcctttcctgccaggccaataccaagaaggaaatgctaatatagcccagtttggaacatgctggccctgatcagggaggagggactctatacacccaaagagttgaatgaattagctgttttgtatgagcaggaaccagaggagcactcctgggattagaaatggtgcaaccatgttcctagagcagcccttagaaacttgaaaacagcaatgcccaatactcagcagaatggaaatgcccaaattgccctgtcagaagccagaggatatgctgaaggaagcagagattgtatattatgtcagaccaaaagacccaagagaaggtcatagtccaagagaaggagcagaaagctcactcttcactaagaccataaagaatgtgctgggagaggggcaccatcatcaataataagtttggtggtggctcttctggtggttggagaggcagtcaaaggagtccactcaacaacatcatgaagatgatggagctccatgccaggagaagccaggttctggggcttcaccgctagatgccaggaggttagaggtgcgaccaagggggtgtggcccacagggacttgaggagatggttaatagagtgtctgtagtgggtaaatgaataggcagccaagaagaatgctgcttaacatctataactaggaaaaaaagttagaacggagtatcagaaagtcaagcacagtcacactgttaacaagtccaagttcctgctcagttgccagacctcagccaaattttcaaattcagaatccactggcattattcctaggaagaaagaccctaccataccatggcatatgctgtgaaaacgccctcaatcttcctcaaagggacctgtagccatttacttaggcttctttatactgaggaaaaaagaataacaagccatttcaaagactacttaataaagggcccgaattgacattgattgacccgaataaaaatccaaagatccatcatagcccagctttggagcacagagggctatgagagttaggccaaattagaaattgtggctaaagtccacctttcagtggtctgctaggtccatgaatctactcaaaggtcatttctacaatctccaagtacataattggaactgacgtccttagtaattgtagtaacccccttattgggtttctgcaatgtgagaaaaaaactgtcatcatggagaaaggccaagtggaaacctctgaaattccctctcacccctctgccaaaatagtaagtaaaaaacaatattgtatcctgggagagacagaaaagacttgtgccaccattaaagatccaacataagaatacagcaagggtgatccctgttatgtctccatttaactcatcaatttggctcctgcaaaagctggacagatcctggaaaaagactattgatgagcacagatgaataaataatagctgtgtttgcagacagatatggtatagttgctggagcagacaaatatggcctcatgtctattgcaggcaaccattgatttgataaatgtgtttttcccattctaattagcaaagatgattagaaataattcatattcacttggaaggggcaaaaatattcacttacattttgcctcagggtcatattaattctctcaccctcctgtattgtggtctctccagccttccccagatcctactttaattttccctaataagtcctttactgtcttcttttcagaatatcttcacaaacacaatgagaatctcagaagctatagaatgtctgacacatacaaaaagaaagaaagaaaagacagaaagaaaagaaagagaaagaagaaagaaaaagaaagaaagaaagaaaaagaaagaaagaaagaaaaagagaggaaagaaaggaaagaaagaaagaaagacagagaaagaaagaaagaaatctgaattcaggactagatctaaaataataaaaatcaaaaacgaatatctgaccctatgaacttaatttttgcctatcaaagtatttttctgttagcttgttttctttaaaataaattgaataagttaaaagtcagcatgacctagtgaagactgtcaaccatggctgcatgttaaaataacctagagagctttagaaagaaaaaacagcaaggcctttaacctgctcccagaattaccgatttcatggtctggatgagcttagccattagaattttgacaaggaaatgagtctccattttctcctgtcagagagaaataatattttttatcctagatggtcattataatgatctaagcagctggaatactcttgcccatggcttgcttgctcatttctgccaaaaattgtataaaatatttgcttctcaaaggtgccccacctgtcaccatagcaaaggttgtgagctcccccatgaccctcctgccttgtccctgctggattcctcaccagggcaccttaaaataccccatagaattagtatgttcactttgctcatggttcatcttcctctcctggcatgtaagctccacaaaatagggaatttttgaccttttgttccgtactgcaatatctaggtcagaagttggcaaactacaggccgtgggctaaatatgctccagtgcctgtttttgcaaataaagttgtattggaatgcaatcacccattgtgtatatattgcctataactgtttttgtactgccctcagttgcaacagaggctgccttgtggcctgcaaaatcgaaaatatttattatctggccctgtacagaaaaaagtttgccaatctttggtataggaaagtatctggcatgtagtatatgcttaataatattctttcatttattcaacagggtgtctagcacaaaattagcacacaaaaatggtcaattttatgttctgtttgattacaagtatgtccagatcagagaatcaaatccctagaaattcgtagagtaaaatgttcatccaaatgaattaaagtaattggagtagatagtttctttaccttcatatctttttttgtttgttttgtagagggaaagggaaatgattagtaaaagggaggtttcagttcctaatccttttgttgctcacttaatttttgtgcttgtttgcaagtttcaattaatatcaatcaaaataattctccctactttgtaaatggtgttcaattgttaccatgcaaaaggtgaattaacctaggacgggggttcaggcctctggctgccccctaagcttcggggtctgcgtgatcatcttctggcaatctagaagggatgctgtttggaagctgtgcttaccatcattacgctgacattgatttttaaattgtccattagtgtattcataagggagcatatgctttttttgctagaagcaaaacagaactttattaacagaaccctgacttttcctttcttcttccacctttaaagcttggtcttttatgagatatggacttctttgcagtctgacaaactttgtagacacttctcaaaataaagtttataaatgctaaaggaagaagaaggagaaagccatgagatgacaaaggcaataaattatattgaaactgtagtactagaaattgaagtttttaagcaaaactttaaaagcaacaaatatttgatataataacttctgtgattctgtatttaatgtggtggatataataacaattataatttcaaagtcatgctgagagtaaacttttcaagatatttggagccactgtgaatgtgatattaaaatactgaaagtcataatttctgctggtgagaccgtcacaggtattgctaatgcaactgtggctgctgcctggatgcataatggaagtagaggctaaatttcggttagcagaaaaggaaatcagatgtaatttttcccttgtattctttctaactctttttctacttgaagcattaaatttacttgtgcactctctagcctgtttcttcctcagaaagtatcctccaccttttgcccatttaacattctgacaaatttgagtccatacatttttattactccaaaagaggtaccttttaaactgtacctttatcaggagttggagatcagcctggccaacatggtgaaaccccgtctctactaaaaacacaaaaaattagcagggcgtggtggcacatgcctataatcccagctacttgggaggctgaggcagcagaattgcttgaaccggggaggcagaggttgcggtgagcagagatcacgccattacactccagcctgggcaacagagcaagactccatctcataaataaataaataaataaataaactgtacctttagagtcccagtgagatcttattttccttctaaagaaattgctgacagtggcccctaatgtcatatactgaagtactagctcctgaaatcttagcacaggtgtactaggaattctacttatgtttataattagtctcgatccacattagtcaatttggcatagctagtgcacagtctgaaagctggtgagatagatgtagagttgcaaaattttcaatttatctattaggcagcaggaggctacagtgggccctatgcaaaacaattcatgtagcattatgggaatttgtcctttgcacttcctggctatcttgcttttatgtgcatttattactaagaagttgtactcatggagtattgtattatcattgttgataaaataataatgatattttgcagtcaccatgcatctttctttgttccctgactttgtttgcacaggaaaattaaagaaacaaattgccgtttagtacttttccacctctgcagtaaaaaatcgtcaggaaagcacaagctcagaattatcaatgagcagatgctaacaggttatgaaactatgcaaatcaaagtacacttgaacaaatgaactgaagttgctgccttgtcaacttagacatagctggtggaactcagtaatggatgttagggaaaatgttgaaaatagaaatgtctgtaactttttttttctctaaaccgagccttttctgggtgggaagaagtactgataaatttacaaactctgttttgcttacccagtgacattgtcctccccttacattcttgctgcaagatacccattttcctttctcccatgaaatgagattttaggcacataaacttatgctgatccaggagatgtgagataaggcagggctaagagtttcccaactgatgtcagtcgttaaaacaaagaaaaaatactgatagcaattttatatcatgtaaaatagatgtcccctaggtttccatctacatctaacattttatgattctaatataatcttacaaaataataataaatggaaaactggagagcaatgattatttgattagagtagtaggaaaacactgaaaattactatgtaccaggatttcagatgggtattgcgaaataagaataaaaaagatatctcgcccccaagggcttgaaagtgaaataaaagagacaaacaataatctgttcattaaaaaactgtgtgatgaatgccttgagagagataagtacaggttgctaaagcagcaaagacgttcaaagaagacttcctagcgggtgtggtacttgaagtaagatgagatgtaacgaactagaagactctgtctaaatgaagagaggtatggaggcttcctatttagagaaaacagtaggaagtcggaagagatgagcacattaaagaaatgatgataatttaatatggccacaggagtccacaaattgtacaggtgaacatatgtcccccatatattcacctatacaatttaaagcagaaacatatgtatagtccagtggcgatctggggccaagatgttctgtgagtaataaagactgttctcttatctggagacctcatatttcctgtaagaatccatctgtctgtctatctaatcatcgtttctgtctatctttctattttatctatacttctttctagccatgatgctattaagagaattgttggcctggaaaatagatctggagaaagtacaatgttgccgcttagagaactaccaagtttaagacaggtaaagaaacagaggattaagtaagaagtctcaaattaatccctttgaagtatcagaaagagacaacacaggatgtggaaaagagacactatttgaagagactatgaaagggaattgtctatgattgttcaaaagccaatcttcagattcagaaatcccagtgaatcctatgcaggagaaataaaaagaaatctatacctagaaatatgagactgaaaacgaagaacaacgtggacaaacagtctttgcctttcagagggaaaaagacagaatatctgcaaagaaatgatcattagcttaagagctactttctcaatcatttgaatgttttaaatgcattcatttcagatttttcttctaaatagcaattctatttgtttcctacactaaaaataaataaataaaacaaaaatcatttcatggctgaatctttattttcacttaagcaaatactcaggaagacagctgcaggtggaagctatgactatgctgagctctcagcgggggctaaggcaggcagggccctggccgatggcagatcatccctcaggcgtccctgtactccacttttcctgagcgccgggagagctgcacacaccaccccacgagtaggcccctaaaacagagccaagtcacttcaggagtggcatccatctcaagagattctgtgaagggaggtcacaacccagcaacaggcgggggccaaacatccctcattcgcgctgctcctttgcgattcagaatccctgcttcctcaccgtgaaacgtcatgtgagctccaagtgtccagctcagcacggaatagagctccttgcggtcagcactgtgcatgggcaccatcagcgtggccacagacagtgaactttaaaactaggcaacaaataaaacctgaagacaacactgcatgaatactggcaagatttgggatggcctgtgccatcaaggtgcttctggagaagttagaaaactcagaaaggaacatcatgagctcagaaagtacgcagcaaatgagaagaatgtggaacaggagagacagaaaaagggcaaaaaatgaaaacactaactgaggggtgctctgagtccaggttataatgtatattacccagcatatactgtatataaatgtatattaaaacttcaaagcaaagacaagttgaagaaaacaaaagtccctaaaccgagtcgattaagacactcacagttgcaggtggtggataagacagcaacggaccccacttggccatggcaagtggacaagatggtctcaccaaccaggtcgaccactgtatgagagctcaccggttgtactaatttcctctaaatcctctcagatttacttctggcctagaagtagataatctgtatctggtagcattacaggctttttctgttgactttgctgtggtagaaaatagatcaaatacaaaagaggacttaacaaatacaatcagactcacattaaatccttggagtgatacccgaactgaacagtaactccaccttcttaagacatacatgggctcttgtgcataaggctctgtaataatttttaccactgtaatcaaactaggtcaccaaaaagatagtgagagataaaatttatcctcagaaaacttcaaaaaggccagtttacccagccaaactgagagctggatttcagacaataagaaagaatttgtaacagaagacatcatcataaaactttttttcttgaaatggtaagtgaccattacatctagaatggccatttagttttcagataaatttctatttcaaataaacgtaagcctaacaacctagtttttttaaatcactattatggctaatttaatacatttaaattccacttttatgtaaaaggcaaatattaagccaacaaattaatgtaatagatttttttaaaaaaacattttatttaaaaaaaaaaagttttttaggtctggcatgatggcttatgcctgtaatctcagcactttgggaggccgaggcaggcggatcacctgaggtcaggagttagagaccagcctggccaacatggtgaaaccccatctctactaaaaatacacaaattagctgggcatggtggcacacacctgtaatcccagctactcaggaggctgaggcaggagaatcgcttgaacccgggaggcggaggttgcagtgagccgagatggcaccattacactccaccctgggcaactccatctcaaaaacataaaaataaataattttttaatttagaaagaatttcaagctcagcaaaagtgatacactctttattcagatttacctactgttaacatttctggtagagtgtttttatttatcgtttgcatgcatttattctgtcccctcccacacgcacacacatctaggagcggggagcatctgagagtaacttatatacatcatggccctttactactaaatactttagtgtgtatttactaaaactgagaacgttcttttacgttaccacagtacaactgccaacttcataaacttaacattaatacagaactttaatctgctgttcctattcccattttgctacttgatttattaatattctttaaggcattttttttctctccagtccagagtccagtgcagggtaagactgtgcaattacttgtcatgtctctgtaataggttttttaactaaaaaattattcagtagggtatgaaaataaatgtttattataatacttgagaagtattacatgatcttgaatttccttcaaaggcattatataaattcatttcttttattcacataaccatacaaacagtgctatgcatatgtggtcaaatgattttagacaaagtcatcaggatacttcaatagggaaataacagtcttcttcaacaaatgatgtgggaataattgatatccatggagtgagaggatgaacatttatttactttctcatttcatatacacaaattaactcaaaatttatcactgagttaaatgtaagggctaaaagcacaaaatttctttgaaaaaccattttttaaaaacttcgtaattttgtggtaggcaaaaatttcttagctagcacataaaaaagcatgaaccataaaagaaaaaagtttataaatggggttccatacatttctgttcttcaaaaaccaccactaagaaaatgaaaagacaagccacagactagaaaaaaaatctgcaacacataaatctgacaaagaatttgtatctaggatatctgaagaactcttactattgagttgtcactcaataaacaaatcaatgaaaaatgggcaaaagattcaaatggacatttcacagaagaaaatatacaaatgaccgctaagtacaggaaaagacagtcaacaatatttgtcatcaggatcatacagcttaaatccaccacacaccaagtctgggttaagacgaacaactgcaactcttgtacactgttggtgggagggtagatgctgtaagtactttggaaaaacttaaccatacaacacagcaactgcactcctgggtacttcccaaggagaataaaacatattcagcagacactgagtacatttccaatgttcatagcagggttttttgtaatagctaagactggaaacaactcaaatgtccaccagcaggggacggctgacttgtggcacagtcgctcgctgaggcgctcccagcagaaagaagcgtcaaatgacatgcacacctcaaaagcaccgagtgaaggaagccggaaacagagaacacgcggagcactccatttccagcagccccccattatctgcggctcacgctccacggtgtcagttacccgtggtcagccacagtctgaaaagattaaatggaaaattccagaaataaacactttgtaggttttaaactgcacaccattctgagaagtatgatgaaatctcgagctgtcccactctgtcccgcttagggcacgagtctcttctctttgtccagcatgtccacaccgtatacgccacctgccctgagtcactcagtagccaccttagtggtcagaccgactactgcagcatcacagtgcttgagttcaggtgaccttccctttatttaataatagccccacagcacgagagtggtgatgctaacacactgttataactgatccatattattattagttattgctgctagtctcttactgtgcctaatttataaactttatcaaaagtatgtatgtacaggaaaaaaagatcatatacagagggtgtggtaccatctacagtttcaaccatccactgggggtcttgggacgcatgccccacggataagaagggactcctgtatatgaaacttcgggaaatcaaatcccatctacagtgacaggaagcagatgggtgccttcctggagcaggggctgaggaacttctgccagcgatggttcccttctgtaccttaactgtggtgattatcacgttaagtatgtaaacttgtcacatcttttcaaaccgtacacttacaatggttcatttgactctatataaattatatctcaaagttgaaccttttaaacagagcaacagaagacaaagtgatggcaaggggccactctgagttgagagggcaggaatggccttgctgaaaaggtggcatcggggacttaaatgagaagaaagatgccctaaagagggtgtacatttggccaatgtgtacagtctctaactcttcatttctcaatgttctgtaactgtgtgaggacataagattgagccaagtcacccaattttattttaacatttttaacattgaatcccccatagttgctatggacaacaggaaaacaatatgcactatacttccaggcctttcctaaaagcaaactccagctcccaccctagttccacgtcttgctttgtgttcagaaattctcatgtgaaccagtaaactcaacaaaccctttactatttaagaaggaacaacccttgatctctactcactcctccccaaagtaacggtccaccctgttccttccgccctctgaatacactcctgttgtccccaccctccagcccaactcctccccactggcaaatgtcctctttcacacagacacactttacagaggactctgggagaaagcgagagcttctgtgccccaggccaaataacaggtttaaaactcgtgttttgctcctgcctgagcttcggaacacgacaactaccagcagatacatccccacgtccactgtctacacggatgtggcacacacagcgggttccggatctgtaagaacgcagagttggtgaggtctcttgcacacgcgccaccaggcaggctgccgtcctacatgtctcccgccagctctgcccagatactgtttctacattaatgctgcaaagtgctctcattttcatcatgttgagcttcagcctagaattactgaactgaactttatctctatccacagaagaactacagcctgcggttagaaaggtccctgtgtgggcacgtcctgggggaggccggccagagcagagctgtcccggacggcgcctcccaaggacaaggtcgagggagctggctcgtacttcagcagcccctgaaccgcccggccctaagccgtcctgcaccacccatggggccgactcccggctgcaactctttcccctcaccccgccgccgacagcagaagtttcaggggacaagggggacctgccagagcgagagtggagggtggaatacagtctaaaaggaacatacaagtgttaagtgacaggctctatggaactgccggagcagagcccagcagaagacaagcgtttaagaagacaaagcagtagaaaccccgttttcctgacagggcgttcggagcccttcacaatctgaccccagcctactccctggagccaggtggggatgcccaaaggcctcacactccccccgctgtctggtgctggggcctgaagcaagcagcaaacccccccacccgtgggctcccacgccctcatctgtgaagacatcaccaggccgctcgcaggtctgaggggaaattagagggtaatggcgtcagcaccggcccagggaaggcaggacggcgacaagcacagtgggttctcttgtttggccctctccgccctgggccatgcagaggctggagcagggccaggtctacacccggtccgtccactcctccctgaagccgccactacacacagcgctcggtaagcaggggccctccccaggcatcgtggaatgaacgaggagcatttcacttgctctaccctctggaataaaagggggtcagtaagggaaaaaagactccagcaagtaactcaagaaccagaaacaataactgacaatttctgattaagtccttggactctggtaacctcctaatgtttctccctagtgcgcgggttctcaatcagggacaattgtgcctccaggggacattaagcaacatctggagatgattttgattgtcaggactgggtgggggtgggaaggtgctactggcactttgtgggtagaggccagagatgctgctaaacatcctacaatggaaatgtcaacagcaccaaggctaagaaaccctgccctagttagcgctgagcagtaaaaccaaaggtgcctgtacaccagcaaagagggccactggggaagtggtgtgccactctgcagctaacccgagatgtgcaggagtcccaaaaggcagcggctgctcagggcaaaaaagcaaaggaaaccaggcaaaatccctgggaactttaaaaatagaaaagtcaatcggctagaggccgcagcgggtgaggaatctgctgccctggcctggatgtggagcgcgattccagaatatcacttgaagtcatttcatggaatacaatcacagtgcttacgcgctgcctgacacagctgaaggcaattccacacaccaactcctttcaccttgccaataatgggataaagcaggtactattcccatccccattctgccgagaaggacgctgaggcacagtgagatcaagtaacctgccaaagtcacacaactgaacaagcagtaggcagggcagaacacacacctggcagtctagaagctctcggtcacgtggcatccacacctgcagacctcatgctcaccaccatgcaggatccacgcactcaacacacatgggcgccacccccccgccctgcagcccatgtgctcagcacagcactctaaccaccagtccacactgcctcccttcctgtgacacagaattcggaccccaccttgtatagaccaatttgtaaagtagctctccctgtgctgagctgaaatctggtacccacctggccctggtttctctctttccttggcactgctcaccgtctagctgcccatcacatgtcccaagacagcctcatgctccctgccaggtcgcaagtcaaacaatgctacttccctcaaccatttctcacaggtcatcttttcaggaactcttgctgttctggggatgctcctctggatatacttcaaaatccaacaacaaccctcttataatgtggactcccctccacagcagaacacaacaccatcaacacagcatgtctccccaggacaaacagaaagactctgaagcagtgaggtggaaccctgcccttgagggccaatcaacgtcaaatgacttgccatctcctaatagagcaaaaagtggtcagtggctgtaaaaacctccacgtctgacacagtgggaaatggaggaagcattactactttttaaattattattatactttaagttctggggtacatgtgcagaacgtgcaggtttgttacacaggtatacacgtgccacggtggtttgctgcacccaccaacccgtcatctacattaggtatctctcctaatgctctccctcccctaacaggcccaccaacaggcccggatgtgtggtgttctcctccctgtgtccatgtcttctcattgttcaactcccacttacgagtgagaacctgcagtgtttggttttctgttcctgtgatagtttgctgagaatgatggtttccagcttcatccatgtccctgcaaaggacatgaactcatccttttttatggcttcatagtattccatggtgtatatgtgccacattttgtttatccagtctatcagtgataggcatttgggttggttccaagtctttgctattatgaacagtgctgcaataaacatacgtgtgcatgtgtctttatagcagaatgatttatagtcctttgggtatatacccagtaatgggattgctgggtcaaatggtatttctggttctagatccttagtccctttggaggaaaagaaatgaacccattcttaccaccaaccaccatgttgcacatgacaaacagaaaatcaaaaattaagtgttacagtaactgaaaccaaggaaaacctttcttgtcttaacactcaactacaaaagcatacctcccccctcgcccagatgaaatggaaacactttaatggaagggttatttccattctaaaagttactttatacaaggaaaaggaaaaagccctagacccaacttcgcaggcttcacagcccctcacactgtcagcatccctttcctggtgcttgaaaacataagaaataaattagagagcaaaccacaacaaagtcggtttgaagcctctcagccatgcctacgacaaaccatttctcagtgtgacaggtactgttattaccaacacacaatccaattttctctgagaaaatgacatggttgagagtctgcctctcattcctaaaatgtattcagcaggagtcttgatgggagattaaacacaaggagacgtcccccgagcagctgaggggcgggatcaggagagaagagactgtccccacttattttcttagtaccccttctctaactttagctagcttgcttgcatcaaagtaaaactggttttctaactagtcttttatgaggattaaaacgttgtctgagcttattatttttcaactcaagtgactatccagaactactatgatggcttaaatgtggcttacaggcgtcacttgctttggtttcttatcacctatgcttgtttcaccttcagagtgaggaaaaagcagaaaaaaagagaaacgtgaaattaccaataaatgtattctttccatctcatctcaaagtaaagcaacagtgcttactctaataattctgtacctcagaaatatatacatttagcctaatagtgtcttttttgtgtgtttttttggttttttttttttttttttgagacaaggtctcactctgtcacccaggtgggactacagtggtgcaatcctaactccctgtagcctccacctcccaggctcaagcaatcctgctgcctcagtctcccaagtagctgagactacaggtgcatccaacacatccagctaattttttaaatttttcttttgtagagatggggtcttgctatgtcaaccaggctggtttccagctcctggtcttaaacaatcctccttcctcagccccctaaagtgctgggattacacacatgagccatgaaggccggcctgcattcttaatcaatttccacaaggaagagtaagtaaacatttttctaagaaataaagaaaagatgtcataaataataacattttaacattttaaaataaaatccctttacttacagaaaagaagcagattatcccacacaacagtctgaaagaaagctctcatcagcgaatctagcacagacaaaacattttaaaatgccctattcatctaatactgttttcaaagtaatgacagaaatagcatacatcactgctttatttcactgcttatagagcacagaccaaccttttttttttttgaaatagggtgtccctttgtcgctaaggctggagcgcagtggtgcaatcacagctcactgcagcctcgaccttctgggctcaagggatcctcccacctcagcctcccaagtagctgggaccacaggtgcgttccaccacagctggctaatttttttggtagatggggtctccctgtgttgcccaggctggtctcaaactcctgggctcaagcaattctgccttggcctcccgaagtgatgggattacagaggcgtgagcccctgcacccagcttaacatgacttcctaaaatcagattctgaactcaaggtttgtttactttcgcagtttaacaaatatttactgagcctatcttttgaaatccttccttcagtaagattatagagttggtcttcaaatctaaagtcaaaccccccagacagcagacaaaggcccctcaggtctcaccccaacctgtacccccgccctccggcctccacatctctgtggtcttgcagactctgagcatctctgagggatgtctctagtgcctggaaagccctcactcaccacctcaccagcctggcaacccctccttccctgactcctctgtgagagcgcaaagcccccaggccccatagcctgccgtgcatctcgttcaccaggtcagcagcatttactgagcacctcgcatgggccaggagtgttctaagcaccacgggtcagcaatgaatctgacatatcaaaatggtcgccctcttgagatgtgtttcaggtagggagacagaactattaagtataaataactaaaatatatagcaaattaggagatgaatgttatggagaaaaaaataaagcaaggctgggcaaaatgacgtgggaaaaagcgccgaggtgcagtctagagcagggtggtcaggacgcctcactagaagatggcatttattgcacttcgcccataatgtgtttgttaccaactgaaggtttgaggaaacggcaccaagcaggtctgtcagcgccattttcccaaaagcacacgctcacttcgtgtctctgtatcagcatattttagcaataacatattttttaaatgaaggtatgtacactggttttttagacataatgctattatacacttaaaccataatatagtgcaaacatagccttcatgtgcaccaggaaaccaaaaaatgtgtgtggctcacttcattgcaccattcacttcactgggatggtccgaaactgaacccacaaaatctccaagttatgcctgtagtaatatctatcacatatcaagtactacacttcagcctgtgtaagggtgacctaataattccatgagacgcttacgcctggcccatcctgcacctgaggacgcaggggctggggaatgagtgcagtcacgatgctaggaagcggctcagcccacgtggagacccacgcagcttggccctgacgcctatactcttaaccacgacaaactaaaaataatactgctcaaaacgcttcccacaaaagccaaaagccaatatgatcgattctaaaaaaaacacttaattcagaaaacaaagtgatcccttatcacttttgatacagtgtgagaaatcagcagatctcctggatgacgttctggcggtcagcagtcttctggacactttccggacaccagcccacagtcattccctcccacagcccactcagaactgcaactggaaatccaaacgcattcaaaaactggctaaggcaggtcagcattttagccagaaagtatctgcttcactcaagccagcagattctcaaatcacaatcatttgactcaaaaagcaccattagttacagactcctgtgtatgccagattatgccagaaaagcatacatgtcctggtaatgcaataaatcttgacctaagctagaagagtgtcaaaaacctaaatacagaaaaaagagtgggtatcgaaacagacacagcatggagcatcaggcctcattacaaatcatgtttttaaagaatttcagtcgcttaagaaagggctcacaacataatgctgttaatacatagcatatgaaacataaatacaagaggacatatctatccacctatttacagttcatgaaaataaaagggaaagatgaagtaataacataaacagcgacaaccaggcgcggtggctcacacttgtaatcccagcacttcgggaggccgaggcaggcagatcacctgaggtcaggagttcgagaccagcctggccaacatggcgaaaccccgtctctactaaaaatacaaaaatcagccaggcgtggtggcgggcacctgtaatcccagctacttcggaggctgaggctggagaattgcttgaatccaggaggcagaggttgcagtcactggagattacaccactgcactccaggctgggtgacaagagcgaaaactctgtctcaaaaaaaaaacaaaacaaaaacagcgactacaaaggagtaacttctcctttgtaaaagtgttttttacatctcaaattttctaaattgaacatgaattttagattggaaatcatgcactctgctcatctgtagagtctaagttctcttcggtgcacctctgaccaccctcctcccttcaaccccgtctcacggcacaccttgcttcccacccggggtcagccaccgtctatttattcagttcactatatcgactgaatttctcaatagcccgcaaccttaccttgccggataaatgtatattttatgatgccaaataaaaatctccattttaaaccacctctgcagatggaaaggccctgtctttatgctggtaaaagaatgtcacagcacataccattataaacgccacacgtaacccattcatctcctgaaatttatgtcagaaagattggaaataaaatctatattaacagcaagtgcttaatatcaaatgcggtattaaaaataacaaaaattttcattcctgtaatactaagaggctctcttaactccatttaacagacacacagtgccacctatcagccatcctctgtaactgcaggtgcaaggtaaagaaccgctcatagacatgccttcccctctccctgctatttacatgccaaagaccaccacaggttaagaggacagccctattagaagcccctgctgtttctatattgtgttcttgaaaagttttacttccttaggaactggagctttttactgctgaactgaacccagagattgcaatcccagcgaagtctgaacaaatctatgtctaaaatacgggctgttatgatacccaacagtgtcctaggagaaatccaagccaatctccaggtccagccctcaacagccgcctgatgggaagagacataacaattaatggcaaatttcttacaaggattacccacacgtcttctttcctctaactacctcctcttcggcctgcaactgctgtgatttggcctctgcccagcttctctcacaaggctgctcacccctgtgtggtgaacccaagggctacctcttgaccctcatcctgtgtgacctctcagtgccacttaacagggccccctggcttctagagttttctttctcttctcaggcgactccttcttgacttccgtgacagttaattttgtgtgtcaacttggccagggcacagcacccagtgatttaaccagacactaaccgaggtgttgctgtcagggtgttttgtggatgtggtcaacattaaggaaagatgaccctctataatgtggttgggcctcatccagtcagctgaagatctcaagaacaaaaactgagatttcctcgagaaggaattcatttccccgagaaggaattctgcctgagtttccagcctgccagccttcctacaaattttggacttgccagcctgaaagcaagccaattccttacattttatagataatgtagagatagaaatagtggccaggtgtggtggctcacatctgtaattccagcactttgggaggctcgagcccaggagttcgagaccagcttggtcaacacagcaagaccccatctcttaaaagaaaaagagatcgtgagatacccgctattggttctgtttctaaagagccctgactaacaatctctctgcccttctttctctgctcatccttaaaagcctgacctttctgctggttcaggctaaggccgtcttgtcctcacctgttactctcccttggtgacatccatttgcagacctttcatttctgtgagcacacctttggtcctcaaatctctatgtctggcccagacctgcaaagcctccaacctacaaatgcaactcaacatctccaccaaactagatctagtcttccgctgcctcagaagggtgccccgctcctgtatctcctgtcagtaaatgaccccccaccctcctagataagcagcaagaaccctgaaccttttcctcccacttgtcaagctctcacctatgctctggagcctctctcctctcccggcttcctccatgagccacctacagccacttcccaatacaggcactgtcctgcctctgcgtggttctacagtggccttcctaaatccagtctccatctccaatccacatcccctggtgcagcccaagcacttttctagaacttaagttgggtcacattacactcctgcagaaaattgtcaacgccctcaggataaaatctaactccatgcgaggcccctccaggtggatatgcctgtctttcctcggagccccagttggcaatgttggcccctgtgccttccccataagccctgtgtaatctggccccaagcacatcccaggcttcacactccccattcccacattcaaacatgaggtccagggaggctaaattccctccagacccacaggatcgcgctactctccttcaccctagtgctgcaacacagatcctgctgctggaaaacccttcccctcccatgctgcattccctgaactgaccaggtcacaccagccttcactccgacctgagttgatctgagtcgtcctgtaggatggccgtcagccacatatggcaattttaactcacaaaagttaaagtttaaaaggctgttcctcagctgcaccagtcacatttcaggggctcagtggccaccctgggcagcacagagacagacactgccatcaccactgagcaccattggagagcacggactcggattctcatactcctgtccacacggaggcccaccctgggctcttgcggctctcccagcacagccctgacatgccctggctgctcagcacccgcggtgggacctggcgctctgcaggtgctcactgacattactcgatgttgccacagtggcagagctccgccatccacatctccaccggcctcccacggcaacaggtgtcttaatgttcttgtgagctgggcaagtcaatgtccaatttccagttgttaacatcagccttcccttcccactaagacaaaatcatgccatttggggatttatcaacaggaagcatcaaatagaagttatgagggatattagtgtggaactggggctaaaagagcagagctctggaaccttctctgcccactagcctgaccaaaccagagcagctacctttttatctgttcacatattatacttcaaccaggacttcatctgaataaaatacctatttgaaaagacaaaaaaaccaatgatatgtatttttttctgattttctctcttcaaatactaaaggtatttaaacatactcttaaacattaaaaattaaaaatagagccggcgcagtggttcacgcctataatcccagtgctttggggctgaggcaggatgatcacttgaggccaggcgtttaagaccagcctgggcaagagagcaagacctcaactctacaaaaaaaaatttttaattagctgcaagtggtcgcccacacctgtagttccagctacttgaggggctgaggtgggaggactgcttgagcccaggaggtcgaggctgcagtgagctgtgatcacaccactgcacttcagcgtgggcaacagagcaaggctctgtctctaaatagtaagtatttatttattttatatctataacccatttaccctgcaacatgcttctctagtttaaaatgcattcacataattatatatattcaattcaagcaatttgttacagaaaaatcaatccctttgctatagcaggatgtatttacatctgcttcacaaacttcatgaagagtttttaacaactcccaacccactgctggatccagactgctggagcaggctaaagatattttattgctggtcccaccctccctcctaggtttgtttcccactaccttccccaccaccgtaggctctggccaaaacaggcaccgcaggcatctgcccactctccttctatctgcgctcattatcttccctccacctggcctgtccacccacccccagctctgcaggccaagctctcagactcagctcagatggcagcttctcaaagcctttcttgatcccctctaattaaatgcaatctgccccttctctcaattaccataatttgcatgattcactttaatgacatttagcttgtagtggttcccattagagttatttccgtatttttagcttttttataagctcttgaagacaagaaccgaatcatctcgtacatacttaaatcccctaatttaacaacagtgtcttgtacctagtaggtactcaagtacctcctgaatagaactgagaagtagaaagacatccattacattacaaagcaattcaaattggcttccccctcaagtaaagcgtgcaagttactaaacactggctgatccaagagtgggctggcgctgatggcggttctcaggttagaagcacattagagtcacctgggaagcttttaccatccaggtgtccaggctccacccagcccaagcccaattacatcagaatctcccagggtgggacccagactccggtccattttacagctcctggatgaagcccacggtgggcccaggctgattttcacctgctctcacacggaggcttccccgcaggccccacccctgtcattcctggaggcggaacacataaagcagatgtgtaaatacccttctcatctacacatcagacggaaataaaaatcggacagatgatggctactttcatctaaaaaaactgttttgcttgtttaaagattctgaatttttagtcaaactcacagaagcagagagtggaatggcagttaccaggtgctgcggagtggggagatgttagtcaaagggaacaaacttgcagtcagaagatgggcaagctctgaaggcctaattccagcatggtgagtacagttaggaagagggtacggtgtagtggaaatctgctgagagaggaatcttacatattctcactgcacacattgaaaaaggtagctgtgtgaggtgatggatgtcttcattagcttgattgtggtaagcattccacgatgtacatacctgtatcaaatcatcacactgtgcaccttaaatatgcacaattttcctgctcttgatgtgtgtgtgtgtgtgtgtgtatatatatatacacacacacacaatttttacttgtcaatatacctcaaaaatatacctattaagtactcataaaaattaaaaattatatttcaataaagctaggagaaaaaagccccactggcccagacgagcgcctcaaggcgcaggtgtggcagagggagagagacgacctcttctgaagccaaaagcacatcttcagggcacccactctgttggtctatgtggctagcacagctgaccaaatgaggctgtggaaccagtgaaagcacacaggtagccgaggtcaggaatcggcaccatcactcctggagagagggcgtcttacccggcaagagtgacccagcaggttggaagcactgcatagtgaaccaagaggaaaggcacacccctaagacacaggaatgcgcggccgtccagagaaaggtgactgcgtgctctgcagaagtatttgcagcatgtcttctaaccagaacagtgttttagaattatttttaaaaacccacagacctactgatctgtgcacttgctaacacagacgattcggggcatgctctccaccgcactaaggagcaggagttacagaagggagcgtagcagggagtgcaccgagcaggagcgaacctcgtcagtgcagcttcactgctcagacactgcttctggagggaccctactccatcccacacagcgagagtccgtctgggagggctgacggcttccagaaaccaagtcagcaggagccctagagtagtgtgtgactctaccctgggctgtgagcagagctcggcagtgactcttccacagtctttcctaaaggcagcactgacttgctgaggaactagcaaaggccacgcctcaacatgccccgcctgaggagggtccgcagataattatcacaggccaacccggacagtattagaatgaggcttccataagtaactcctcacatgtctacaacaggctctctcctgcttttgtaaataaaactttataggaacccagccactcctagtcgttcaacacggtcttcggctgctctggcagaactgaataaatgcagcacagaccatacggcctgcagagccaaaatgattcaccatctggccctttacagaaaaagttggccaactcccggtctcatatcaccatggggaaaaaaaacactacagcagctgttacctggcaggctaacgcacagaaacgggcattcttaggcctcaatattaaacttcaacttagtcatcaagacccatactttggaaagaagtccctttcttcgtggctacatgagaggcagtggtgcccaccaaacattctatcaccctcccgcttccagtgcccggtggaggctggcccacgtgacggcccggggaggaggggtggaatggcgcaccagctgtctcctccccggcagcggggacctgaggcgatgtgttccagaagggcagccacaacacggtggtggagcctactgccgaccacaccagacgtgaaccacgtgcaaagaaataaacctttgctgctaaacactgagattttggattaatttttatcgtaacatattctggtctactctaacttaggtggcaaaggaggtgacctcctttgtgtctctcctttcccacaacggggtatagagttcagctatgtgacaaacgagaaagcatggccagccccaggacattcaatccttccacctctcaatcctacatgaattctctatcacttgcaaggcactcataacactggagaggtcctgttcaaaaaaaccaagacggctgagggaagacaggatttattctgcacaaacttgacagccagggccaagctacacccttctgaaagccacagagaagaaatgattatcctagtgacaaagtggtcagggacagggtttccctctttgaagaataatcttgccggctatggtggcatgttcctgtagctacttgggagactgaagcaggaggatcgcttgagcccgagaggtcgaggctgcagtgagctgtgatcacgccactgcactccagcacgggcaacaaaaagaagaatcctcttccctccgcattttacataattttcagtgtgatgcggtgggaaaagcatgagttttcaaagatgcgggaaacgggcttaaaagccaaccgtgccacttggcagccacatgatctcacctagcacataacccaggcgcctttcgccaccttttcccaactctggggctcagtgtcattatctactaaataaggggctccatctacatggtctccaagaccatctctgctccaaaacttctataaagtccagggagctaaactgtcaaacaagaaaattcccaccccgtgaggagcaatctgtaactgctggcagtttcctctgctttatgatgggattaagattgaacagtgttccctgctgctgctttcactgatgaggagacacagctaatgtcaggcgggattgaagtgggaaggacatgacccgctagctttcttcatttgcatactccagtctctttctagttcccctttctttgtattttgtattagacaagtgtttaagaatatgcagcaaaaactgaactgtaatttgtttacaccctcaaaagttatctaaacagaaaaaaattttaattataaaaaaatcttaacagtaaaatttcaaacaactttaaaacacaaaatggagaaagtaaaagttatccatcattccaccccaaagatattttatttactttaagagtttagcatacataattcaaaaaatacgcaaactatatattttatataaaatgaaatatatgtaaattttacaagttcctttttcacttcatatatactatagctatcttttcatctgaatttatattgatttacctcattctttttaaaagctacatagtattccacggcacaggtgacacaatgctgagtgctgtcagttgagcctgattctcttctctgtacaattcagcgacctgagtctgagtaaggcgagtgagtcatgccactgagctgacggcgcgactcactcaagcaaagactgattaaaggtgcaggaaggctaattgcccatcacctcctgctcaccatctcaggctgtcagtaggatttctttttactcaataatcatatagactagattttcctcattccaggtttcaaaattccctgaaatctaagaattttgaaaaaaatcataataatacatgagcatattctatctgactgtcccattttgggctctaacctctatgtgatgacaccacattggcaccaaacccaaatatgcatgaaacgaaaccaatggaattcacggaaagcatggaggagggcatcactcttactttccatcgatatttgtggctaaaactgtccaccttaaaatatatcttgtcagataaaaataaaatatatttacaatactgaaatacttccagttggccgggcatggtggctcatgtctgtaatcccagcactttgggaggccaaggcgggtggattgcctgagctcaggagttcgagaccagcctgggcaacatggtgaaacaccatctctactgaaacacacacaaaaaaattcgctgggcgtggcggcgtgcacctgtagtcccagctactcaggaggctgaggcaggagaattgcttgaacccaggaggcggaggttatagtgagctgagatcgcaccactgcactccagcccgggtgacagagcaagactccgtctccaaaataaaataaaataaaataaaaattctagttaactgagtcatatttccattttctcttacaattatattgtctttaacaaatcctatgaaacagaaggtgaaacagggatatttactagtaatagacagtaataccgtcttctaagaattatgggcctttaattgtggaatgaaatcaaagtaccttacccatgcagctcataccttatacagcggacgccgcacatcgatggggcagttctgtattacttcatcaacaacatctgagatggactccatagagtctgggttggcaaactgaattgtatatcaatataaaagaaacattacacatttctctcaaatagaacaacatgaacactcctttaaagtaactttaacaaatatacaatttattataacttaaaagaattcacattggaatgaaggatatgtcaaatgaatcccatgtgactacgtgtgcgtggggtggtgatgacacatttctcctcatgaggtaaaatgtatggatttagtgaagaaaaaataccaacaacatcacagacagaccacccccaccccatgaatacacagtgattcagtctactaagagcagtggagagtatgtgcacgatctacgtgacacgcagtgagaaacatgactttgacatatcatttgacaatattcgtattatgagaaaattaggatataaggaaaaagaaacaggttcaatgaaagattaattaaacctggtctagaagatgcagggaagtgttttgtttaatgagaagggtttgtttaacatgaaacaatccacatgataatcatgttattgaataaacagccatagattcaattccataagttaaataagctaaagtataacgaattcaactcaattacatttcatttgaaatattttaaaaatcaaagtaagcttgaatgtgcactctcagaggaaggaggaggatattcagttgctcaccagctgttcactggacatttgactgttctatgtccatttcaaatcaatactattaaaagtgagcattcactagattatcattgttattattttattcttcagattactagcgaggaacacattctatgctatttctctgtacaaaatagtcatatacacatctaaaaacaaacagcagtttgtaacccacctactgaatataaactgaattagccaggaatatataccaaaatataaataaaatgcattatatgtaaatcttaaaatgtgcctcctaattactgctttctgcaaaagtactaataattccttatgactactagttaaaatgatgacatttctaattcttaagattatctaaataatagaaatgctggccttagacagaagctttacctaacttgcagcagggaacagagcaggaccaactgtccagggttaaaattagaagttaggaagggcaatcaccaaagatagaaaggttacatattatcccactcttatgcacaggcaacctccatacaggccttgagagtagctacttgtaatgctagcatgtgaccacccacaacccttggagattacttttaattctattatcatctatcgctcctaaaagtcttcctaactatttgtggtataacccatccttaactattaaaacagataaccagctctacggagaggcaaactgaacaatctgtcaagcagacaaactgcatgggggatgcagagagaccgaatgacggccaccctgctcacaggcccttcgctgggaactgctctttctacactctgggtggcagtatcgctccatcccacacttgagcacacaaaaaaagaaacaccttacctccgggtgaaagaatatttcaggtcccaggaatctttcgtaaccaacgtctataacaaacttcttctggttgatcgcattgatacccgtgtactgtttgatccacttctggggatccacatcatacttggcaaattccttgactatatcggggcaaatgtaacagtatttctcctgcatacacacacaaagatgttgccaggcattaacaactgcccagtgtctctgccctcagacaaataaccaggaagcccatgcagtaaacacaccctgggatcagaaccgcccccaccgttactctagtgtggatatgcatcaagcctcacattccatcgtctttcatgttagacatggttacacttggacttcggacaggtaagtctgctttctctgcaactcagctattaatctcagccttggtctatccaattctatcgctatcatatctgaaatgatgtctacaggtgtctagaaagcacctcgtcttgccttgttcctctcagatgcctcctatggcctgctctggcacctcactgtggtccacactggaccagtggacccgtgctgcgagctcaactaccgagtgcggcactgtctacaccctaaacctgactgtagaggcttctttgggtcccatttgggtcccagcatgccacaagccgggtggccactgtcaacctgctggttgttaatctggtgtggagctggccacagcactgtcatcagctccactgacaccatctctttgcctagagacagtgtaccttgttgactgggtattctaagtccctcaatcaacatagatttattgtctaggcacttgggatacacaaggtagcgaaacacacagatccctgccaagattacactctagctgggagtcagaaaacaataagcaaccataataagtaaatgacatggtaggttataaagtgataggtcccggggaagaaaggaaaagcagagtcaggtgggaggactgaagccgccaggatgctgctgctgctgctgctgcgagagaagtcgctaacgattcccaccctgcaccgacaggcagcctgagggatgcgaagtgtttcatgggtatctggtaagatgaatgttcttggacacctttgtgttgatatgtgtccttagagctggcctcagcatagcagcaggtgacccccagatacttgctgcctacaggaagcacgaggtgggccgcccagctggcgctgagcacactgtggaaggaatggctctctcaaggacctccaaagacgctctcgtggtattaagtttaaagtttcttagcatccctgaaacatattctaatgccatcttctgggtatcttggatatactctagcggaattttaagaagactgacaggcaagaagtgctacacaaccctgtgttctttgatgacacagagcaacagggtcagctgattacaacctcaaatctaccaagactggagacaaaggcattcagttctcctcacaggcctggtcaacatcctacagcatctcagcttacttaactcaaatgcttcctaggaaatgtttccattgagttgggtgcagagtaacaggcttaaccttaaggttcaggattcatgctgcaaggttggtgtgctcacgttacacactccctcaggcctgttcgcgaccacagaaggccatggcagtaaggggaagcggggggagctctaaaccacgcctttcaggatctgttccttcaaagagagaagtcaggtgagaactaacagggctaccccacagagcagggccagggcagctgattcggaggctacgaacagtctcttttactcccagccttcactggggggagacacatagtcacatcgagcacatcagcccagatttcagggtccaaattggaaccccaacagcccgtgaggagagttgaaggcccagcatgagggtcaggaaagcccctccttggcagtgttgctcagcaatcctggcggaaatagggaggactcagactcactggagtggaccctgggcgtcaataacaaaaggctcaattcttttttttttttttcttcttttttgaaatagagacgagatctcgctatatcacctgggctagtttcgaaccctggctcaagcaatgctccagcctcagcctcccaaagccctaggattatagatgtgagccactatgaaggggctcaattctgacttacatttctaacagatttggagtggcaagggagcttggatcaaatagtcaaatattcttccatggaggaaaggcaaagaaaggagaaggtaaccccttaggaaatattttagtctaaaaaagaatatctaatgatacctcaggaaaccttcccctgagatggaagggaccacgtcttccccacatcaccatttcagcactgagagcccccttcccaggaatctctggtcccaggtaaagcagggcaggtcatacccaactgcagagcctgcctcatgccagtgcctcctgacctaaaaacacctcgggaatcatctctggtgcttcctttccttcagccagcctcagttacgaggtgctgagaagggaggaaggcagtgaggagaagtgtgggtgtcaggctcacccccatcaagctctgctacactcagtaactgtgccataaaggaagaagatgcttatggccacatgtcacagccacacctgtgtgtgaattttgtgcaatagctctggatcctaggttggcagtgttctgctgctgtggtcgcctcctgattctacagcgaagcatggaggcagtatggaaggagcgctctggtagatgaggctccagcagtgaggctccagctgaacaatgctgcctctgcacgctggtacgctgtaccagctaccaagctgttctcagtgacagctggaacctcagagcatctagtttggaagaggttaagctttacatcttcagcccacttaaggggtaaaacaaatcaagccccacactcatgggaaggggagaggatggaaaggaggggcagggatgatggcaccaaggggaagtgtccagaacaccatctctctcacccccaaaccagccggtttcccatctgtttttaccttaatggcttttgcggtctccagtgactgctcaggagggattcccacctccctctcccttagcagctgttgaatgaaatacgtaatatctctacctgcaatcgggatgtgtttgatgcagcttccaattacataaccttctgcctagggaagaagaggaggcagaacagctgtgttagtgatttcgtggtggagagcagcctggactcacgaggtttcctgcctcagcctccctgtctgcccctcacggcactgacaagcattgacagaatccccaccctctgcaagctcagtacagaaggtctttcaaaaggactgcatatgcaattccattaatattcaaaattccagattattccaataacctgacactctccaaaagcaaccaaaatgatttcattaggaatatgaaaagaaaaaccacataagatagttcatttccaaaaagaaatgctgtctgtaagaacactaaacccaataggttctttccctaacaaaaaggaaaaagttttatttataaattgttaagccaactataaatctacttacgtttaaaagtcagcaatttggttaatacacagggcttagattctaacaacctggactcaaatcccagctccacatttgcaagtttcacatgcttcagcctcagcgcgtttgtccatcgtatgaggcaaacaataccctgctggggccaatgatacagttcagatgaaactgcgtgtgtcgagcacacagcactggttttgggggctgggagcctctcattccactgcctccctaagccagtgaaggcatgtctgtgaggggccaggaaaggagggtgaccacgacctgggccgatcaatggcagggccagtgtcaagtgtccacatgcccacagcaatgatgggcccaaagctccctcatcagccttcctgtgggcacagacctgccacaggagccacaggcttggacacacatccagcttgttctacaggggatgagcaggatgctgaccgtcagagtggacaacgcccaccgctggatcatccggtaaagacactcaggtttcacgttacagcacatcacagcttctgtgccacagtccccaaatgagacagaagggaacagaagtgaaacgctgacttcattttacagatgtattcattctaatagctgcatctagtcaccagtaaagttgcaagaacaacttactgaattcctcctatggtttctttctgatatacctaacttccagaagcaaaaaaagatttagcctttctgcagagtccaagtatttgtaaagtattttaagatggagataaaagtataaattactaaaactcaacttaaacccataaaaataatattagctttctaacacataaactattcacaattactatattctatgcattacacataatattttctaaaatactgttaaataaatatcagctcatgacagtggtaaaaatattaaaacaagatacatgtccaacaacagaaaaataaattatgtacttcttaaatgtattttcacagaatatttaaccacaagagaaaaaaactagggttaaattaatacgcaaaatataaccttaggattgtattatatgtacaatcccaaaccagacatgagacattccaattgtgtttaaagtgtgtgtgtgtgtgcatgcatgcgtgcacacacgtgtcttagaaaaagagcttaggccgggcatagtggctcacgcctgtaatcccagcaccttgggaggccaagacaggcggatcacctgaagtcggcagttcgagaccagcctgaccaatatggagaaaccccatctctactaaaaatacaaattagtcaggcatggtggcgcatgcctgtaatcccagctactcaggaggctgaggcaggagaatcgcttgaacctgggaggcagaggttgcagtgtgccgagatcgtgccattgcactccagcctggacaacaagagtgaaactccatctccaaaaaaaaagaaaaagagcttaaagactatacggctaaaagtataatacaggtctttgggcggctttaaaggtaattttatttcttcaaatttgtctattttatccaaattttcaatgactaatgtaatttttatagctggaggaaaaactgaactaagatacgattaaaaatcttttcaaacaactttcttagtgggcctggacacactgtgaaatgtattttctttccttttcctaaatcagacataagaaataggcaaagaaccaaagggggtgcaggccaggggcctacgggggcctcatcttggatctcagcagcgcagttctctgaggaaatggcagcctgagttctcggtgagtgctctgcacccagggcactaactcttctcaagatccaccgaaaggagtgctgagactggcttgaagggggctcaagtctagagcacacttcacagggcagggcagccacctctcctccccacaggaaggacacatagccaggagtacaaggtatgggggcgggaggctggcttttttctccctgactgtaggcccatcgaccattaagcctttcctctgcagtgatacctaaccttcaaggaattaaaggcattggtattagtacatcaccccatcaccttctcaaaatgaaatggtgaccattttttcaattaaattaaatgatttttgaaaatcctaatttgcattttaaaagagctgtgtgtatgtaaatatatacacaaacacacccccccatatacatatgcagaaacattatctgtaacataacagaagtaactagcaatggtggttcctgaggaggagacctcaaaggagaaagaccaggatgagtctgacttccctctgaataccctcttcagacacttctgatacattttccaaaaaaaatgaatttaagataattcctttaaatagtccattggaccaaaagaaaaattcagagatctcttgaaacccaaattaggaatcacttctctgaaaccaaaaagtggtattgcagagccttctgcaagccaaaatgtacaatctccccttcttggcttttaaattttttttttttttttttgagacggagtttcgctcttgttgcccagctggggtgcaatggcgcgatctcggctcactgcaacctccatctcccgggttcaagcgattctcctgcctcagcctcccaggtagctgggacaggcatgcgccaccacacctggctaattttgtatttttagtagagacagggtttctccatgttggtcaggcaggtctcgaattcccgacctcaggtgatccgcccgccttggcctcccaaagtgctgggattacaggcgtgagccaccgcgcccagcccttaaataaatttttaaaacaaaaagcaatttttccaagcttgagctggttgccattcacatcttttcagagaacacagatgtgctccttcaaatggccacgcactgcacctacaaattcaacatccaaaacggtgtctatctcccaacatgtcggaataaccccggaaaatgttcttgttgatgttacacccacggggatcaagcagaggctctgaagatccagagacatcctggacattctctgacattctgactgtaaaaatatgccaccatgaattgaaaattgccaaagccacaataattggccatccttttcattctttcccacatacttggggaattcctttatataaggtggcaaaaaataaaaaacttttattatctttctaagtacaactatcatctaaattgtattttcattacagaagaggttttttttttttttaatttccatccttacctcgaatcaggtgttaagcctacagagacttatatattaactattctgcttaccactgggataacatgggtgactccatctccgctgtcaatgactatccccgttaatgtacgttcacccacttgtcgagatgtccaagatgccgccaaggccagcactgcctggagaaaagacatgaaaaccgctcgcacataggaactctttctaaagccacctgcctgctccttccaggtccaatcaacaaactctcttacttaatatgtctgagtaactctttccttttcctatccatcctctaacccctgtccctcaaattccaattcaaacttggacaactaacacgaaaatgttgagtacttacaactataggagtcaagttttcaataaagaaacgtggctgactgtggtgactcatgcctgtaatcccaacactttgggaggccaaggtaggcagatcacttgaacccaagagttcgagaccagcctgggcaacatggtgaaaccccatctctacaaataatacaaaaattagccaggcgtggtgacacgcacctgtactcccagctactcgggagactgaggtgggaggatcccttcatcccagaaggtcgcagctagagtgagccataatcgcaccactgcactccagcctggacaacacagtgagaccttgtctcaaaaataaaaaaaagaaagaaagaaaaaaaactaaggttttacaaagaaaagccagtgaaaaagatatttcattatagaatcataagattttaatttctacttcattggtttccggcgtggggccacagattggcaatgaggtcacttgtggcgttgtttaaaatacagattactaggcctcacacccagaaattctaatctggaaggtacagggtaatttttcaaccaaagaaaatgttgccccaaagggaacatctgacaatatctggtaccattttcttcgtcggggcggggaggcttgaggtggggctgctgtcttctagtgggcagaggccagggatgccgctacgctccccgcaatgcacacggcggcgcccacaacaaaggactacccagcccaaagcactgagggtggaaaaccctggtcgaagacgaagcccaaaatctgtgcttctaaaaacattctccaggtaaacttgctgcacagaccactttgagaaccaccagtcttatgtctcctgaagtgtttccctaggccatggaatataagtaacttagccagggggaagatctgtagttaaatgaatttggaagtgctagaatacatagatttcgacacaggaatgctcagagcctggactgtgctgataggcactgtgaatcagcccgagaaagctgcaggatgcagcatcgcccaaattcatctttctatggaacttttcctcctcctcctcctccttagaagtgactagtattatgcagaaaacatttgggcaacacccatctcatttattccccaaaatttcagtcaattcccttacataaggtggcaggcaaataatgaccaaatgcaaccaaaaaatatcacaccaagaaccgcagcttcagaacaagttctgcgagctcatgaaaacacagggtccctcagaatcaagtacactgggactcataagagcccaaaatcggaaaggggaaacctctaaaggtaattattttgtttttctgatcaaagtcaaagatgccaaaagaagaagcacatctacacctatatcttgtcacccagataaaaatgcatgagactttaatgcatgtaaaaagagccagacgacgtctataccaaaaaatggcatcaatataaaaagaaaagtcatgggacaccttccctatagtcctgaatggcatggggacgggggagggagtggaaaaaggaagggcacacagcgcagtcttccagcggagaaccttgggaaataccatttcttccgctactagacagctcaggtgctttaggaatcacaaacataactggttttacctgaactgcaatgtagagtcctggaacgttaaatgattcgaacataatttctgcaagatactctctgttttctggtgtattgagtggaggttctgtctgtaagaaaacattcactatatttagtgtttacccaaatttcatgtaaatacatcagaaccataaacaggttaacctgaaagtatgttagcgaggacattatacaattccctaattttacagacagaggatgcccaaagtgtattaaagaaatctggccgtgggccttaaaagctttaagacgtcagagtaaatacttctctgaaggcctctgttcttattacccacccaaattagaacaagttacagaaaaagaaactcttatcttcaataacataacacctaaacaccctgaaactgaatatcccagaagcaagttgccaagggctatgaaaacacaaccaagacgagtgaggacatcaaaggcgaaccggtgacttcaggtctcagcaaaggagagccagaggagcagcagcaagcccttgctcaggacaggccggtgtgaggagccacagggtggcagagcaggcagggttaggccaagcacccttacagtccagcggcaagggaagagtccagggcagatcacagcttcccccagacgctgcccaggacctccccagcctacccacacgccattagtccagaagaactctgctcattcagagacgagtaaggggcacaaagaagccagccaacagtgatataaaaacactcaaagagaaagaaaagggacagagaaaagaggaaaaacaaatggcagacaaaaacacatatccaggggcaggcgtggtagctcacgcccatcatcctagcactttaggaggctgaggagggaggatcacttgagtccaggagtttgagaccagcctgggcaatattgggagaccccacctctatgaaaaaatttaaaagtcagccaagtgtggtggcacatgcctgtgatcccagctactcgggggctgaggtaggaccacttgagcctcggaggtgaagactacatgaaccaagattgtgccactgcactccaacctgggtgacagagcaagatcctgtctccaaaagaccgaaaaaaaaaaatatctggaaaaatattgaaacaaagcagataaaaattcccaagaatttccaaagacatttccaagaatccaagtatctattttaaaacaataaccatcatcaaacaggaggaaatgacagacaacagaaacagaaaaagaataaataaacttgatttttctcattcaacaatatactatgaacatttttccttgtcaacaaatatgggtctatatctcgtatttaaaactgaaaaaataaaaagtctctggacctttgggcaaaacgtatacattaccctttattatgaatgaactgtgctccccctacctccagttcatacattaaagccctaactcccagtgtactataattggaaatagggcctttcaagaggtcatcacggttacctgaggtcataggggtggggccctaatttgacaggactggaggaaggtcttctaagaaaaggaagagacaccagaaatcagtctctctctcctattctctccccactctacgctcacacaggggaaaggcatgtgaggacccagcaggaaaggtgaccacatacaagccaggaagagggctgcgccaggagccaaccccgacggcacctcgaccttggacttctaacctccagaactgtgagaaaacaacgaactgtctgctgtttaagccacccaacctgtggtataaacaaaattacagcagccgagtagactaatacacccctacgacagggaaagtacaatcagcctcagccttcaacacggctacatttaacactaggacacatagggccacacttaagagtcttcaagggaagaaggtacgacccaagaattctatatctggccacagtgtcaatcaagtatgttacaaaatcaaaatatctaatatttgagatgatggatatgctaattaccctgatctgataaccacacattatatgtatcaaaacttcactctgtaccccataaatatgcacattatgtgtcaatttaaaaaaaaaacaataaaataaaatactaaggagaaaaaatatatatccttaaacatacaagaacttggaaaatttcattcccatgagccaaaatgtatgggttcatgaactattagaggataaactttatccactcaagaagaatgcagaaagtccagcaaaagacttacagtgagcaatgaagccatttaagacgtaggaataaagacttttctttggccgggcacggtggctcatgcctgtaatcccagcactttgggaggccgaggcgggcggatcacctgaggtcaggagtttgagaccagcctggccaacatggggaaaccccatctctactaaaaatacaaaaattagccaggcatggtggtgtgcacctgtagtcccagctacttgggtggttgaggcaggagaattgcttgaacgtgggaggcggaggttgcagtgagctgagatcacaccactgcattccagcctgggcgatggagtgagactccgtctcaaaaaaaaaaaaaaaaaaaaagacttttattttctgggaattaagaacagaatgtaaatgttataaattttaatggaaaaaaatgatatcaagttgagcagtgcacaaggaaagaaggagagagtgtaaagacacttgcctcttacagtgaaatcaaaagatattatttaaaactgataaagtatcagaggcattagtaaacataaagttataaatgttaacactggaataagtttagtaacatcattaatcaaaagcaggtggtggagagaaggaaggggaggcaagaacatgtggcaataccaacctggtcactgattacagcaggaaggagctagttacccctaaacaaatacagggtaaacatatcaaattatactaaaatatgcaaacatgagtccttttaatcattaccaagaacacacacccaatacaaagcaaagagaaaaataagtcttcagttaaaaaatactaatacataaataaagtacattaaaaacatgaagcataacattttaaaaaaatagttaaattaagaccaaacatatctgtcacacagtagcatgccataccagtccgattaagagatgtgaagtcaaactgactgggatcaaatcccagccttccactttactaggcttggtaagctatttcctctctccctgagtctcctcatgggtaaagtgcaggtaattagtaccccactcagagagttggaaagattaaaggcagtctaaataatgtgcttagagcagtactggatacacagatgtgttcaatggaagtgagttgctattactaaaattatcagcaaatacaaatgggaaattcaactactaaaagtctctcagttaaaaacaaaaacaaaatcaaattacattctgaggttaagagacccaactaaaacaaagtagcttggaaaggtaaaaagtcaacattgtctgtatcagaagatcagaaacaacctaaatacccatcactaaacactttggaacaatttaaaaaaatgaactctatgaagaaacaatctctatgatgaattgttaagtgaaaaagagaaaggtgtctccattccgtatacattcttaaatatccttctgcttcaacaatttgtaatgaaaacttttttttttttttttttttttttgagacagagtctcactctgtcaaccaggctcaagtgcagtagcccaatctcggatctctgggagactccacctcccagaattcaagcaattctcctgcctctgcctccagagtagctgggattacaggcacatgccgtcacgctcagttaagttttgtatttttagtagagacagggtttcacgatgttggccaggctggtctcgagctcctgacctcaagtgatccaccacttcggcctcccaaaggctgggattacaaggcgtgagccaccatgccaggccaaaaactatttttaaaaaacaaggtgtggtagccgggtgtgtgcctgtagtcccagctactcaggaggctgaggcaggaggatcactccagcccaggaggtcgaggctgtctgtagtggctgtatgactgcacctgtgaatagccactgcactccagcttggacaacatagagaccccctctcaaaaaaaaaaaaaaaaaaaaaaaaaaaaaacaaaaaacaggctgggtggtgtggctcacacctgtaatcccagcacattgggaggcaggggcaggtggatcacctgaggtcaggagttcaagaccagcctggccaacatggggaaaccccatctctgctaaaaatacaaaaattagctgggcgtggtggtgcacgcctgtaatcccagccagtcgggtggctgaggcagcagaattgcttaaacccgggaggcagaggttgcagtgagctgaggtggtgccactgtactccagcctgggcaacaagagttaactccatctcaaaaacaaaaaacaaggtcgggggagaggggaaataatggggactcgttcaatgagtacggagtttcagttttgcaagatggaaaagttctagaatctcttacacaacagtgtgaatatagttaacattacagaattgtacagttaaaaatggctaatagggcacaaatagtattagggtttttttttacaatttaaaccaaaaaaaaaagtttaattcaaaaatccaaggtgtgcaacagtatgcatattgtgttaccatttgtgtaaaataaaactgtgtgctagccgggcgcaatggctcacacctataatgccaacactttaggaggctgaggtgggcggatcatgagctcaggagtttgagaccagcctgaccaacatagtgaaaccccgtctctactaaaaatacaaaaattagccaggcttggtggcacatacctgtagtcctagctactcaggaggcttgaggcaggggaattgcttgaacccgggaggcggaggttgcggtgagctgagatcgtgccactgcactccagcctgggctacagagcaagactccatctcaaaaaaaacaacaacaaaaaaagaaagaacaaaaacaagtgtgtgctaacccatatgcctacacacaatcacccctggaacatgaacaatcagctggctaagaacgggtaagggcggcttcctctaggcaggaaagaggcgaggggggcacgctctctagaaatcttccagcaccttttcagttctgcactgtgtgtgcatcacttcttcaaacaacaagcaagcaaatctacctaccaactagcctggcactttaaactctggcacagcagctggtgaaaagttcaaacacactgccccaagtaagttttagtcactgtaattagaatccatcaattcctggatgggagagaggaagccatctcaaaatgtggaagggagaataatgaagtcatactcaaacacaggctgcaaatagggaacctaaaaagcactccacaacatggtatttatttcaatgcgcctactcgggctgaggagattaaatctgctaatagcagtgaagtgcccagaacacagttagaagtataaatgttagcgattactactttagatttccttcatttaaagcacgtgagtaagagatgcagattccaatagtagtgtgtacaatctctctcttaagctacctcctatcgatctgaaaagcgggcctaataacatcacctatctcagagggttgttggtggcattaaaaatgagttaatacttataaacacttagaatggggctgggcacatagaagtactcaataaacagccataatagccaatattgtatctcattccagaagaaataacatattaactgaagaaacctatgtttgtcatcttgaataggaacccaagcataattataagtgaaataaacaaaatatttaaactgagtagaggtggggaagtatcaggagagaaaggttaagaaggtatgaagatttctgagtacagctggggaaggtttcttgcctcccagcaaagagatgcctatttaacctgaagcaaaaacagacctgtaggaagacatcaccaacaagaatcagattaaccctggctccctgcattctctctgggtctaagttcagtgtgaaatgatgatccaaataaatcccagatggatgaagattaaatacaaacatcaaaggaaaatgggttttaccaacatacaaatttaaagttatggatgtccaaatgaaataaccaaaagagaaaggcaaaaaattaactgagtaaaactaacctgctgcaaatataacaacaaaagaagctttctatcttaattatatgaaagcttccagagaataagcagaatgtggtatctatgtacaatggaatattattcagccttaaaaagaaaggaatcctggcacatgcttcaacatggatgaagcatgaagacgctaagtgaagtaagctggtcacaaaaggacaaatactatatgattccatttatatgagggccctagagtcatcaaatgtatagagacagaaagtaaaatgggcattccaggggcaggtaaaggagtaaagagaattcgtgttcaatggggacagagttttagtttgggaagatgaaaaggcttctggagacagacggtggcaatggtttgtgaatgtgcctaatgccaccaagctgtacattcaaaaatggttcaaatgataaattctgttatgtgtattttagaataaaaaaaagttaagtaaaaacaaagttcatagaaatcacagcaacaagaaaagcaataaaacaacgatacgtaaaagagcacagggcatgaacagacagctcgcaaaagaggaaatacaactaactaatgtggaaaaacgtataaggtcaaagttatcaaaaatgcaaatgtaaagcatatggcaaattttaatccattaaatgatcaaaaataatattaatgctgacaagagtacaaagaaagcaagcctcttgcgcggtgctgacggcagtctgaaatggcacactgtgcagagactaataaaattactaacactgctgaactccataatcaaacactgctagttctttttaagtaaaaaagactcgaaatacaggaaaaactgtatgcacaaagattacattatttcttataaaaccaagaaaatgactaaaaatagtggaactgctaagcaggaaatacctactagacagattatcatatagctgttaaaataagggttatgaaaactgtaaggaaatgaggagtataatattgggtgtaaaatcattttaaaaatgggtaaaaagattaaatgaaaatatactaaatgtcaacagtacctatgttaatgtgataagactataaaaatcccacagatatcttccaaattttctataccacacttacaattctactgtagtgaagggggaaatgatctctatgtgaagtgttaaactccgagttatggctgtggggcaagatcacacaaactcctcatctaacttcccaatttcctaatgtattttatccacagacagacttacggcagcaagatggcaatgccaagcaggagacgcagcacatcttgccacagcttcctcctggccagaggctccctaacatgggtgacactctccacataggtaaaatccagccagagttgtgaaagcagctgaatctctcccttgctactgtcttcatgcctttgagtgacaccactatgacaggcattgagttgctcttaccaacactgcaagtttgtgactgacagaccactgatctatgatgggaaatggcaacaggcccagaaaaaagcatttcccagacttccttgtggacagggatgactaagtaagttcaggccagtaagacacaaaagctggagaatggttgccaggaaagctccttacaaagctgaggtagactcaagtcgtagacttgcctcctgcccttaacaccctcctccttcctggaacacagaggtgatagctggaggtgcagtaatcaacttgtgatcatgaggcatccttagaatgaaagccatatattcaagacactagagtagagagattgttagccacaccagagagctgccatatcagcactggactctactgcaaatttatttaagaaaaataaagccttaacttttttaaactactgcttttatacttctattacttgctgccaaaaacatttcactgtctttgaagaattaaaatctatgtatttccatttaaaggaacatttacaatataatgatgttctcctggttcttgaatcaaaatcgatgttattcaggccacatccttatgggttctgaggaccacaatcacaaaccctccgtcttcctcaacctcccatttcatctctatccaccactattgatgttataattattcctttaggagacaaatgtattattctcaaactattatttataacaagatctaaattggagatgtccagttattctggggttttttctctctttaagactagtcaagtgcagcagtgagaagaagagaaagagaataatctggttttttaaatatagaagcatatgatcaaagcatcaatgaatgcaagctacacaaacatttttattcataacaatggtaaaattatcacctggtattgatttaaaagtgaataatgactatcataaaaccaacccatatttctggataaagatagaaaattgaacacatgtatctaatattactccacctccatgcccctctaaaactacagtaaagaaacatttttaaaaatacaaatcctcaaggaagcgagaataggagaggaggcgacaatatactggaagctggaaagtacgtgcaggaggtgacttagcaaatccaagaaagctgacctctacactggctaggtctacactggctaggtctacactggttagtgaagtgcacaaggcaggtctaaccattctcaagaattcaggaaggaaactaggacataacgcaattgtgattcagatgtagggcactgctatggctagcatttttttatttcaccaggttcatgaggaaaatgatttcacagagcactaactttacctagagatttcaagataatcatgtattcgtaggttcatctctaaaataccaaggatggtacgttttatttttagtaatcagagttaattttccatcaactatcaacacgtgaatgctactgactcctacatcaacacctgctgcttggagctggctgctcctcggcttctttacctgtgtagcccagtcagacccttcgacctcagcatgtacaaaaccaaactctccttcttcctcctccctccctccctcaagtgagtttcttctcatgtttcccatcttaaccaatcacattatcatccatgcactgccccatctcaaaatctgagtcatcctagatttctctcttaactgctaccaattctcatcactaagacccatcaattctacctcctgtatatctctgctaactatatgtaacttaccccaaccaactgtacatgctccaaaaacacaacagcatacaaaagctagtgagggtacaagccagaacaatgaggccaaatatgagagcaggcgaaataactccatgagtgatacaatgtctgcccgggctccttaacgagtactggctctggaagcctgattgctcaatacaatgtctgcccgggctccttaatgagtactggctctgggagtttgattgttctcaggcggtctcagcttcaacatactgggactgggagcaaagtgctggactgagggcaacctaacaaacaatgtgtgcttccacacaccatactgtactcctaaatgtaagtcaaccaccccagctggtgcagaagaaagttactccacactgagggaaaatccattttctcccactgactcagagctgcataaacgggcccttcctgaaggattttcatgggtggttttgactatacatatctccttacataattttaagaacctcgcaaatgacagaactcccttccacccactcctaccattctcaccctacgccctcctcggaggcacctgtcacctcacatggggtcatcttcaagactctgtgtgccataggtgtctgcccacaaagtctccctaaaacacaaaactggccacgtggctctcactgtctacactgtgcaaaggctgcctgacctcctctctccacactcccccgctctcgtcaccctaaccaagtcaggtcctcagagtcaccacgccctctcattgctggtcgtctgcatgtgctgcttgtttgctcttgcaggatttatattcaaaaagtttgcaaatcccttccgaagttctaattcagtttccactcaagagcactgcatctctttgacatctctgagtgtgttctgagctctgggtaatgcaatattggggaagagtggagttcccaggtgctcagtccacataaccggtgtaagctgagtctctgcacctccttgaaaacagtcagtggcaaggagctcattctctctgcatgttcagatgactgggcacggccatcagaaaggataattctgtgagctcctgtggggtccatcatttgggcctctcaagactctcttaatgtcttcaattcactttgatggcttggtcttaaatctttccacctggttcactcccctttaactattccattaacatacggttaaggacaaatacctgaaggaaatttaccattctcatcacttcctcaaccacaacatgcaacagaatgacttgcagaattcaaagcacaccacatgtaatacgatattttcttatctttttaataataaacttgattgtttttgaacattcattgcaggtacccatttttagcaaatggccttttccatgttcacaccaaacccctccaattccatcctggcaagtggttacattttactatctcatgtatgccagctaaatcagaagagtcccctttaataaaaattcctgtgagctgtgtggtggtccatatttgctccacatgcctaagattagatgtccctctaagtaaagcaagaactcctggcgcgggaagctgaagtagacagaaggaagcagctgggctcggtgcctgctcctaaaatcctatccaacaggtagtttatgtgatatgctacagaaggaaaaatgccaaatctgacaggtgggaatctgtgatttgttttggctgtaaagacaaagccactcacacacagccagtttcttggccccatttgctccacataaacaactgtgggccgggtatggtggctcatgcctgtaatcccaacactttgggaggctaaagtgggaggatcacttaagcccaggagtttgaggccagcttggacaacacagcgagacccggtttggagaaacaatttagcaatacctcgccaaggtgaacacctcagacccaaagacaagcagcttcacttctaggtgtctatcctagaaaacttcttgtacatatgtgtgatgagacatagacaatgatatttgtgtagcaaaaacaaatgaaaacaatttaatggttccttcatagggagatggataacgaacagtggtttattcatacaagggagtattatactataagataattaaaatgatgaactggaactacatatgccaacagtgaaaactaaaaagtataatgcttagctttttaaaaaagcagttataaaaggatatatagattatggtttcatatatgtgtatttctaacccttattattgtcactggatagtccaactctgtaaaacatttgaaaagatttattctgagccaagtatgagtgaccatggcccatgacacagtcgtcaggagaccctgagatcatgtgggtggggcacagcctagttttatacattttagggagataggaaatatcaatcaaatacatgtaagatgtacattgatttggttcatgtcaggcctctgagccgaagctcacccattgtaacctctgtgacctgcacatgtacatccagatggcctgcaggagccaagaagtctggtgcagccaaaaaaccacaaaagaagtaaaacagccagttcctgccttaactgattaaccaacattacatgccaccattgtgacttgtccctgccctaccttaactgatcagtcgaccttgtgaaattcttcttctggacaataagacttatgatctccccaccatgtaccttgtgaccccctcctctgctaacaataaataaccaccttttactgtaatttttcattacctacccaactcctataaagcaaccccttccccatctcccttcgacgcctttttcagactcagtccgcctgcacccaggtgattaaaaagctttattgctcacacaaagcctgttaggtggtctcttcacacagaggcgcttgacatttggtgccatgacttggttcgggggacctccctccagagatcaatcgcctgtcctcctgctctttgctccatgagaaaatccacttacaacctcaggtcctcagaccagcccaaacaaaacacctcaccaattttaaattgggtaagtggcctctttttattctcttctctaacctctgtcgctatccctcaacctctttctcctttcaatttccacgtcacccttcaatctctcccttcccttcatttccttttgctttctggtagagacagagaagacacgttttatctgtggactccaaactctggagctggtcacagactcgggaagacagtctttccttggtgtctaatcactgcggggacgcctgcctgattattcacccgcattccagaagtgtttaatcactgcggggacacctgctttgatcctccaccttggtggcaagtacaacctcccctgggtggcaagtaccacccccctctcttcgagtctctaccccctcttttcttggaacttacctttttcctatgggcaaccttccaccctccattcctccttcttccgccttagcctgtgttcttaaaaacttaaaacctcttaaactctcacctgacctaaaacctaagagtcttattttcttctgcaactccgcttggccccaatacaagctcgacaatggttccaagtggccagaaaacggcactttcgatttctccatcccacaagacctagataaattttgtcgaaaaatgggcaaatggtctgaggtgccttacgtccaggcattttttatacttcgttccctccctagcctctgctcccaatgcagctcatcccaaatccttcttctttctctcctgtccgcttcttcagtctctaccccaacctcagagtcttctgaatcctccttttctgcagacccctctgacctctctccccctccccaggccactccttgacaggctgaatcaagtcccaattcctcctcagcctctgctcccccaccttataattcttctatcacctcccctcctcacactcagtctggcttacagtttcattccatgactagctctcctcccacctgcccaacagtttcctcttagagaggtggctggagctgagggcacagtaagggttcatgtacctttttctctatcagaccttttccaaatcagtcagcatctgggctctttctcatcagaccccactaaatatatacaagaattccaatatttgactcagtcctacaatttaacctggagtgatttaaatgtcatcctgacctctcccgtctccccagatgagcgggaaagagtttataccctagcccattctcacactgacacctgcttgcatcgtgagccagacctccaagaaggcatcagggcagttccccgagatgatccccaaagggaataccagacaggcttcccaggtatagctaggtgagattacatggtctcttgcctagttgaagggctaaaaaaggcagcatacaaagctgttagttatgacaagcttaaagaagccactcaaggtaaagatgaaaacccagcccagttcttggcccgcttggtggctacccttagacgctttacagccctagaccctcgagggccagaaggccatcttattctcaatatgtgttttatcacccagtcagctcctgacattagaaaaaagcttcaaaaattggaatctggccctcaaaccccacaacaggaattaatcaacctcgccttcaaggtgttcaacaataaagaggcagccaagcggcaacgcatttcagagctgcaactgcttgcgcctgctgtaagacaaaccccagccatgccttcagcacacaaaaacttcagaacaaccaaaccacagcctccagctactcctttaaatcctcctcatggaccttgattcaagtgccgcaaaactggccactagaccaagaaatgcccacagcccaggattcttcctaagccgtgtcccacctgtgcgggaccccactggaaatcggactgtccaactaatatcacagccacttctagggcccctggagctctggatcaaagctctctggctgactgcttctcagatctcggctttgcggctgaagactgatgctgcccgatcacctgggaaagccccctggaccatcatggacgccgagcttcgggtaacttttacagtggagggtaagtccgtcccctttttaattgatatggaggctacccactccacattaccttcttttcaagggcctgtttcccttgcccccatagctgttgtgggtattgacggccaagcttctgaacctcttaaaattcccccactctggtgccaacttagacaacatgcttttatgcacttttttagttatccccacctgcccagttcccttattaggctgagacattttaacaaattatctgcttccctggttattcctgggctacagccacacctcactgctgtccttttgcccaattcaaggcctctttcacatcctccctttgtgtctccccaccttaatccacaagtatgggatacctctacttgttctctggcaaccgaccatgcaccccttaccattccattaaaacctaatcacccttaccctgctcaatgccagtatcccatcccacaccaggatttaaagggatgaagcctattatcacttgcctgttacagcatggccttttaaagcctacaaattctccttacaactcccctatcctacccatccagaaaccgggcaagtcctacaggctagttcaagacctttgcctcataaatcaaattgtccttcccaaccatcctgttgtgtcaaacccctatactctcctctcctcagtacccccttccacaactcattattctgttatcgacctcaaagatgccttctttaccatccccttgcatccctcctcccaacctcttttcacctttacctgaactgaccctgacacccaccagtcccagcaactcacctggactgtcctaccccaaggtttcaggaacagcccacactactttggtcaggccctctctcatgactttctttctgcccgtctgcctcccaacttattcaatatgttgatgaacttcttctttgcagcccctcttaccaatcttcccagcagaacactatcctacttcttcaacacctctactcaaaagggtaccgagtatccccttcaaggctcaaatgtcttcccctagtgttacatatctcggcatagtcctccatcaacatacatgcgctcttcctgcagaccgtgttcagttaatctcccaggcccctatcccgaccaccaaacaacaactcctttccttcttaggcattgttggatacttgcaactctgggtaccaaactttgtcattctaaccaaactgctttacaagctcactaaaggtgatttaactgatcccatagaccctaagtcctttccccattcttcctttcattctctcaaaaaggccctagaaacagctcccacactggcactccttgactcatctcaacctttttccgtccacacagctgaaatacaaggctgtgctgttggagtgctcacacaggagccaggcccacaatctatagcctttctatccaaacaacttgacctcacagttctaggctggccctcatgtctacttgcagtggcagctgctgctttaatacgtctagaggccctcacaatcacaagctatgctccacttaccctctacagttctcacaaccttcaagcgttaatgtcctcctcacacctttcacacttactgtctgcccctcgactcctccagctctattcactctttattgaaaccccaacagtaactattgcccatgggcccgatttcaacccagcttctcacttagcacccagcacaagtcctgagccacatgactgtatctccctaatacacatagcatcttccccctttcctcatatttctatttttccaatcccaaacccagaccacacttagtttattgatggcagttcctctaaacccagccaaatctcgccagctaaagctggtgatgctgttgtgtcctgtacctctattatcaaggctgctgcacttcctctctccactacttcccaacaagcggaactgattgctttaaaccatgcactctctctcgccaaaggaatgcacattaacatttacactgactccaaatatgctttccacagcctccataaccatgctgccatttggactgaaagaggttttctcaccacacagggctcttccattatcaatgcctctctaataaaggcccttcttaaggctgctctcttgctggccaaggctgaggtcattcactgtaaaggacaccagaaaccaacggatcttattgctaaagaaaatgcctacgccaacaaaatagccaaggaaataaccaatgcctccacacctgctaatattccagcccccactccagaaggccagtatttttctttctcctctatgactcccacctactcttcttctaaaaacccactctaccagtcttttccaactcagggcaagaggttcttagaccatggaaaattcattcttccttagcttaatccaggagacaaagattattttacttattatctctcctgcgtaggctctgcaatcaaaactattgaacttctccgttcagaccgccactcacacctatgggaaaagggtaatataatagatcattggcttaacaacagggaatcccattcatatgacagacaatggggacaaaaagctttggtatgtaaaacattattcctttcctggcctaaaaactcatcgccacctacattaaagctaatatgcctgattactgtttttagagaacttattttattagggcaattccaaactcaaaaatatgctaactggcaccttgttagctacatagaaatgcaccttagacccgaaacttactagactaactcattataaaattttctttaaggtgtccatgcagtccctggtcatagttgaagcagtcctgagaaacatcgcccctacccccataatccccagaaaaaaccgatattttcttcatcttttcttataactttatattttataaataaaaagacaggaatgtcaggcctctgagctgaagctcagccattgtaacccctgtgacctgcacatatatgtccagatggcctgcaggagccaagaagtctggagcagctgaaaaaccacaaaagaagtgaaacagccagctcccgccttaactgattgaccaaccttatgacattccaccattatgacttgtcctggccctgccccaactgattaattgaccttgtgacattcttcttttggacaatgaatcttatgatctccccaccatgcaccccgtaaccccctcctctgctaacaatatataaccacctttaactgtaactttccactacctacccaagtcctataaagctgcctctctcctacctcccttcgctgactctcttttcagactcagcccacttgcacccaagtgaataaatagccttactgctcacacaaaacctgtttaggtggtcttctctacggacacacgtgacagttcagaaaggtgggacaacttgaaatggggtgggtgggggtgttccaggtcataggtagattttaaagtttctcattggcaatcggttgaaagggacaagttattatccaaagacctggaatcaatagaaagaaatgtctgggttatgatgataagggattgtggagaccaaggttttatcatgcagatgaagcctccaggtagcaggcttcacagaatagattgtaaatgtttcttatcagacttaaggtctgtgtggatgttaattccggttagctcttcctgaaatcaagaagggaggggggtacagtgaggcatatccaaccctcccttcccatcatggtctgaaccagtttttttcacgttaactttgcaatgccctggccaagaggaggtgtgcattcagatggttggagggccttagaattttatttttggtttacattagctagaaagagggagagagggggagagagagtgtgttatggatacacacatactgggtactttgacagacactggaagggctcactgagccttcttggcagctacctggagacctgcctggagcctggaaagctaaaaacaacctttcccagaaatctttggagccagtttttgcaagggacttggggactgtgaagaagatgcacctgggtaagtgttagtggcagaaatgaacaactcgaggcagaggccatgcacaggacggagctcttctggcaagcacagtactggacccatatggtccctccagggcgagtgagcttctgcatctagtctagtccccaggtcactcatgctaagctgtggtggtaggggtgatggcagcttgctcatgtggcactggggctgtatacgtgtctcctagggtcagtggcagcagtgttagctccgtcactgtggcaggagccgaagggatctgggatcagtgactttatgtgaccagttttgtagaacagttgtcagccttgttcctggatttaacctagaagctcttcctttagccctgccaaggattcttgaactatttaatacaccttagaaaatgcatttttccttaaactattaataggtagagttaggtctattgtttgcaccaaagaacactggcttatagaagagagtgatccgcctctacctcagggtactgattggctcagaagaaggaaatagggaaagaaaatagggtgggggcgatggagctttgtgtatgtcactatttatttctctgaaaaagacagggagatgtgtgaagcaaatgtggcaaacatatagttactctttgaggtgttttttgtgggtatctgaagcaatatttttgtgcttttctagatgtttaaaatattttattatttaaaaataatgtttaaggctgagcttggtggctcatgcctgtaatcccagtacttgggaaggctgaggtgggtggatcccttgagcccaagaccagcctgagcaacatggcaaaatcccatctctccaaaaaaaaaaaaaaaacaacaacaacaaaaattagtcaggcacagtggcacacacctgtagtcccagctactcacaaggcggaggcgagcggctcacttgaaccccggaggtcgaggctgcagtaaactgtgatcacaccactgcactccagccaggatgacaaagcaagacccagtttcaacataataataaataataaatagtattatttttaataatattattaaatattattaaataataaaataatatttataaataatattaataattacttttattattttattattaaataagaaaatatttattatttattatattttatttatattatttattttatatattatgtataataaataatatttattattattttaaaaatacatacaagtgatgaagtaggcaaagatttctctaaaaggacacaaaaagcaatgactataaaagactgacaaactgaactacattaaaatcgaaattcattaaaattgaacgtcatcgtgataaacttctgtcctgctaaaacatgattaaggtggaaacagcaagctacagctggggaggatcttcacaatccatatacctggaagaggatatgcagccgaagatgctagcaacgcctacaaatcaatcaggaaaagacaacccaatattgaacagcacttccaaagtggatatgcacatagccaaaaaatacagaaaacatgctcaggatggaagaagtaaaaaattataaggaaaatacattgtacgttttatatactaattcgttgttagcattcaacatattttattacagtttttgaataggaaggacattcctatgaaataaaattcaaaaggtaaaactgagctcacagtgaaaacaccctctttgccccctcaacaacacagttcccctccctgggtcattgttacaagttcttgtatgtcttttccagagagactctagcatgtagaagtaaacatacacatgcttatgtatattcatacatgtgtgtattctcccctttttaataaaaacacagacacaaacactcccaacactatacttttttttttttcacttaacgatgtatcctgaaaagtcagtccatatcagtacacagtttccttatatttaaaaacgaatgcataggccggccgcggtggctcacgcctgtaatcccagcacttcgggaggccgaggcgggtggatcacctgaggtcaggagttcgagaccagcctgaccaacatggagaaaccccgtctctactaaaaatacgaaattagctgggcatcgtggcacatgcctgtaatcccagctattcaggaggctaaggcaggataattgcctgaacccgggaggtggaggttgcagtgagccgagatcacgccattgcactccagcctgggcaacaagagtgaaactctgtctcaaaaaacaaacaaacaacaaaaatgaatgcctaatattccatcatgtggatgtaccatactttctttaagcaatacattgggcctgtttaaactttttattccatttcattaatctggctgtcaatacattgcacacatacatagtgtttcgactgtagtagctttaaatatatgttgatatgtgtcagggcttgttcctaccaacccccagccactactattctttatctgaatttttctagctattcttgtttatttttccatctgaactttagaatctggttatttttttttttttttttttttttgaggcggagtctcactgttgccaggcgggagtgcagtggcgcgatctcagctcactgcaacctctgcctcccaggttcaagcgattctcctgcctcagcctcctgagcagctgggactacagatgcgtgccatcacgctcagctaatttttgtatttttagtagagacggggtttcaccatgttggccaggatggtctctatctcttgacctcgtgatctgcccacttcggccttccgaagtgctgggattacaggcatgagccaccacgcctggccaagaatctggttcttaaaagttcctcttggaatttttcctgggattacgttaaactggtagcctattttagggagaaccgatatcttttagatatttagtcctcctgcccctgaacatgataagcttttccatttatttaggtcttctttttgttgtctttagtgatgcttaaaagttttggttttttttcacatagattttgtacattttctgctaagcattttccttgatgtttaatcttttttattgttagtaaacagctggagtccttccttccttctttccttcatttatttatttattgagtttccttctgttgtgcaatggcgtgatctcggctcactgcaacctctgccttctgggctcaagtgattctcatgtctcagcctcccaagtagctgggattacaggcgtgcagcatgcccggctaattttttgtatttttagtagagacagggtttctccatgttggccaggctggtctcgaacttatggactcaagtgacctgcctgccttggtggcctcccaaagtgctgggattacaggtgtaggccactgcgcccagccttcctttgtattttctaactggtggttgtttgcatagatggcggcttttgattcccatttattaatattaaacccacacaccttactgaattattttattagctgtagtaaattttgtcagttaattattttgtgtttctcacttatgcaatcaagtcacttgaaatgatgataattttacctattttccagttaataagcctctaatttctctctcttaactagtggtgttgactaaaccaccagaacaacgttaaatgatgatggtaatagtatatgtgattatcttattcttgaattcaacaggaatacatttcatgttttccatttaagcattatactatctttgaggttgaggtggatatatctgatcatgctaagaaaataggcatctatttctatttcactacaatctagttattatccagatggatattgaattttgttgaatccattccagtagctgaggaaatggattatgacttttctctttaaatctatgaccaccaagaacacatctgcagttgaatggggttgggtttatcggctccttgcaaggaggaggaaagtaaaccaaaaggaactatgggatgtctcacaagagggtgttaaaaaggactctttataggacagggcttgttttagtagatttgggggaggttgcaagaaaatggggatttcctctcaatgggatgatgtcgggaagtaggggcaattctataattgtgtatattttagataattcttatggagaagacgagaagaatagagtgaggctaaagctatgacggtgaaaagcattagtcatttgtatcagccaggatggggaggtttcctgcggtttggataatgttcttgttttgtctgtgctcagagatcattatggagtggtctgatctctgccaaaagacacgagggatttctgggagcaccacaagctaagacaaagacatggaacagagtctttcctagagctttcagagagagtacaacaccttgatttcagacttctaccctccagaaccgtgagacaatacatttctgttgttttaggctaccctgtttgtggtattttcttactgcagtcctggaaaactaataaagatgccaactttaaagtatacagagttgccagttgcggtggctcacgcctgtaatcccagcactttgggaggccaaggtgggcggatcacgagatcaggagttcaagaccagcctggccaatatggtgaaatcccatctgtactaaaaatacaaaaattagccaggcgtggtggtgcagagctgtagttccagttactcgggaggctgaggcagaagaatcgcttgaacccgaagagccgagatcgcaccactgcgctccagcctgggtgacagagtgagactccatctcaacaacaatggcaacaacaacaacaaaacaaagaacatacagagtttttcaagattcttctgggggcccgtgagcccaaaaatttgctttagatcagtgtttctcaaaagcttacataaaccatgtgattctcatgcatttcactcccttaggggtttattttaaaagtcattttctgggcttcttccagacccacataatgggtgtgggccctgtattctgcattttcaaacaagtttcccaggttcttctacatcccaaaacactgctgaagtaggaagatacctgggctgtagacaaaaatttggatttaatctttacccagtctattactgagcaagtcttgtcaatttaggcaatttaagagttaaagtgtacactctactgggaaaatccccggttccaagtcgagtgactctgaaatttattcactgcacagcatttgtaaaattgcttcttcttttttttttttttttgagacagagtctcactctgttacctaggcaggatggagtccaatggcgtgagcttggctcaccacaagctccgcctctcaggttcaagcgattctcctgccttggcctcccgaatagctgggattacaggcatgcaccaccatgcctagctaattttgtatttttagtagaaacggggtttctccatgtttctcaggctggtcttgaactcctgacctcaggtgatttgcctgcctcggcctcccaaagtgctgggattataggcatgagccacctcgcctggcccagaacaaacttcttaagggtctgtctagctctgacattccacaaggctatgaaatggtccaggaagagttagggcaggatggcaaattcaggtgcctttgactttgggaagatggaggcaaagcactttgtccatccaattactttgtatttatttatttattgtttgtttgcccagactccagtcttgacaattactctgcattttaaaacactgttggggctaaccctaccaacctctcccctgacccgagacagagttagcagctaatgtagctacttcccactttctgtcacccctgcaaacagggcaaacagggatgctgtatctggaagctctaggggcaggagccagtcctatttatcctttgtaaaacacctagcaaaacgagatgattttaggtcaaccctcctgaaacttggcttggctgcagtgacaagttttgtacctacaggaagatcagcatttccttccgttcttcctctgccaatccatccctgactggtcttttgccctcttttgagtaagaaactccttgttttagagtgtttctggattaacgctggaaagggaccaactctgagcccatagtgtggatcccatgtaacagtactcttaccagaaaaggggtttcaccccagaccccaagggcaggttcttggatcttgcacaggaaagaatttagggtgagtcgcaaagtacagtaaagtttaaatggtttattagaaactaatctattagagtagggtatcctcaggaagcaagaggaagaacgccctacctcaaatgtaatgcttgtttgtgtaggatattagagctaagaatagtgtattttattacaaaggcttgtgatcggcttgtgacagactatctgtattgttattctcttgtgcaattaatttcagaaagaatttatgagtggactattatctttagagcaaaatatagtttaaattaagaatgcctttttccaggccaggcgccatggctcaagcctgtaatcccagcacttcgggaggctgaggtgggtggatcacttgaagtcaggagtttgagaccaggctggccaatatggcaaaaccccgtctctactaaaaatataaaaattagccaggtaaagtggcgcacatctgtaattccagctacttcgaaggctgaagcaggagaatcacttgaacccgggaggcagaggttgcagtgagccgagatggtggcattgcactccagcctgggcaacagagtgagactccatctccaaaacaaaaacaaaaacaagaatgcctttttccattaacttgtttcctcaacaataaacatcttgtgatcaagagtgctgacttcctgggaatgcaacccagcaggtcttgccttccccagcctttatttaggatagtgtcactctagttaggacacctctgacaatacaactcaaatcattggtagctcatgaaaagaactcactctttgactaaacttgagtcaggctcctctcagtcctcgttttgactaggccctgaccctgggctggtccttaactcacttagttcagttttagcaagaatcctgctgagtcagttcagcaaaaatcccctacccttggtatctgatcacctcggcttgtgttcagcaaaaatctccctaacctttatgtgtcctcttagtaattttccatctgctgacttccaccctgttgcttaactataaatctccacctgtccttgtatttgatgttaagcctgatttttttgcccctattgcataatccctattgcagctgttcttgaataaagtctctcaccttaacaattgtttgaataatttttcttttagtgccatttcctactgtaacatgctgtgtgagtctcaattttctgatccatataatggagaaactaatacttccatctccgaggcatggagatcaactgaaattaaaaataacttgcatatggctgggcagggtggcacacacctgcaatcccagcactttgggaggccaaggcgggcagatcacttgaagtcaggagtttgagaccaccctggccaatatggcgaaaccccgtctctactaaaaatacaaaaattagccaggtgtggtggttcacgcctgtagtcttagctacttgggagactgaggcaggagaatcgcttgaactcaggaggtggaggttgcagtgagctgagatcacaccactgcactccagcctgggcaagagagtgagactccatctcaaaaaaataaaaataaaaataaaaaacttggataaagtgtaaagataaaaatcactattcttgggcaggggtcccagctgtagcccaagctggagaactagactggcttggcattaatttgcttggggcaggagaagggtcatctgaaagatatgggaaaagctgaggttgcccctgggaagactagggaagcctgcccccgggccagccccttgaatatgtccaactgaggaggtggaaagaagttcaaggtagccagggagacaaaagttgttcactttggtgcacatgtggaaccaacatgggacaaacaggcattttgtgctcgtccagggaacatgacttcttcggctcccacacaatttgtagctgcaggagtggcagagcaccagagtggatgcaggcccagatgttctctgggttaggtgttaaggacttgtgggagtcatcaggcagcaggcatttgccccagtgtcagaggtgtttaagccagaattactccatcttgaataagggctgggtaaaatgaggctgcattcataggaggttaggcattctaagtcacaggatgagacagaaggttggcacaagatacaggtcatacagaccttgctgataaaacaggttgcagtaaagaagctggctaaacgccaccaaaaccaatatggcaatgggagggacctctggtggtcctcactgctcattatgcactaattataatgcattagcatgctaaaagacactcccaccagcaagcaccatgacagtttacagacgccatgacaccatcatgaaatactctatatggtctaaaaaggggaggaagcctcagttccgggaactgcccacccctttctctgaaactcatgaataattcaacccttgtttagcatataatcaagaaataaccaaaaaatgggtaaccagtagccctggagctgctctgcctatggagtagccatccttttacttctttgctttcttaataaacttgttttcactttactctatgggcttgccctgaattctttcttgcatgagatccaagaaccctctcttagggcctggatcgggacccctttctgataacaccaggagacaccctgggtggatttcctgaaccgaccgatagatgagccttccacgcgggagacctggatccttatcgtctttgtggccccttccatctgcacgtgcggacgaggtccgggtcgcactcgggcggtcagcctggcacgcacagcgccggcgtgcagggggccttgggtgccaccgagtccgggaggaaatctaggccgccatccgtccggagactggcacctgtgaccaccacccaacatgtattgaacaagggcttggaggtcctttctctaaggccgcaccgataaacgattaccgactgttgacctcacggccccttcgcttccggccgcaccgcctcgctgcccacgcctgcgcactcaggcaccgcaggtaggaggaacgtaccaactgcgaggcggggggtgcgcgcgaagacccccgcaggctgcgcttccggaagtaacccctggcgcatcccggaatccagagcgcccactacggcctttggccaggccccctgggcgcgttccgggagctcaggcctgcggcgctgggagaagcacgctggccaacaagttgggtggtgggcacgcggcccaggggtcaggggccgccaggcggcgggcggcggggctgcggctcttacctgccgaggaggcgccggctctgcggtgcggagttgcgccggacttcccagcttggccagtggctccgcaggctgccggctccacccctcaggtaagcggggactgggccgccgaggttcagggaagggggcggctgtcggggcccgtgccggccccggggggccacctgctgggccagcggtgccctcgcgccgaaacacactgggagaggccagaatcttccggaacagccagcccttacccatctctccctctgtgccgagaactgccctgaaatactgtggtattaattaactcgtttaacactaacaatctcatgaggcgggtgctgttactattcccgtaatgtagacgaggaaaccgaggcgtgtgctggagcaggatcacggccgtgctcagagacgggctctggatgccatgctctgactccattgttagccctaagcttccagaaagtagcagagtgctgccgtgtcgtttgtaacagatctcactttgtgtcattttttttgcacagtatgaaacctaatgatgcatgattattatttaaaacatcttgcttagactttataagtagtcaaatttgcgtgtgggacaaaaccccaaaacatgcaatggcttgctctcctcttttcctttcacacgttcatctcctcctatccctttctctcaccacctttcaatcttctcacagatgttgtggaggaagatgagacttgagggcccagcaggtgcttaaaatcccctgcctggtgggggtggagtagacactctgtccccctgcagtgctggagttgagagcagaggggctggagagggactgggcggagtgagaaaggcctggcataatcatggaatgcccagggtggggttctacttctcttgcaggcacaagagaagtagaagagtggccgctttccttctgggcacgcacttgggaaaaggcttggtgagagcagcgagaagaataggtctaatttcttgagccagtgtgcggaggtgcttcccagcccaggctaagccagatcactcagccagccgctggctgcctttacagatgtacggctccccgtgagcaatcaacatgcctggctctcaggcataagctgcctcacttcccttctgcacagcactccaggacttgcctgctaccagacccatcctactttctctgtcaggaaaaatgagagttcttcctggtctcttgaggccaatcccttccaccgcctgtgccctggatccctttctccaggaagcttctcttccctgtgtagttagcctccccgctcttcccaggtcaccttctctctgtttagggacagagccaagccttttccctcccatccccacctccagcattcccggttcctgcttctcccccacttcctgctgtaccgcccactgaagggacctttgaccccgctgaccactgcttttggaaagtcttttcttggtttccctaacttcactttactttggtttttccttgtctctcccctctgcctctcagtcacctttgagatctgctcatcctctcacctccctgtattgtcagcattacctgggcagccccctctggtgttttccttcagtttctctagaaacttgcctgaagatttgccccaaaatagcccacatggacctgtatgaggaaagaggctcactgtggaggcgctctccatcattcctcctcttccact

SEQ ID NO: 10 - DNA, 373540 bp, Homo sapiens
  source 1..373540: mol_type = genomic DNA
tgcagtaaaagcttccaaccccagcccttctaatctgtgtccagaaggtcagtcaacaaacccacagaggacatcctgacctttccctcttccgagctctgttcctcgggctcattcccagctgtgcgcgtctccaggtttctctgccccgtggggctgtgggctcctgaataagacttctgttcctttgcattctctttggttctaggaagtgcttggtccccaacagatgcctacttgacacttgctgatggacagcttgtcaatttcatctaacaaaccggaatcactggggccatccaggaatcacagcagctcatgaagaaattccacatgaacagggctgttaaaagccaacccgccagaaagggtagaacggaggaaggacaagagggttctaacacctcctggaggcaggtgggcgacggttcttgagaatttacacaaaccacaggttttccagtgtccagggggctgtgggcagtgtgttgtctgtcaaattatttttttagtgagatttctgggtgctacaccagttttttttttttttcttagatagggtcttgctgtgttgtccaggctggagtacagtggcacaatcacagctcactgcagcctccaactcctgggctcgggtgaccttcttgcctcagcctcctgagtagctgggagggactacaggagtatgccaccacacccggctaactttagtagacaggggtctcactattttgcccaggctggtcaactcttggcctcaagcctcccatgtcaacttcccaaagttctgggattacaggtgtgagctgctgcacctggcctgctttagtcttcatagagggttctaaggttgtgagtgtaggggtttctcctgactccaggaggagatggactccccatccctgtaagctgtgacatgtgtgttccatgtcaggcccagatgggatccaaatggctgtggttgttcccactgtggtggtgtggaacccctgtcctgtctgcagtgctgggggatgtgcagggccgggacttgccgtcacatctgctggcagagggaagctgtgagggctgttggcagggttgtgggggtgggggtagcggctggagagttcagcatggctctccagccagcgtggccagggcgtgcactctgcagcatgggtcttggagcatgggccactctgccagtgaggtggctgccctacatcagatgcgcaggctcacagcacaactgtcagaccctcaggtccccacccagggttttgcaaccacaacgggatgaggccaggactgaaagaaagatttgttagcactcgctcagggagaggcagccatccccccgaactgcatttcccagtgacctctgacaccaactccagctgtggccagcaggctccctgcagccaagtccctggcaagccaggtggccaccacagtggggaaggagacagcccttggggactggcttatgtcttttacttcacagacagctttaaactgttatggaaaaacattttattacacatattcaacttgcttccaatgaaatgattaatttttctatataattttcatgtataatggcgtccaatgtttgtcttccgttttttttcctttcaaaaccagccccaaaaagtaaaacaaaaattccatgggtacagtatgtaatgcaagttaacgaatggaaaatagatacatttgactctgaaacgaaaaaaggacaatcgtattgccatagaggctcttttcctgcattctgatcctatccagcaacggtcagctgagagggtttaattttgcaccaataaaaatagcaccgtagggtcgtgagactctggtaacacgtgcgttagtgacacgtgtgcaagcacaaaggtacagtactcgagggacagtacagggtattaacacagaaacatcactgctgtgatcagcatctagtggaacaagaatgtttatgatggtttcactgaaatcactgctcgtgccatgaacagaaggtaggctggtggatttcaagataagctaaaaggccgggcgcggtggctcactcctgtaatcccagcactttggaaggctgaggcgggtggatcatgaggtcaggagatcgagaccatcctggctaacatggtgaaaccccgtctctagtaaaaatacaaaaaagtaggtgggcgtggtggtgggcgcctgtagtcccagctactggggagggtgaggcagaagaatggcctgaacccgggaggcggagctttcaatgagctgagatcgcgccactgcactccagcctgggcaacagagggagactctgtctcaaaaaacaacaccgacaacaaaaagatgagctaaaagagctctgcagatgcagactttaggggaactaatgggggtatctgacaataacccaatcaatccttttcattctgagggtgtggggcccttgccagggtgacagtgggcatatctggaggccccggggcccatgcaggagaccaagctaaggcttccttagtgagcttgcccggctctgctccttggctgcaaaagtctaaatgtctttcagtgaattaacagttcatttggggatgaagaaaattgaacctcagcgcccccaaaattttgagggctttgtgaaaatgggaattcatgggagtctgctggtggccaggcctgaaggggaggacagcagtctgcgcaggccgcggggcgagggtgggccgctccatcctgacaccctcggttctttccacagagcacccacggaagtttctcaacacttctcgttgattcaagtggaagtgagtaaattccctgacatccctaccgcttctctgcctctagggtagtaaaaacaaaaacacagctcgtaagacagggtggagaaggcagagaggcttctttctgatttaagctaactctacggttgtgacatgtaacaaaacaaaacacagaaacacagcaccaataaatcaagaagcacagggagatgatcccatggaagtccaagtgagaccttccgtctgaaatcagggaggaggtgttatttacggtaaagtcctagaacataagcacccatgaaatgcccaccaagttggtgagcaaaacaggcctcctggcatctagggtccctgcccggcctccttgcaggtagggtgctaccatcctctgtgctctcaaagaggccactctgcttgtctgctgccaggcgtaagggggctgcaggggggaaggaccttccttcatcatgcatcatccttgccccaccaagaagatgggtcaatgatgacaggcgtgatgataatgggtaccacaaagtctggggctacaggaaggctcggcgggtgtgcagcagtgccagccagatggcgttcctcccctggtcctggcacatcaggctgctccgtgccaggatagagcagtcaggccttgctctacagatcctaggcctgggcttgtgtcctcagaggtcccaaatgtcgtcttaccttcagataaatggccacggtcggtagaaagccactgggatgtggtacagcatctctaaggtacaaagctttaggaagtgcaggccagagtggatgttcccggaaggcggggcaggtgcccatccgccccagtgaagctggcccaagcttacctttgccttaggaagcaaccccatcaccgcaattaccgtttcttatgtcacagcaccttgaagagaggcccttctgtttccctacacggtggacagcagagctctgaaaattagatgcttccccaaacccagactctcttggaacattcttcccatgcgggtggtatgaactgcgtggcactgctgtcctcgctggcatatatagatttacactccacgcacgagacttccaaggcaacacctaggatttagagactatgttctcagagacgggcatggaggcaacgtcctggttctcatgtggtcaagaaggtagatggagagaaacgtgtgctaagcagcccggccctccccagagaagccacgggcagaggctcaccaacacctgcccctccctccatggtgtcgccggctttcagaataaagccttttctagcatgtctcgttttggggatgtttcctccatgatataccaagcactggaaattcaaatgtcaaaagcgagtcaagacaagaacactaaatgatgtctctctcttgacggttgtctgccagaggtgcttcccttcgaggtacctgaaatcctagaaattgaagttactttgtgactcatgcctactttctcctcactgtagaaagccagccagtggctgttaacaatatattaagtacggaagcactaatggcaaacgccaagtccacgctcatgttctatgtagttggattcttgtggcagccgggtgggggcgtggccacaaggctggtaggcttgcgggtgggtgggtttcagacctgagtctgagctttgagcgacccttgggactgcgtgtcacgagttcggcggtggctggcgcatcttgtttgcatagaagtccctgcaggtctggcagcagcgctggtaccaccgcatgtcctggcagaggttcttttctcggatgacccggcaatataccgtccactggtctcgtgtgcatttgtaggtcagagcagctaaggggataggagagagaatacccagggtcagggatggcctaggcatgtcctgatgcaggcacagggagggcttgtggtctgaccgtctgggctccctcaccctcgtgcacacgtcaaccctttgcactgattaggccatgcctcctgccagggcactgggggtgccactttctgtcacagggatgcacctttgcatccaaacccaaccacatgacagagtgtggtggtctggctgcctcttcagggaagagggcacaggccaccttgcttccgagctaagtggcacttactattttgtggccaagggtaccattactgtaggcatttataaaacaggacaacatggaacagtggacatcaaaggaccccaaaaagcatgaggtccaagtacatacaagtggcccaaatatccttcagggtcttgattgtacagagagaaggccctgctcaagggaggtcctgaagttcccaagcaggccggtgcttgaaaagacacaactatacttctgccagctcaaaggcctcccccggaacaaagatactagaaatccccttcattttggtgagtttccagcctcaggtaggaaaatatttctcagggacttgtatttagcaaagcagaaactctgttaaaaggaatcatcatatcattgttttttgttgagatggagtcttactctgttgcccaggctggagtgcagtggcacgatctcggctcactacaacctctgcctcctgggttcaagcgattctcctgcctcagtcacctgaggcgtggggactacaggcacacgccaccacgcccggctgatttttgtatttttagtagagaaggggtttcaccatgttggtcaggctggtctcgaactcctgacctcaggtgatccacccatctcggcctcccaaagtgctgggatttacaggcatgagccaccacaaccagccagatctttaagtgctcttcttctccttgtatcaccactgacctggggcatgaactggtaagaggccaggttccgagcacccagggccaaaccactcacacagtctgcagcccctccaaccacgcctgtctgctgctcaagcatcagcctggggtgtgccccatgtgtgcatcctcatggcatcatgaaggatgcccctggagctttcatttctagaaagaagcacttcccttcacattcctcatgcacaggaaacctacagtgtctgtggaacattctcctgtgttgggcaaaggggtgagggagacgctcaggtgcctgtgttggagacagcagtaagcaaacaccacttccataacaaggaatggaatccatctctgaaacctcttctacagaactgacaaatgtcagccttatgtgacaagtgaggcccaagaaggggctttctggctgaaagaacctcaccgtcagggaggacttactgggcaggagacacagcagccccctgggaaccggggccagtgaagacactcaccaaggcggggggaggtgatggtgttggcgttgatcctgtcgttgcagacctcctggtagcactgtctgtagggggcaggcttcgagagggcggggcactcgctgccgtggcgccctgtgaccttgtgcatgcactgcaccacccgggactgcaggcccttcccgcaggtcgacgagcactgcagagacaggacagcctgagtggggctgacatgaggtcaagggactgggatgatggcctcacaatgtggcactgcggagacaggacagcctgagtgggggcctacacgaggtcagggggctgggatgatggcctcacaatgtggcactgcggagacaggacagcctgagtggggcctacacgaggtcagggggctgggacgatggcctcacaatgtggctgcccctgggctgggcactgtgtgtcatgcccaggcacttgcaatcattcagggcaaaaacagcagctgcctgatagaagactgtttcaagatgttatggaatacatgtttgtgtctctgcaaaatgcagatgttggagccgtggaggtgggtggctttgggaggtgagtagggttagatgtcatgagggtggagcctccatgctgggaatagtgtgagaagggaaagagacccgagcttgctggctctccaccgtgagaggataccgtggtctgtaaatcggggagggtcttcaccaggcactggatttgttagcaccttgattctgatcctccacctccagaactgtaaggaataaatgtttaagccaccaggcttcggtacttggtgacagcagccaggggagactaagatgttaagacaacagctgaaatattaactcatgctagctgcattccaccgctcgcctctgctccaggctctgacgtttttgagatggtgagcagcatggcttggtggcccccaggaaggaccgggcctgatgaccacagaggtctcccaagcactgtctgctgcctgaggctccggggcctttgcccagtcttgggcatggagaagagcccagtaatgactggggttgaatttcccacaagcctggaggattggggcttagaattaagtaaaagaaaacaaagtacaacctttcttgcataccagagtcacgcactaacatgtggctgacggtgttgatttagacatccctggctgctggcatctccagccccagcatgaggaggtgccgtgtttgctaaaacctggtcaacatagttgagcagaggcccccaaattcccaaggagtggacccggttaagacttcgtggttctgttctccgtccctcctcttcatatatatatatatatatatatatatatatatatatatatatatatatataattttttttttttttttttttttttttttgagatggagtctcgctttatcacccaggctggagtgcagtggcgcaatctcggctcactgtgcaacctccacctccctggttgaagtgattcccctgcctcagccttctgagtagctgggattataggcacctgccaccacatctggctaatttttttgtatttttagtagagacagggcttcatcatattggccagactggtcttgaactcctgacctcaggcaatctgcccgccttggcctcccaaagtgctgggattacaggagtgagccaccgtgcctggtgtctcttcacactccttaaagcatttcccaggtaggaactggccaggtatctgagtcctctactcagattctgctcttgagcttttcggcccctgctttctcccaggagcccttggaatggtctcttctcccttacattggcctcttcccaggaagacagccaggtccatgagtatactttggtgtccaccagagcccacacaacccctgatttacagggttctgagagcagtcagcaaaaccggtacagcagccgagctggagctaggaatggcacctggggtggagagaggggagcagggcgtggagggtttgggcgcagccttgttctctgaatgccacacgtggtgagggaggcaggtgccccgcagatcctgtgcttcccgtgtcctcactcttggtcctgaccctggccttgctggagaaaggaccttcctgggggtcatgcggagtctccagacacaggctgcgtgggaggcggtggtgtcccatctgtgcctgggagggctgtctgctcccaggggggcttctgcaagccaggtggattcctcagcttccttgcctgacaagcaggttcaggttttgtgtgtcttttttcactttagagtgataaacattcagagggaatgttgctctaaaggggcactgcttttttcagctcacaaaggaggtgtgaaaactataagcagctccctagtgggcccccggcacgttcaaactggaacccgggctctgacccgagaggccaggccaaccctagggcctccccacttcatgccttgttccttttcttagataaacccttcggaggcagctcatggcctttcaaattcatgcattacacatgcagatttcagggctccatcccagacctcaggagtcggcatcaggcgcatggaagtttgaggagtgctgaggttgagggatgaagtcacacaaggaagttcccgccttgaacacaagacaggtgctacagcaacgcgactcccgccctgctggtgttgggggcaccttggaggaagctggctgcacactgggatctactgcatgcagctacctggtgagctttgaaaaatcccacaccaatacaatccgatggtggagggggtcccaagacccagagctcagtgtttataaagctctccaagtgcttgcagtgggcattcagaaccgagggcctccgacttaacctgaacctcctctcaggtccctgtggagaatgcaaagagctctcttttcttcctgttaaggagtagttgtgtctctgcacacacaaatatgtataattaagcaagaacaacatccaggcgcagccctgactgcagtctatagccagatgacaggtgtgcctaaaggtaagggagcaaaggctttcagtcaaaattctttttagaggccaggtgcggtggctcacgcctgtaatcccagcacattgggaggctgaggcaggcggatcacgaggtgaggagtttgagaccagcctggccaacatagtgaaaccttgtctctactaaaaatacaaaaattagccaggcgtggtggcgtgcacctgtaatcctagctactcgggaggctgaggcaggaaaatggcttgaacccaggaggtggaggttgtggtgagctgcgatcgtgccactgcactccagcctgggcaacagagcaagactccatctcaaaaaaaaaaaaaatcacttacaaaagcaatctggtaagtagttgtacccagaaactgagagtccacacaaatgtggtagatgaagggaaaagccaacgttcccaatgcggaacaaagccacggagccgaacgctaaacgcagagcgaagtcacgccaatcccctgcaaaaccacgcgagtggtccactgggagcgggacagactgaaaaaagggcagcatttgagtgaagtcagatacaaccacgtgccctctggcaaaccgacaggcgactcaaagtggagctggtgacgatgagaccaacactacaatcaccaggttgcaccacacaaaactgcttctattcaactgttttgacctcaaagcatccatttcataaggctccattttataacataccaaggaaaatagcaacatttctaaatttgaatgtttataatgcataactttaaatatgaatgtataactacatcaataagttacttaatggcaggcatttgatgagtccacttacatcactagagacttttatatctaaatgtgttatgtaattcaaaagaaaccctgcttcctgggaaaacgggattaccatataatcagggttaatttctgtgactatttggcacgtatgaggcccacttaagaacagagggctgggtgcggtggctcacacctgtaaccccagcattttgggaggctgcagtgggcaggtcacctgaggccagaagttcgagaccagcctggcccacatggcaaaacgctgtctctactaaaaatataaaaattagctgggcatggtggtgagcacctgtaatcccagctacttgggaggctgagacaggagaatcacttcaacccaggaggcagaggttgcagttagctgagattgcaccactgcactccagcttgggtgatagagcaagactctgtttcaaaaaagtaaaaactaaaaacagagagatacacctgctgcctgccgacctgcaggcaacaccaacatcccttttctcttcagatcttttctcgggccattggccacagtgccgcctctactgcaaaacatgtacccaggagggaaaggcaggcagcctcctattcctttctggagagaggagcatggggcagggggctgttggatttctggggaggaaactgcacagatggatggaggaacccgcctcactcccctgcatctcctgaagaggtgtccgtgccctgccagctggggagtcagtcccactgaatcactgctgttaaggggctcagccctgcaggagtgccaggaagggcttccgtttcttctgcgagtgttgctgatatgtatgtgaaaatcacacaagggcaagggcttcaccctgtgcgtctattaaaaccaagtgcagcattggcaaggtttctgcctggaaatgatcaatgaccatcgtaaaactcaggcatttgaggtgaccttgcagacgtgtcccctctgaaaggtcttagtcttgtgcagcctgctctggggccgaggggaaaaggctgacatgtggcacgtctccagcatatgcagatggtatgcctgctcttcccagtggacccctcgtaggcctccacggcagcacggaacgttccacaacaatcctcagggctgatgccggccactgaggttggcacgggtccacgtcttgctcaaagttgcagaggtaggagtggcgagtggtccagggaccccatctcatggaatgaattccaccctcctatgtgaataagaggttgtactgaatggagctttaatcggaagcgggaatcaaagaaccaggtcactgcccatctccaccatttactcattatctttcctagcatgggtcactggcttttaattttccagtctataaatagaactgctccatgagatcatggaagggtgtctccaaagtccttcaacagggacaggtgtctgttctcactgttcactagtgcccccatgaggcagggccaggtgtgaggcagttctgagggcaggtggtcccaagggctctgccccttgtaggcattttactctcatcagaattagggtttgcttaattctagctggagtcctagtgggcactgttcacacagctgtgggctatgagtggctctgactcacctgggagaatttttgagaattttggggtgtttgcttaactgcctggagctgtgtctgggccagccccctagaggatgcttccatgtgttaggtgagaagacaagttacaaagtggcatgtacagaaaccaccccgtttttgtttaatatagatgtgtgtatacctatgtaacagtttggaagacaaaccgttataaaaatttaccatgtcatcatatggtttctgggactaattttccttttagtgtgttctatagtaagagctacttatataattaaaaataaaactggagaattctgccaatgagtctggtgtaacctgctggtggcccaccatcctaaccagctgcattttcatttgagctgaggtgctgccaggcctgccctggcctaaaatccacaggtaatatactctcctaaagcagagttttgatggagaggccatgcagtgcggggtgtcaggcggcagggggaaggggtgcctgttggcatgctacgtccccacttactagctgtgtgacctcaggcaaatgacttaacctctctgagcctcagtttatttgcagcatgaggataacaaactcttgtttgtagaattgtttcctgcagtagaggcagtgtggaataggagcctagccgggggtctcagatagagtggagctccacaaatcctgctgttattattctcaacagtgaatgcacggccaagcgccacagcgagctgggcagggagctcctgcagcccagcaaggcacactgcgtcacctggcccactcccttagcactccttgggctgcccttcggtcaccaggccctccacaggcaggtgcacacagccctgtctgcctggctccctgagttgatcaggcagccagacctcagggagcacaattagaggctgttttggccctgaagacaaacatgattccagacaggtctgaaggggctgctgttgaacgacaccctcgtaacctgagctgggccatggtgggcgcacggggtgaattccttctctgtcggcctcccctaaggcttcaacgttaattgaacagtgaggagactgtagtgtctcctgatagcatcgaatttgccccaagcattgctgtgaagccatttttcaggctttaatcatccaagcaaacagatctataaaaaacatatctggtcttgtttggtccttttgtcaaggggctcatcacatccaatttcatgtggcttcccaagatgcaggtaactgagagaaatgggggcagcaataaatttagctgaaaagctccttgccgggaaacctgaagtgagtggagccccctccccagcaggtgcccacagctgtgcgtcggagctggctgcccggtggagaggcagcctctgcatctgtccaccacccttcccaggcagggagggggtgtcactggaaaaaacaggaacaaaattgttgatgcacaaagggcaaaaagaggttcaatttggatttactcatgtgctttttttgtgtgcaaattatttcatgaagttactgtgtaaaagagattttcctttaggtagagtttccggcaaaaagagaaaaggtgttaggttccccagaccagcgtgatactgagacattgtgcaagcgttactagcttctttaataataacagtaacggcagtcaccgtcgcagcagggcccaccacctgcctgtctgctgtgtacgggggaccgggcttacgtacgagcttgttaatcctcacactgacagctgccgtggccagagctcagaacacagtaggtgctcaataagtggtgtctgctggggatgcggcgccacctttcagagaggcagaatgtgaggtttcagagcgtccatgtaagtcttcccaagccacacagctagcctgcccctgccccccacctgcccgtaccacccccaacaggggaggaaccaggtctccatcacccctaccctgatgacatccttccccacagcgggattcccttcccctagcttctcccagctgtaaaatcacaactgtaaataacaccagatcccaacaggatgttttgagaattagcgagaggaggctgtaaagctctcaggaagaggaaaacactccaggaatgtcaactatacacgcctgggctctgcttcctgcagagtggcccaggcagggctgccccccactgtctccccgcactgggtctggggtgagcacaagcccaagatggggtgaaatcatgcaaggctgaactctcaaagcacaatgaatccacccccgtccccactgagtgagtctctgaggggccagcctgcctcaggctggttttggatagcaaagaaagagactgacggaatcctgacagtaactgcagtttctactgaaaaggtgcttggctggtgaaatgtcaaagctcttcaaaagcattttgagcaggtttctccccgagacttggcatgagcgaggaaaacctcggaagcggttgaaacctgaaacagcagagtgttagacaacagtgaaaacacccactccctgtgccgtcgctgggaaacaggaaatgcttcccagacaccccctcccacgccccctgcgacgcctgctttcttcccggcagtctcagcttcaggggtccctccttcctctgaattcgcggcctgctgacctgcatattgtggctgggaccttctagccagggaaccaggaggctgaggtgacccccgatggcctgcaggggccgggtcgcctccagagctcttggggactgaagcgcagaggagactgcgggcagctctcatcctctttcctggggctggagctgttccctgtgggtaactttgcttcccaccatccactgcaaaagctgcagtgagacagctgccccacgccatgccgccatcacgtgtgggtacccaaccacggaacgcaccatttatggggactgaagcacactcgagggactgttcttcgaacacgtgaacactttacaggcccatataagaaatgagattctgatgagagaagaggctgatgactgccccagatggtgattgtgaaaataacgatgatcaaaagcccctactgggcatttcccctgtgccagcactggggtgaatgctatgcttggatgccattcactcctcaatcagccctatgagggctacccctaaactcatctgatggcggatgatgcccacacaaggtgagatggggacagcagtagggctgggttgtgaacctgtgttgtcttaaccacctgccctgctctgaggtcaatgacaaaaaagcactccttagggatgatgtcttctgacttaccagccacatgcaggcagtgattagaacctagactgtggtggagacggggcatgggatgaccaggcttccccgctctctgatctctcactccctgcaaaggcggctggtttgacaagggacactgagcaaatggagggacggcaggggacccaggagatggaggcactggcctttggaccattcggcatggccctgcggcccgcctcacttccccgcggccacccctcctggcaatttcctgggacctcgctgctcttcagcaagctcactgctctcatgtgagcatggcccaggtctcggacttctctctgtaaagcacggatggcccagcggcgggctctgtggactcacacacagtgttccacaccaaagaagtgtctgtccccgctcctttttgcccctgcccagaaaagcactgaattttggtcactgcctttcacgggctgctcacattcctgggagtgatggtgaatggaggatctgcctctcttgatctggatgcagagtgctggctgctgccatggcacagtttcatgtgtcccagaaaagggccccagggtccccagtgccttgtgcacttgatttttgatggtcaaatattcttcaataaggactcaacttttactttcacaattaaggggaggctaaacatgcaggatctcctagagagataagagatttacactaaagtgtaaacgactgactcaaagcctttgggggagcagattgtgatggacgtcatgggctggggagagagcagacagatacttgacttaataacgaccacatgagcatcttagagctcagctccttcttgtttcaaattcggaatctaagcctctgacatgatcttgcacttgaagccaaggtggattaccagctctgccattttctagttgtatgactgtgaagaaagccatatcaccactctgaacctcagcttgctcatctgtaaaatggggacagatgggtgagggtccaatgagataccctgagggaacgtgctttgtaaattctaaagcaacggcaaatgtcacgggccaatatcactgatcccaataaaagtagtcttaccctctacctgcacccacccccagctgtggctccccaggcaggggctgtctggatcccacagtgctgacttcatacctgcccagtgggactcagcatgggccactatagccagctccttgtctgtctccctttaggccaagtcactgtccactcttgtaccaccagcacagggtctggcatagaacagtaactccagaaatgccggctgaactgaagtggcttggccacatgcccacagcaagtgggggccacagccaggcaggcaggccttgcagggtggggcaggggggttcaggccccaccaaagcaagtgcaggcctcagagatggtgtgtccacattgaaaactgtctgtaactaccctctcgcgtgatacaaggttcgttcattgttaaggtcatggaactcaagcctgtatctccttgcctagaacacagaaaggcatctaacagctgggtttctggggagcacacagacatagcaaaatacacatgaacttgacctcagactgattctccctgacttcctcctagggctcagagcacacagatccttgaacatgtattgcatcatttgattcgaaaggcctctgaggcactgctatctccacatcacacacagaaagaaggctggcttgggctgtcagggtgctcagaggccttgcaagtcagatcagccccttccactggcaccagggggtcaacgatcactttcttcttttcagtataagggaacactgttctcttcccttggtctgttaagtcatggttttctttaaaaacatcatccattataatccctccagaatgtgtttttcattggaaacatcccatcatttcagtggtgattaatgctcagaaatcatgctatctagaaagaaaggagatttcctcctccccaattttaagggcccgccacccccagagtggaatacatagacccggcattcagtgggtgaaaacaacgatcagcattgttttctggaaagagctactatcccgggtgggaaggcagctgcaggtcatttttcaaacataccagagtgataggagtgccctaggcagagatgggaacgtgatgtgtgtccctcatacacgaccctggttagggtttggctgctggccaaggtcaggatgagggctaggggcagggagagaggggctccatcttccctaggggcctgcccacctccccaaggctctgagtggcaggagtgctcagccatgcctgggcgtcctcccccagctagcacctgcagcatgctcttggactggcccattcctcacctccttggaaacagtctcatctttctcaacagcaccttggggtgaagtgagaggagactgcttggatggggatatcgaagcttccatctgctggaagattgcccctttaagctccctctactgcaacacagtgagcggaacacctgcttagcatgctgctgctgctgctgctgctgcggtgtttgcctcccaagacctcgaaactggacaactggttacattaacaaccttccacaactacagtgatacacggatagtgttcagccttctctctgctttccttttgggcactttgtctgctgccttcaaatgccagcacatgatgaggtttggtggctggttacaggaaggaagccctgggtgactggtttaaaaaggcagtggaacccatgggtgcaaccatggcaccatctgcaagctggacagcaaagatgacacataaaccatacggcaaacgtaaacagtccgaatcagacaaaaacgctcgggaagcctcatcccatggaatctaattagagaggtctggtctccagggagtaaggacatggggtccccaccaccaccctagggaaatgtattcttcccacttctccagagaaggcagagagggaaaacgggcaagtttctctatctggggagagggtagtgaggggcaggtggtggtggtggggaggtgcccagcccccaactctcctgggtgatggcagcaggagggtgggtggtgaggtccacagttggggtcggggtctcttggttcatgtctatgcagcccccactggcatgctcctggtacaccatacacacacatggtgccaactccagtttaatgtccctgcaggccctctctgcttggtaaaaccaaccttcccccagctcagcctcaggctcaggctctggctgggggcccttgctaagacctctccataacagctcggtgcacacaatgggatgccatctgatgccagctccagacagtggctgatacagtttgggtgtttgtcccaccaaatctcatgccgaaatgtgtcccccaacgttggaggtggggcctggtgggaggtgtctgggtcacgggcacgagtccctcaggaatgccttgatgtccttcccacggtcatgagtgggttcttgctctgttagttcaccaagagctggttgtttaaaaaagtctggggcctctgccctctctctccctctttcaccatatgacatgccagctccaccttctactgcaagtaaaagcctcctgaggcctccccagaagcagatgccagcatggtgcttcctatacagtctgcagaaccatgagccaaataaacctctttatcaatgatccagtctcaggcattccttcacagcaatgcaaagtagattaatatagcaaccaagatgtcacagaggccctcacatcccacaaatcccttttgttcttactgcagggacagcttgtcaaacgggctgtggcaaaagtgggcacagtgactccaatacctcactcttctgaaagcctggaagtgttcttcacagcatggctggtgaagagaggacggccaggcaaaaggctccatcttacctgacaggcattcccggaaggctgaaggtcctgtctggggaaacctgcacagtgtccttggccagggagggaccccaaacagcagaggagggaaggctcatgggctgagtgagccacgtgatgcatgagcaccaggtcttgggcagggctgctgagtgtcccacatgttattcccattcatgttttggttgttttgcagctccttgtaccaggaaggtcaaggtatgtacaaaagcaaaagtgtccagcgagtcctcagaacaggaatggtgatgctgaggacagccaggccttggagcccaaagaccatctacaggacgccccttagctctcctacccaatcccttcttgcttggtttccaccaagtagcctgagcactgaactgggtccaggagcttggactctgccggggggtgtgggcgagtcacggaactgctctgagcctctgttccctcttctgtgcagcaggggtgacaaccttggctggaggggaccagtgacatgacgcacaggggtaccccacaaaaaggaaagcagtgctaggtgccccgaccccagatgggcagatgtggcccaagcctagaactgaccacttcttgcctccactcctgccccggacccctgtgggcacaggcgccaacaatagtacaggctgcatttagggcgtgaccgctaggacccttccaattccctgatgacaatgacagctttattccagttcacatctgaacactcagtgtccaaacaatgctaccctgcctgttactgtgctgggcagcttccccttctacaccttctggactctccgtaaccatgcaggcatgaggtaatcatcagttcttcagatgatcccgaacatctgccagtgtgttacttatggatcagaacctggtctgttggtagctcacctacagtctttgggctaggatcagtgaccgttttcaagctaggtctggatgtgcttggacagagaatttctcagtgttgtctataaaaggccagaagccctactgataagacaaggtgaggtcagatcagaatgggttataaccctggggactgtgccccagaaccgtgtgaacattgggtggtggattttgggcaatgaaatgaaatgggtttagttgtccaagtacttagacatatatattagcatcttgaaacctctaagcatctctgagaaacaggcagggtcagtgtttatgattcccatttcagagataaagagaggttaaggcacacaagtagagagtcagagctgtaaatcagccccttaatgtctctattgtgtgagttcaagttctcatggttcgaagtgcatctttcttttcgctctcttgactgagctggagtgcagtggtgcaataatggctcactgtagcttcgacttccctggctcaagtgatcctcccgcctcagcctcctaaggagctaagactatgggcatgtgccaccacgcccagctatttttttgatttttttttgtagagacagggtatccctatgtttcccaggctggtctggaacttctgggctcaagcaatcctgccttggcctcccaaagtgctgggactacaggtgtgagccaccacgcccagccaaagcacacatatcttttgtgggagctctgaagttaagtttctctgccagtgaaagatacatcctggcagctccatactaagctttattaacatccaagtaactgtgtgacgtccctgtttggttttggggaaactggactgacagcctcagttctattgccttggtcagatgttttgaccagggagtaaataggaaggaggtgttttaggtccttctcaaattcactgttaatccagaataatagggtaccttagcactaccaggcaaactgggaattgggaaatttggctttttttttttttttactcaaagggtttggggaactttgtgttctgacttgggctgatgggaaggtggtagcatttctgcagggatcagattctgataaattttgccttccaatggaaaacccatttttccttccgtaaagcacaggcagaagcaaaattacctgcctgagccatgttgccacattttcatagcgaagccaaaacctaaattttcaaatgaaatttcagaaataatgccacacatctacaaccatctgatctttgacaaccctgacaaaaacaagcaatggggaaaggattccctatttaatacccggtgttgggaaaactggctagccatgtgtagaaaactgaaactggaccctttccttacaccttgtacaaaaattaactcaagatggattaaagacttaaacctaagacctaaaaccatgaaaaccctagaagaaaacctaggcaataccactcaggacataggcatggtcaaagactttgtgactaaaacaccaaaagcaatggcagcaaaagccagaactgacaaatgggatctaattaaactaaagagcttctgcacagcaaaagaaactagcatcagagtgaacaggcaacctacagaatgggaaaaaattttgcaatctatccatctgaccaaaggctaatatccagaatctacaaagaacttaaacaaatttacaagaaaaaaccaaacaaccccatcaaaaagtgggtgaaggatatgaacagacacttctcaaaagaagacatttatgcagccaataaacatatgaaaaaaagctcatcatcactggtcattagagaaatgcaaatcaaaaccacaatgagataccatctcacgccagttagaatggtgatcattaaaaagtcaggaaacaacagatgctggagaggatgtggaaaaataggaatgcttttacactgttcatggggaatgtaaattagttcaaccattgtgaaagacagtgtggcgattcctcaaggatctagaaccagaaataccatttgacccagcaatccctttactgaatatatacccaaaggattataaaccattccactataaagacacatgcacacatacgtttactgcggcactgttgacaatagcaaagacttggaaccaacccaaatatccatcaatgatagactggataaagaaaatgtggcacatatataccacggaatactatgcagccacaaaaaaggatgagttcatgtcctttgcagggacatggatgaagctggaaaccatcattctcagcaaactaacacaggaacagaaaatcaaacactgcatgttcttactcataagtgggaggtgagcaatgagaacatatggacacagggaggggaacatcacacaccagggactgtcgtagggtggggggctaggggaagcagtacattaggacaaatacctaatgcatctggggcttaaaacctagatgatgggttgatgggcgcagcaaaccaccatgacacatgtatacctgtgtaacaaacctgcactttctgcacatgtacctcagaacttaaaaaaaaaatgctagccactaattccaacatgtttaagatattctgcaggctgagcaaaaaccaatggctctaggtcagcagttggcaatctttgagggaagagctatcaggagaagcaagcaggagtttttcagttgctaagaccatacagaaggacaaacacggtctatgcttacaggaggagtggtacagattttgtgagaagagtctagaaaacccactagaaggttcttacaggtggcagtggggctcaccttggtccccagaaaacaggaatcattcaaatatatcagatgaatgaataaaagaggagttaaacaacaaagcattttcttacctggagaaacattcagtggccctttattcacccttgctctcgggagtgctgacccggcggttctgtgatactcctccctgctaccaccccatggccccctgccctgtctgtccctgcatctccaggcccttgcccaggggtcccgggagtgaatggaagtgatgtttgccccaagtgtccccatggcaggaggctggggcctgccagcacaccgcacagcatggcaagcctggcatccagggcacccgcgtcctgccttgggctgcgtttcgggttccttctgcatgcacgtgaagcagtggggttctcccagtgagccccaaggggcagtgctggtgcagcctgtgggagaagcaggggaggaagcacacggggtcttgggtagttgcagcgggtggaaggaaaatgaatttgcctagttacgctgggactgccgcgtagaattgggacccgtcacaagagctgagttcccgaccctcgagccccctgcactgcggcacggagagaaatgccagcaggctgctctcaccgtagaccagtccccagttttccactcgtagcagcctgagtagtcctcgcaggcctcctcggctctcggcctcgtggatgcgtcgcatttcccttgtgagttggtgcacgccacggtccgtttccacacccctttaccacagctggcagagcactgcaagacaccattcaaatatttaaccgagttccaattcgattcaagtccatcaacagctattaactccctccaatgtgccaggtgcggtgtggggatgatacaaagatgaaaacccacacttctgtcctcaaaaagctcctggtctgcagggtcttacgcacgtggtcccagctggggccccagccgagtggccagtgttgtggaagggacctaggaatcaggagtgggaagaacctggggtactcataaggtcacatgaggggagtggaattcagtggccacttgtcgggtccaaaagctcaaggcaatacgtgagctcgaagggcaggtgtgtgatggagccatgagtggggcagggaacaggggccagccggagcaaggtgaggccctaaagctgagtcccaggccccagatctttccagctggcctccaggtgcacatgctgtgcttggaccagcctgggacaaactcctcgatccagccgggagaaggaggaggaggcggcagaaggaaggaaaagccacagatgactttctcgtgaggcaggtggaaagcctttgcagagagctccagtgaatgtctgaatgcagacaccaagaatggtgacagacgcatggcccctgtggtagtttacttacttgcaggagacctggcaaggggcagtggggatgggacctgggcagggcctgggggtgatgaatgatgtgcctgccctcaagagttcaggattcccagcagcaagaaggagcgaagaggcagggggcatgacagggtgtcaacacagcagacaggcactctggagtgcgtctggagcctgctcctgacacgcccaccacagaacttggggagggacggtgcccgggctggcaggagaacttaccatctccaaaagcaaagcagaaggaagcccaggccgagctgacccacagcctcgggaagacaaaactcacaaacaagttggccctgggagccctgtccctgacacaggcgtaaacatataacttggaaagatggtgtgcaggaggctgcagtctgctaaggcggtttcatacttgctcagtttaccacaaatatggcaggcgacagcactgactttcttgagttataacaaactcaactttaaaaagttctaggccaaatgcagtagttcacacccataatcccagcactttgggaggctgaggtgggaggatcacttgaggccaggagttcaagaccagcctgggaaacatacagaccccaatctcttaaaaaaaaaaaaaaaatcccactgtgtccactggaaaaaaggtacataaaggacaaatgttattcctgatatttgttattaacatttatcccaagatatgatctagctttctctttttttattttttattttgagacggagtctcgctctgtcacccaggctggagtgcagtggtgcaatatcggctcactgcaacctccgcctcccgggttcaagcgattctcctgcctcagcctcctgagtagctgggattacaggcgcccatcaccatgcctggctaatttttgtatttttagtagagacagggtttcaccatgttagccaggatggtctcaatctcctgactcgtgatccacccgacttggcctcccaaagtgctgggattacaggtgcgagccattgcgcctcgcagctctttcttacgaattcaattcagctctttgtctaaagatcccatggggttttctttcaaggctaattaaggctggttggaaatgcacatgcttcagaactggctgcaatgtcccctgcagggagtggggagagtagctgtgtgtggagtgtagagctggtttaaagggtccccggatgccaggggtccgtccatggtgggctttgcatgcaggagcaggggtaggaggctgattgcagtggactttacatgcaggagcttgggcaggaggcccggggcactgcactgcagggctaccccttgcttctctgtgtggcaaggtttcctgaccatttcagcaactctgtcctcactgtctgacttgtgggctacccctggcaccagcatccacacaacttgctcctctgcaaccaggaacccatgcaccatttctgcctaagttcactcttgcctggcctctattttgcattgctcacctcctccccttgaatttcaagctctgaatgtccagcctatttcttaaccaaactctgaccagcaacccattctcctgaagcctttgtctgagcagtgctgcaggctgctgaggacggctccagctccaaaggggcctaggagggtgcccttcggtctctctctttgcttcccatcaggggcggggcctgcaagctgaggacaggagaaacgcactaccttttccttccttctggatatttgatccttcttctaataaagtcgggaagaagctggggagtaggtagtgagagcaatcaacacagctggttggataaaagcgaccacgtcaataaaaactctcccttaagaaactgaaacccatctgcttccagcggaagacagtctcactttgggacttcagcacgtgggaagcggcagaagtaccagcttcgcgagcttcccatggggaatgatttgattccaggttaaatgttcagaaggaagcattttgctcaagcctgggctaagccagagttaggctgactggtgtggtgctcgttcgggattaggattaggtatgcacatagatacagacacagagaaatttctttaaatcttgctcccattgtctcacattttccaaacgtagagatcttcagggctgtaatgataattgatgatgtcagacttggtggggaagcattgttttcccccataaaaagagtctgagtggatttttttttttttttttgagacagagtttcgctcttgttgcccaggctgaagtgcaatggcgcaatctcggctcactgcaacctctacctcccaggttcaagcaattctcctgcctcaaccgcccaagtagctgggattacaggcatgcgccaccatgcccggctaattttttgtatttagtagagacaggattttaccactgagtggaaaatttatggttttgatctgatcaaagcacaagtcttacttcgatcaagagccaggcaattaaaacccaaaggctcacctagagtactggaaaggggaggggactgaacacctgcctcaacccttccagcaaggggccaaaaaaaatccctctaatgttaaactgacaaacgtaagcatagacaaagacaaaaaaatcaaacaacaaaatctcaaactctcttttcctaaaatatcataaaatgtaggactaaaaatcctgatctataaacaaatacatgccaagatctgtttgaaaattaacctttgttttagagcagccaatggcagacttttccttcattaaaaatgggcggaatacttttttattcaaaataattccaactgtttggcaatagagggaactttaaaaaattttccacactgaagagtgtcttggatgagcgtctctgagttttctagactacgctggtggaagacctgagggaagcctgccctttattcagctatttttttttttgtagttttatagccaaacagtcaaaatcattaacacaaagtcaatgcaaagccctgaaggatgacatcaccagagataaaattgtactcccaggaccaaccttcaaagttaagacttaaggcttaatccacttctttccaaaacattttatggcatgagatttgtaactccaacttgcacactaaaagctgtccctcctggcatctgactctcgtaatctacaaagactgctgggggattaaaggcaaacctttgaaaccaccttcccagcctgagcacaccacagttaaatacacccaaaggagaattaaaaagtcggtcagtatctgtctatcctatcttgatgtgagaattttcataggaaatgggatcaaacagtccttcactgtggtgttgacatgtacatcatcagagacatggtatctatgtttccgcagccaggctgttatctgagatggaaattaagaacacatgagctataacacaacttcaagctgacctgggggcgagcgagggctgggaggcaccagaatgtcaccaataccatggcaccgtgttggagtccctgtggctgagtcctggtggcaagcccaggcacccacctgtgaccactcagacgcctcccagatggacaggcagtcctggccttcacagctctgcactgccgccggccgggggcccgggcagtagaggggccgcgtagcgacgtgtgtgccgttctgcagctggtacacgcaggtcacctcccggtgctggaagcctttctcacaggtcgccgagcaggggctccacgggcctgccacccacctgccagacgggaggaaagagagagagaacgactgggtgagaggccagcctctccggagggccttccggccggatcctggaattgctgccctgtggtgggagagagggaggcagactcaggaagcttttcagccaaccctggacataactcagagtatcggcacagagggagtgacttgagtggtcctctggttggatggtctcctcagcacagacatctttctgcaaccaacacccctacggcagacagaattatctggtcacggcctccctgtagggaattacgtatctgcttgtcgtcataggacctgcttctttcgacagggtgtgagtgaagaggatgctggcggcgtcccggcagaagctctgaatgtggttatgtggtttggctctgattctctttacttcttaccctctgctgggagaacagtcccagtacagggaatgtccctacagacagcccgcaccactaccgcctgcgctactgtcagtgatggagatgttgcagttgtttgttgctgcggcaataggggattgatacagccactgacaaagaaccccccagcccacaccggtcccagcttgattaaccagaactaggccctccctgctttccagagcctgggccctccggagatggctgtggtgcctgagagtggcacgttgtgggccatgggaagacagaggctgttgaggttggcgtctgaaagtgttcttctaaaacttcggctcaggctgggcggtggctgacgcctgtaatcccagcactttgggaggctgaggcaggtggatcacttgaggtcaggagatcgagaccagcctggccaacatggtgaaaccccgtctctactaaaaatacacaaaattatccaggcgtggtggtgcacgcctgtagtcccagctactcaggaggctgaggcaggagaatcgcttgaacccagggggtggaggttgcagtgagccaagatcgcgccactgcactccagcctgggtgacagagtgagactgtatcccccaaaaaataaaaacaaaaaataaaacttcaggtccctgcctgatagcctgatgatccgatgcattaggcatctctgttggcctcagggcgctggaaagcagctgagcagcttgggaatcatgcttcctcatgacacacaaagggcttccagtgcccttttgcgaacactaagggatctcccctgcttgctttctggatgagccaactggctttgccctttcttgtcctgcctcataaactcctcgcttccaagagttcgccacctgacaaagcagcttgacctgtgcactgccaggtctgacagccactcagttcctcctcattagtcaaaaacagtcctgaatcccgccccaaaccaagtctgatcatgccatgccgggccatcccactgttgagcaatgtctaccgcttttgcccactggcaggatcctttgaacgggtactggacggtgccagctgtctctcgctttccggtcccagctgagtggctcatctgcccatccaggcactgcagatttatcgagggcctcccacgtgccaggcaccttctaggttctgatgaggaagcagtgagtgaagcaaagtccctgccctctgaagcttacattctgaggggggcagaccatatatagccactgaaccatatatatcaccatagcatctataacaaatatactaaatgagattagagaccgtaacacacagtcacaagtgctctagagacaagtcaagcagcgtgagcagaacagggagtgggtgggggtgttatcttacagcaggatgcagggaaggcctcgctgggaagtggacatctcaggagagcctgggaggaagtgagccccgtgactacgtgggaaaaggcttccaaggcagaggtcacaggggtgcaaaggccctggtggaggggcacgctggcggggtggaggcggagtgaggaaggggagagcgaggggaaaggatgggatttggggggcagaagggtgagatacctagggcctggctggccctggtggctcttgttcaaataagatggaatactggagggttttgagagaggagtgacatgttcctttcggctctgagaggaccactggctcggtgtggataccagtttatagtgggcagaagcagcggcagggagaccagagaggaggctcctacggcagtcccagtgacgacggcactggtctgaaccaactggggtggcgccggcatctctggcgctgagaagacagagccacctgggctcctccctccaccccaggttgtccctccttgtcccagagcacctcctctggagctaagttccaatcctcttggcagaatcatcactctatcctcaggcttctggggcctaactccagtgaagcccttcttggatccatggctcgcatggcagggatgggagccacagtgactcccttggggtgcagttgtgaggacaagtggcacattgtccataaactgcttacaacagtgtctggcacacctgaagcccgtgtaaatgtaactcttagctatcattgctgtcattgtctccttggtaggagatggagaactcctgcagggtggccatgagcctcccatctcagcacctggccacactcagcacgaagagaattgagctaaattctacacatttctcctagttcatttctcctagttctggtctttggagtaacccagaggccttcttaaatatgtgaagacagttcttttgttcccctttaagttttctcttcttttggccaagagtttgtgtggcagatgttcaatccctcccattcattttctactcagtcacgacttttcttccagaggacaacatggcccagatgtggcctggaagcagcaagaatgaatgtgatggatagggacaataagcacacacatactaaaaaacagccactatcttctttattttttgagatggagtttcgctcttgtcacccaggctggagcgcaatggcacgatctcggctcattgcaacctccacctcccaggttcaagcgattttcctgcctcagcctcctgagtagtcgggtttacagccatgcgccaccacgcctgactaatttttgtatttttagtagagacgggtttcaccatgttggtcaggctggtctcgaactcctgaccttaagtgatccacctgcctcagcctcccaaagtgctgggattacaggtgtgagccactgtgcccggccccaaccatactgctccccagaatacaccttaacactaaaaatacagaagagacatagtctcaaataaaggagacatctttaaaatgaataaaaacgtatgcttatttctctcattgctcctgagaaatggtgaaagctttcagaacagactggtttctagaatcatcactgtagaagtattggctccaggacatagaccttatgcctgctgggggctatggtcaagaaaatagagggaagaacaccagaaggtgctcttggatggagatatggaaaatattcagcggggcagacatttactgagcatcagccaggttcactagacttctgggccttcagaggacccaaagctctccccagggtgagaatgatgaaggccatgatccaggcatgcccattacccctgaatctagaatcagccacatctctcctgaaggaaaacaatgtctgtacttgggaagaagaggcacagaataggagattggtagctgtgtcatttctttctttgctcacaatcacaaaataaactggtctcttttccttttttttttttttttaaagaaggaaagtggttggagcacagagaatttttagggcagtgaaactgctttgtatgatgctataacggtggaaacatgtcataaatctgtccaaacccacaaaatgtgcaacactgagaatgaagcctaagatgaaccatagatgtgggtgacgatgatgtcgtgatgtgtcagggtaggtccctcagcggtaacgaatgtagcactctggcggggagaccatgcgtgcctgcagcaggcagtgtgtgagaaatctctctgtaccttcctctcaattttgatgtgaacctacaagtactccacagaatcaagtctaggccgggcacagtggctcacacctataatcccagcattttgggaggccaaggtgggtggatctcctgaggttaggagttcgagatcagcctggccggtatggtgaaaccccatctctactaaaatacaaaaatagccccccgtggtggtgtgcatctgtggtcccagctacttgggaggctgaggtgagagaactgtctggaccggggaggcagaggttgtagtgagccgagattgcaccactgcactccagcctgccagccttggggacagagcgagactcagtctcaaaaaaaaggccaaacccaaaaaaaaaaaaaaaaaaaaaagaaaaagaaatttgaatgtgatgattttcttttctaaaatagagactctgacttcatcaatgttgtccaacttgatactatttctatatttttaagcagccagattaaacatattaacttccccatcctgggctgctttttgtctctcatgaactgactcccacaagatctcctttgtcctgcccttttgcagttgactttgtgaataaagacgtcaggctttagggtgagacctgtttggcgctattgtgctgaccccagctgtgaaaacggctttgagtctgctcccgcctttgcttgtgctgtgcttccagggccaagcctgagaagtggggcccctctgtcttgctcatggggatgccacttggcatgccgtaggccacagggtgcatggccattcccagcacgtgaccacggcaggtgctctagtggacgtgagcagcgactctggttgacacagaggccacatccaggacacactggggggacgagggaagagctgggcgaggctcagcagtcctgccctgatgtctctacatccgccgtcacctcgctgacttaaaaagccagatctgcggggaaacagagtcaagaggaacgtggaaaaagcaaaaatgtcattcaaaaagttttgtagatttaagaggcttcccacaaaagtgatttcttgatttgagcaatttggagaaatggccctgggaggggcactgttttcacatgggagattcctgcagagcagtgaggggcggctggctgtcctgcctcttctctcctttgcttcttgtgccagaatggaacatacctcatgcatccctccttcctgctgtccagccctttcccgcggagttcttacaatctccctccttgtcacagcccagagcctcacagggggagggttacacagcccccagcacatgaggtgtaggtgcagcccacgggtgccgccctgctcctcagccagggatgctctgccattcacccctcctctggggctgcccctgcctccctcctatggtgcaatgggcatcgccagatggactgataaactctcatgtcctggggcccctggaattcaaaaacaagctccacctgccgagagcacagcctcccaaccccaccatgggggacctcgagtctccccataagagaggagcacaaatgcactcacgaccatgggtcccacaccaggcagctcagggcacagcccttgctccacgcccttccttctacttcccagctccacctggggttctagatgtatagtcagaaatacggctcagcccacaggagccacataaccagccggatcagcagtatacgaggctcactgctgcagaggaggtgaacacggggctgtgggggcccagggaggcgacttgctctgcctcagggttggggaagtgatgtctgagctgagtctcagtcagcagggttggccgcgagtaagcgaggccactgtatcctgttttactcagttttaaactctatcatccagtgttagaatgatgcatagccactgaatggctatgtggatagattaaaaaacggtatggtaagatgtttgcacacctgtgttcacagcagcattattcacaatagccaaaaggtggaaacgatgcaagtgtccatcaaaggatgaataaagtgtagtatatgcatacaagggaatattatttagttgtcaaaaaggagattctgatgcatgctacaacatggatgagcttcatgccaacagaaagaagccaataaccaaaggagaaatcctgtgcaattccacttatgtgagatccctggagcagtcagatttatagagacaaagtagaatgatggttgccaggagctgaggggaaggggaatagggagtgagtgtttaatgggggcagaccttcagctgaagaagatagaaaagttctgtgtttggatggtggtgatggctgcacaaggtgaatgtacttactgccactgaactgtacatttacaaatggtaagatggtaaattttatgtgtattttaccacaattaaaagaatgatgtcagtgggtggttagaagcaagttgtaaatcagtgaagaaaagtcgcagaagcgaagtgtttcttaagccgcaggcagccgaaggggagagcagagcgctgtgcccggggtgcacacgttcacacctgcagtgcaggaggagccgtctacgggggttgctgtgtggactttgtgtacaagcactccgcagcgtattttagctgtttttcagctagactttttgcttctgatcttgacaaatctcaatgaggtatgggcagaaaatgacttccttaaaacttctttttttggtggcataaagaaatcatttcacccaaccccccctggctccaggagcccacctacgacacttgaacgacactgtgcaactcaccaccacagtcaaatcacgttgactttaaatccagtaatttgggaaaggaactgtagttccgtaaaacaatttatattccaattacattgtaagccctatttttttccactagtaagccccaaaaaactttaacagcaatatttattagccaagtttgaggtagctgctcttcttaaaagcatgatactgtaattcttttttttttttttttttttttgagtggagtctcactctgttgcccaggctggagtgcaatggcgcaatctcggcgcactgcagcctccacctcccgagttcaagggattctggtgcctcagcctcctgagtagctggcattacaggtgtgctccaccatacctggctaatttttgtatttttagtagagatggggttttcccatgttggccaggctggtcttgaactgctgacctccagtgatccgcccgccttggcctcccaaagtgccgggattatagacatgagcaaccacaccccgctcatttttgaagttttagtagagatggagttttggcatgtatgccaggctggtcttgaactcctggcatcaagtgatctgcctgcctcggcctcccaaagtgctgggattacaggcatgagccactacgcctggctgaaactgtaattctttaggaagtcacagttaacgcttctctaattcagggcaccccttctcctgatcctcctgcgactctgcttcctttcctgcctagcactgactcagttcctctgcatatgcttcaagttaaatcatcctaatgagatgcctcaggcagctcagtgaccatatgagaccctgtattcttagtgctactgtaacaaattacccccaacttaatggctcaaaataacacagatttattatcttacagttctggaggtcagaagtctggcatgagtctctcaaatctaaaaccagggtgctgagagggctggttcctcctggagactccagggaagaatctgtctcctgccttttccagctccatgctgccccattccttcttttccagctccacgctgccccactccttggcttggggcgtcttcctccatcctcaagaccagcagtggtgggggagtgtttctcacactgtgtcactccgaccttctcttctgcctcatctcctacctggaaggacccttgtgatgaccccagactcacccagataatccagaataatctactttaaggccagctgattaccaacccgataatcagttggccttaaaatttgccgataaaaggactgctaataaaagcatcacaactgactaccaacctgtattagtttgctaggattgtcgataaaagtatcacgaattgggtggcttaaaacaacaggaatctattccctcacagttttggaggccagaagtccaaaaccatggtgtcagtgtggctggtcctcccaagggccctgaaggagaacgtgttctgtgtctctctcctaggttctggtggcggctgggaagccttggtgttccctggcatgcagaagcatcactccagccccagccccagccccagccccagcctgcatcttcccacagtgtcctctgtgtgtctgtgtccttacatgaccctcttcttataaggatacctgtcatatcagatcagggcccaaccctacttcagtatgatatcattttacctaattacatctgccacgaccctgtttccaaataaggtcacattctgagatactgggggttaggacttcaataaaagaattttgaagaggacacaattcaatccataccacaaccttaacaccatctgcaaccttaactcctcttggccacacaggaggccacatattctcaggttctacggattagaatgtggacacctgtggggccgttattctgccaaccacacactcactgcattcccaattctgaaaaaactcagctcctatttaaaattcaatttctatttacatcttgatttggctgagatttaaactaggtaaaggccttgtgaggtctgctgatgtgacagttgttgcaaagaaacaatgccatcatcagggtcacacttttctgacacagttattttatgttgaatatagagggaatctcaaacgcaggtagccaaagagagagccctggtaggtcgttattttcaacaactttaaattatcaaaaaacagcatgagatgttgtattccagcacaatctgggctaacaagtggtttgtccaggggtccagtgttaactttgtgcctcctcagaatgggcgcaaaagaaggcgctggtatcgactgagtgtctaatctgtgccaatctctgtgctaggaatgttccccacattcactcagttaatcaaagtaaggaaacaggtgcctgtatgtgattctctgagcatctgttagagacaggccaattccaggcagggcatcaagaagtcaatcatacaacatggcagcataaaaagggtggcaaacaccgcccaagctccagaaaatgcaggccaggccaaaggaagcagccactggcacggtcaacccgctcagtctcagcctctttgttcccagatacgtgagtgtcaacctcacgttgagtcctgaaccaagggctgggacacctgactcagtttccccaccttcacaaacctcaggcaagtgtgtggtcctcaggggtgggagaaacataaaaacagacaatttctttaacatctgacaagtgctgtgaaggaactggagcttgggttgggtcctgaaggtcaaagtggagctggtcaaccaaataagcggggctcagcattcagacggagggagcctgccctcacaatgtccaggaggtggagggactgtggtgcaactgacaagtctgggatgtctggtccacaccttaaggctggggtgggagagaggtggcctttggtacactcaggaatcatgtgccagagggcaagatgatggctttccccaaggcagtggtggcaaggggacaacatgccttggtagaagacttttttttttttttgagacggagatggagtttcgctgttgtcacccaggctggagtgcaatggcacgatctcgactcactgcaacctttgcctcctgggttcaaccgattctcctgcctcagcctccctggttggaagactcttaaagggtggagatgacagcgtctttggtatgtggggtcaaagagagaaagaaggcaagaaatgtcaggctcaggactctgagcccaagaatgttggtggtacctccactgagaaggagcacccggggaggagctggcctgcggtggaagggtggcgctgctttagaggccgggttgaggggctaccgggtgcagtgtcaggcaggtcggcaggtgcagtctgcagcttggggtgcggtcaggttggagacatagggctggaaagtcatgagcaaaggaggtcaagggggaaaccaaaggtaagaagggatcatccagacagcgcagacacagagaagacagcttggagggcaggggcttggggagtgcaagcacctggggggaatgacagcctccagaagagatgcagagggggtgaccgccaggtcagggatgccgggaagggactgcacctgtagtgctggggcctgaaaggcatctttggatttggcagcagggaaaggctgctggcccagaagaggcctcagggggaagcagggatggatgggtgaaggagagggtggtcccaatgcctcttaagaaacgtggtctgatgcttgctgagtgggctctgcagaccctccctcttagaggggcactgaactttggaaaccaggcctgcccagaggtgcctgggagtcggagggggtgtgtgggggcctgtgagcctctggcctagtgtactgtgtgaggaagaggagaggacaaggggatttctgtggccaggggaagcacccagggtgaccaagaggtagaagcagccactgagaacaggctgctgcagacacatgggaatgggaccctgcccacaggtggtgcctcatggaagagtcatcgtgggccaaacagtagagcccgtgactcatcagaggcaatatccaagatggggcagccaaggggaaggaggccagggcccgggggcccaggaggacacctgaggggaaggcttggccttggccagcgctggactgccatctccccttggggtctggtgacgagcctgggctggtggattatggcatcctgacaaggagcccagcctgaagagtgatctcgtcccttcctgtcccagggagacttgggcatctgatctggaaagcgagatggatcagagttctcacttctcatttattgtctgccctgagccagcctgaaaaaacaggcccacacctacccctggtgggtcagccctgtgactctaacacacatgtggtcacccctccagtttgtgccgtttttgtttgttcgtttgtttctgagactggatctcactctgtcactcagtgtagagtgcagtggtgcaatcttggctcactgcagcctcgacctcttggggctcaagtgatccttctacctcagcctactgcatagctgggacgacaggcgtgtgtcaccatgcccggctaattttttgattttctgtagagacaaggtctcactatattgcctagcctggtcttgaactcctgggatcaagcgatcctcccttctcagcctcccaaagtgctaggattagagatgtgagccactgcgcctggcataccctgtccttttctacccgctgtctcattctcatgcccactgtaactcccagaggaagaggcatgagacctgctggtttccctttacagagggagaaaacaacttggagaggcagcaagactggcctcgggctcccctattcctatgtaggtgggtcctctgtgcctcagttcaggggctttctttttttattcatataatcctacttccagcacgggtgcacctgactagcctcatcatgaccctgaaagttccaggtgcccacatactgaagtcagaccttctcaaattctcagaaggacctggacagacccagactcaagtcctcaccccactgactccccagctgtgccaccttgggggagtctgtgctcaagcctcagtttccttctttgtgagatgttgctctcatgtcacaggcttgttggaggcgtgactcaggtgacctctaccgagcactcagcccaggcctgacactccacaggcccgatcaaccccagcttattacaactgttgtgcccgttactctccatccagacatcggtcttgttaagaggagttgctgttcccccaaagccctctggaatggacagtctatgtggacggtccgaaccaaaacagagatggtcacattcatcttaatttttttttctaactttcaacagatttacatgatttagacatgagggacagaacactcacagctgaaggcctctgagtactgaatcctattttggatttacctgctctgagctttgagtttgatatggtttggctgtgtcctcacctgaatctcatcttgaattgtagctcctataattcccatgtgtcgtgggagggacctggtgggaggtaactgaatcatgagggtggtttttttcccgtgctgttctcaagatagcgaataagtcttgagatctgatggttttataaagggcagttccccggcacatgccttcttgtctgccaccatgtaagatgtgcctttgttctcttttggcttctgccataactgtgaggcctcccctgccacgtgcaactgcgagtccattaaacctctttcctttataaattgcccactctcgggtatgtctttattagcagcatgagaacagactaatacagggttcctcacccataaatcaggggcaagagcagtgggcgtgtgtgtgaggactgaatgataagtaaatatattgggcatggggaaatcaggaggtgcctgcacaggggatgctccaggcatgcacatcccttccttctctccgtggtgcaggaccagggagaaagcaagcactctgttctgctttgctgtgggaggcaaggcccttcccagtgcacctgcaacactgttctccacgtgtgctgcgagcctatgggtgagaggctgtggcaggagctggccagccaagaggccatgctcccaggcccttcccaaaaaagaccagcgtcagaggttcctgtctgcctgagactgggtccctctcacagctcctggcagatgacagccagcaactctgttacgagaacaaccaaaacacagctttaacatgtgccatgcatagtcctgaagacctgtggctgcttttattgaacagatgtctgcaaaggagtgaggtgaggaggtacaactgggactttactagctgggctgcaatgttctcccaggggacccagagggacgctttacaggcacacgtgaggcttccatgcagcctttctccatttaaaactcgagaattatgagttctcatatacatttccctgaaaagtaatattattcccatatttgctttttgaaagaggaaatgaaaatctacagcacactgtgaggagcacggcaccatctgtgaatgtgcgcgtctccggaagccggcggttctacgtgcagagaggccccgcgacgcagacaacgttgtcttttgctaacagtgaggactactgagaaaccactttcagccttaaatcctgtataaaaaacactgattttgaggcttcagttaattagttcaaccccaagaatcgagatgggtgatcagccagggtctttccatgttttcctgaaaaaattcttgggccatgatggttagttctcatttgctggggaaagagacagaaaggaaggaaggaagaagggagggaagtaaaggaggagggaggggagggaaggaaaggagggatgggagggagggagggaaggaaaggaggagggacgggagggagagaaggaaaggcagtaaggacagaagggagggaaggaaggaggaaaggaaagaagaaagggaggaatgaggaaaggaaaagaaggaaggaaggaaaggagagaacaaaggcaggcaggaagattttcaacactttgctattataaaatatggtttaagggaaagtatttctaaaatagattctctagttattataccagctaagcctttttcagagcttcctatgtgccaggcaatgttctaagcactttatatgattcaacttatttgatccttgcattgatcctataaagatccattctataggtgaggaaactgaggcacagtctccaatctcactcaggttgctgcaaatgccattaattcgttcttgtttatggccaagtagtattccatcatataaatataccacagtctctttatccacttgttgactgatgggcatttgggtaggttccaagattttgcaattgtgaattgtgctgctacaaacatgcaagtatctttcttgtataatgacttcttttcctgtgggtacatacccagtggtgggattgctgggccaaatggtagttctactttcagttctttaaggaacctatacactgttttccatagtggctgtactagtttacagtcccatcagcagtgtagaagtgttccctgatcacggcatccatgtcaacatctactgttttttgattttttggttatggtcattcttgcagtagtaatggggtatcgcattgtggttttgatttgcatttccctgatcattagtgatgctgagcattgttttcatatgtttgttggccttttgtatatcttcttttgagaactgtctattcatgtcctttgaccactgtttgatgcaattgtttttattcttattgttttgagttcattgtagattttggatattagtcctttgtcaaatgtatacatcgtgaagattttctcccactctgtgggttgtctgtttactctgctgttcctttcaccatgcagaagctctttagtttaattaagtcccaactatttatctttgtttttattatggttgctttttagttcttggttatgaaatccttgcctaagccaatttctagaagggtttttccaacgttatcttctagaatttttatagtttcaggtcttagatttaagtccttaatccgtcttgagttgatttctgttattaggtgagagatgaagatccagtttcattctcctacatgtgtctagccaattatcccagcaccatttgctgaaaagggtgtcctttccccactttatgtttttgtttgctttgtcgaagatcagttggctgtaagtatttgggtttattctgggttctctattctgttccattgatctatgtgcctatttttataccagtaccatgctgttttggtgactacggccttatagtatagtttgaaatcaggtagtgtgatgcctccagatttgttctttttgcttagtcttgctttggctatgcaggctcttttttggttccatatgaattttagaattgtttttttctaactctgtgaagaatgatagcagtattttgatgggaattgcattgaatttgtagattgcttttggcagtatggtcattttcacaatattgattctacccatatgtgagcatgggatgtgtttccatttgtttgtgtcatctatgatttctttcagcggtgttttatagttttccttgtaaaggtcttttgccttcttggttaggtatattcctaagcattttatttttttgcagctattgtaaaaggggatgagttcttgatttgattctctgcttggtcgcttttggtatatggtagagctaccaatttgtgtacattaatcttgtttctggaaactttgctgaattctttgatcagttctaggagctttctggaggagtctttagggttttctaggtaaacgaccatactgtcagccaacagtcacagtttgacttcctctttaccaatttggatgccctttatttctttctcttgtctgattgctctggataggacttccagtactatgttgaagaggagtagtgagagtgggcatccttgtcttgttccagttctcagacagaaagctttcaacttttccccatcagtactgtgttggctgtgggtttgtcatagatggcttttactacattgaggtatgtccctcgcatgccggttttgctgaaagttttaatcataaagcgatgcgggattttgtcaaatgctttctctgcatctattgagatgatcatgtgatttttgttttaaattctatttatgtggtgtatcacatttattgacttgtgtatattaaatcatccctgcatccctggtatgaaatccacttgatcatggtagattatctttttgatatgttgctggattcagttaacttgtattttgttaaggattttagaatctatgttcatgaaggatatcggtctgtagttttcttttttggttatgtcctttcctggttttggcattagggtgatgctggcttcatagaatgaatgagggagggttctttctttctctattttgtggaatagtgtcacaaggaatggcaccaattcttctttgaatgtctggtagaattctgctgtgaatctgtctggtcctggatttttttttgttggtaacttttaaattaccatttcaatctcgctgcttgttattggtctgttcagggtatgcaattcttcctgatttaagctagaagggttgtatttttccaagaatttatctatctcttctaggttttctagtttatgtacataaagatgttcacagtagccttgaataatctttcacatttcactggtatcagttgtaatatctcctattttatttcttaatgaggttatttggattttctctcttcttttcttggttactcttgctaaaggtctaccaattttatttatcttttcaaagaaccagctttttgtttatctttttttaaattcaatttcatttagttctgctctgatcttggttatttcctttcttttgctgggcttgttcttgtttctctagttccttgaggtgtgaccttagaatatcagtctgtgctctttcagtctttctgatgtagatgtttagggctgagaactttcctcttatcactgcctttgctgtattccagagattttgacaggttgtgtcattactgtcgttcagttctaagaatttttaaatttccatcttcatttcctttttgacccgatgctcattcgggagcaggttatttaatttccacgtatttgcatgattttgaaggttccttttggagttgatttccagttttattctactgtggtctgagagagtgcctgatataatttcaattttcttaaatttattgaggctcattttatggcctaccatacggtctatcttggagaaagttccacaagctgttgaatagaatgtgtattctgcagttgttggatgaaatcttctgtatatatcttttaagtccatttgttccaaggtatagcttaaatctattatttctttgttgactttctgttttgatgaactgtctagtgctatcagtggagtactgaagtcccccactattattgtgttgctctctatctcatttcttaggtctattagtaattgttttatatatttggaagctccagtgttaggtgcatatatgtttaggattgtgatattttcctgttggacaagaccttttaccattatatgatgtctcactttgtctcttttaactgcggctgctttaaagtttttttcgtctgatacgagaatagctacccctgctcacttttgctgtctatttgcatgaattgcctttttccacccctttactttagtttatgtgagtctcctgaaggtagcagatggttggttggtgagttcttacccattctgtggttctgtatcttttcagtggagcatttaggccatttacattcaatgttcctattgggatgtgaggtaccgttgcatttgtcatgctatttgttgcctgtgtaccttgcttttttttgtttttctttttgttttttaacttgtatttttgttttaaaggtcctgtgtgatttatgctttaaagaggttctgttttgatgtgtttccggaatttgtttcaagatttagagctcctttgagcagtccttgtagtggtggcttggtagtggcgaattctctcagcatttgtttgtctgaaaaagactgtatctttccttcatatatgatgcttacttttgctggaaacaaaatacttggctgataattgttttgtttgaggaggctgaagatagggccccaatctcttctagcttgtaggttttctgctgagaaatctgctgttaatatgataggttttcttttatgggttacctggtgcttctgtctcacagctcttaagattctttccttcatcttaactttagattacctgatgacaatgtgcctaagtgatgatctttttgcgatgcatttcccacgtgttccttgtgcttcttgtatttggatgtctaggtctctagcaaggctggcgaagtattcctccattattccctcaaatatattttccaaacttttagatttctcttcttcctcaggaacactgattattcttaggtttggttgtttaacataatcccagacttcttggaggctttgttcatactttctcattcttgtctttgttggattgggttaattcaaagacctgtcttcgagctctgagaattactttcttctactagttcaatcctattgctgagactttccagaggattttgcatttctgtaagtgtgtccaatgtttcctgaagttttgattgttttttctttatgctatctatttccttgaatatttctcccttcacttcttgtatcgttttttggatttccttgcagtgggctttgcctttccctggtgcctcctttattagcttaataattaacctcctgaatattttttcaggtaaatcagagatttcatcttggtttggatccattgctggtgaacaagtgtgagttttttgggggtactaaagagacttgttttgtcatattaccagagttggttttctagttccttctcatttgggcagactctgtcaaaggaaaggtctagggctgaaggctgttgttcagattcttttgtcccatggggtgttcccttgatggagtactctgccccttttcctatggatatggcttcctgtgagccgaactgaagtgattgctgtctctcttctgggtctagccacccagcaagtctacccggctccaggatggtattgaggcttgtctgcacagagtcctgtgatgtgaaccatctctgggtctctcagctgtagataccagcacctgttccagtgtaggtggcaggggagtgaaatggactctgtgagggttcttagctttggtggtttagtattctatttttgtgctggttggcctcctgccaggaggtgatgctttccagagagcaccagctatggtagtatggagagggatcagtggcaggtggggccctagaaccctcaagattatatgccatttgtcttcagttaccagggtggatagggaaggcccattcaagtgtgggcaggggtggacgcgtctgagctcagactctccttgggctggtcttgctgtggctgctatgggggatggggttgaggttcccaggtcaatggagttgtgtacctaggagggttatggctgcctctgctgagtcatgcaggttgtcagggaagtgggggaaagccggcagtcacaggcctcacccagctcccacgcaatccaaagggctggtctcactcgcaacgtgccccctcaacagccccgagtctgtttccaggcagtgggcaagctaggcttgagaacttgccccaggctatctgcctcccagctgtgaaagaaaagggcttgtttctgcccccacctgtggaatctgcacactggatttgtgccctccccccaagttctggccaggaggcttcttgcccggttcaaattattacatagttcagctggagacttccttctccctgtggtgttcagcctctcctctggcctccctcccgatggatccctgtggtgccaggcaggaatggcctgcttggggacccagggagctcccagggcctttcccgctgcttcctctacttctgtatttcactcgactctgtaaactaactcagctccaggtaaggatggaaacttcccccgaaaacagaccttcattttctccagtgggggtgtatgtttgggagaggatgctctccctttcccacttccacagtttgggcactcacagtatttggagtgtctcctgggtcctgcaggagcagtctgcttccttcagtgggtctgtgagtcctcttggggttgctggcttgttcttgcaggttctagattatcaccatcatcacacagacttcctattatgtcttttttgattatagtcatgctagtaggtgtgaagtggtatttcattatgtgtgtttttttgtcgtggtaaaatatacataatgaaatttaccatcaaatccatttgtaagctgtacagttcagtgacattaagtatatttaaattattgtatagacaccaaccccatccatctctaaagcttttcatcttcctacactgaaactcggtgcccactaaacaataactccctatttcctgctctccctagctcctggcaaccaccatgctactttctgtttctgtgaattcactactctagatgccttatataagcggaatcatacagtattgtccttctgtgacgggttttcacttagcgtaatgtcctcaatgtgcatctgtgtcgtagcctgtgtcagcattcttttcttttgtaaagctgaacatacaaatcaactaagagaagacaaattgcctaatcagataatgggcaaacaataaaagaaaaaaatcacttaagaagaaatataaatatctcccgatatgggttggctctgggccctcacccaaacctcatgctaaattgtaattcctcgtgttggaggaggggcctggtgggaggtgattggatcatagggaggatttcccctttgctgttctcatgatactgagtaagttctcaggagatctggttgcttagaagtgtgaaccacctcccacttctctctcttcctcctgctccagccaggtaggaagtgcctacttctcttttgccttctgccatgagtgtaagtttcctgaggcctctccagctgtgcttcctgtacagcctgcagaattgtgtgccaatgaagcctcttctcttttacattatccagtctcaggtagttctttgcaatgtgacaacagactaatacatcccccaaacatctgaaaatattcaacctcaccacagagcaggggaatttaaaaaccaaatgaggacgtgccctttcacatctatcagactgacaacactaaaaatatgtgactaagccacatttggccatgatgggagaaatgttctcacacggtactggtgagatgctatctacaggtaacccctttggagtaaagctcaagttatgtataacctatgccttattccacttctagggatacagtttcttacacatgtgcccaagaaaaccagaaaacgacattcactccataattgtataaacctcaaatggcaatccacctacgtgtccatcgatggcagaatgaataaatgtgtaagacgaaatcatatagaaaacgaatgccaaagagctacagcagcaacacggcgagttcccaggggcaagacagatgtacataccctaagagactatttaagacacaacaaacaatactctcttctgtttgtggatatatacatatatagtgcaagtttgaaaatttgggtgggatgagatgcatacataccaacaggggaaaggaggagaacgggactagggagggtcaaaaaggacttccaacgtatctgtaacatattatgacttaacggatgtgaaatgaatacagcgattgtaaagatttgttaaaactgggaagtggagacgtgtttattagttaatctcggtacttttctgtaccatgaaaatttttataagaaaaatacttacagaagctatagtcaggctggtatgtactaactgaccttggctgcagtgagtggttgagaccacgggcaactgaacatgtgctacccggtgtatgaccacacctgcgctccagcccactgaggccaaatgttgccacgccgttcatttttaaaagtaaggctgaaaatccagagtcttactgcaatctcctgatttaaaaatgttggaaatgaatcctaaaaccttaagacgcctgtgtgggccaagctacgtctgctgtggaatttggccctgtggcctctagtctaggactttacactttcctatcctgaagcagcagctgccgtggttctgagcctaagctccaacagccagatgcccatctccctccagctcacacttggagatgattctgcaccactggcctgcacacgggtccttgtcattgctttctttgttttgatcaccaaattcctactactcacacatgctaacttaacaggttagccccaagcctcttgtcctaagatttggaaaaaaaagactcccaaagcataatgacgtggcatagttttcccaggacagcagccggaatcgtacccatcagaaataaacaccaaagtcctgaaccaagtaggctgcagaaaacacccaggggacggattaacaccagtgggaggccctgccctgctggcccagctgcccggccccacaaaattattcaatgtgaaaacacacaagcagacctccccagcattccacccccgctgctgctccactttggacatgaaaatattcagaatttgacaaggatctcagaaaatgtcctggggcaaggtagggaggtgctcagcagtctgagtgaggcagctcgcttgtcctgtaagggcgacacaggggaagcgctccctcagcaactgtgttcgaaggggcagaggcagggctccaacaggactgagctggctgcctggggctctggcatgcagctttacgagcaagggaattcacagctctgcctgaatccccacccacaactacctttaactgcaagctgcaggttcactccctgactcccccagagccatcaggagccagccaggcccctgacaacaagctgcaaggtgaccctccgtgggtctattttgagttcctggtgcctctcaacatgctgctgctaagttagaagcagtgaccctggtagttatggcttataaagtccatgttcatggtgaacttgaaaagaggtttcccaggggcaacagacatccaggctagagccatgtggagacggctgaggcccagggcgcccatcctgacccagtggctggcgttcggctgtgtctatctccatgcactgactcaagtgactaagggtgtttggagaccatgacgtgtcataatcatctttagtacagatgacagctttgtcactggcagcctctcctcctcattttctcctgcttcctcctgggcttctccagtgctgggagcttcgctgttctcccctccacttctctatctccttcctcccccattttctaagctagcttggctctttccttggttcagtctgtggcttcttccctctcatggctcacttacaaataactgtttgaggaccttatctatgccatgttccttcagatactagggaacagggcataggggacccctgactctccacctgggaggcttcaggccgatgtgttcaccagcctagaggatagcagggagtcccaccaggcctgtggttctgggtgggtgtgcgtgtcacagaccactctgctagtccccatcactgaagcctagtggccacttcctttccaaagaccagacatgcagggttaggatctgggcgtcatcttggactgctctctgtgccacgttcaagcaaccactaagtcccaccaagccaaccaccacgaaggatctcaaatctgccttcccctccccatatccatggccacccttcgctagggtgccataacagtctcctaactgcactgcctccccaaaaacaaacatgtaatctcttttcccttccaagtaacctatgcttctctgccacagctccagtctgaaactttcgacggctccctagtacctaatgccttccatatcctgagcccagcattccggtcccagccagtctgatgatttactcattcgttcagtccacgctccttcatagtgccacccaaggactgcagctgttttcaggaatatatgcagagaaacaaaaataagactctggactaagaaaaagaagtaccagggtagatgaaggtaaggggaacaagccttgtcgccctggccctggccagccacatgtgctcctccctcccaggctgttggctgttccttcactcagacatgctggcaccggtccctctgcctgcacgccctcctcatttctcggttggccaatgtcaagcgcctgctcctccacaggtcctagatgttctctcttccactgctggctcatctgaggctctccaaatggcctaaatgataccgttcctgccaagactatcctgaccttgctatggcttgggtgctcctaggagtcaagaggctcagatctagttcgggctcccaggctaagtctttgttgaccttggctactaaacttccccgggctcagtttttccatctgtgaaatgggttgaaactcatttgtttctcacgtggatgtgccaacgattgatcctatatggtcaatctgttatcacccagtgtccccttctggatggatgcaggcccccagcaggcatatcacagagcagtccaggagctgcgtgcaccacaaccccatgtgctgacttagccacagcccccacctcctcctcggcggtggaccccactaaggcagcgtgtgctgagtccaccctaaacctcggctctggcacactggagagaaagttcgtattaatgttgctggccaataaaacaaccagcagtttcctataaaaagtgacagtgggataagtctacattaaaatattcatgccctttatttcacatcacaaaaagattcaaacaccccaaccaaacgcagttacagcagctgccgggcagatgttcttcaggcaggcaaatgagacacagtaattagtctcaattaagttaccagtaaattatgtaacggagacctttagccacccagccctgacaggtttgctgagccaaaggcagtgaacccggtccaaaactatttagaaactctggattgctttggataattcatgttctgagtaaattacagagagtcttggcatgggaggaataatgaataccgtaaccactttcaactgaaaataataatttgttaataattttaatagctaatgagctacagaaaccacgtccgtaagccttccaagcagaaaggaaggagattcattttatttctggctgtatgaagctgatggcattcactcatccatatgcttttgagacttttgctcagcaagtatcttgtcacatgatctgttttcaccggagcactgcttcttcttgaattttcaaaaacagtttcctaaaggtctgctctgcaaagatgtttctgtctaatcgggctttaaggatttctcagcaagaggcacacaggagactggctggctgccattctgccttcaagaccctgagaaaagagactcttccatcaagtcttgttgaaccaagttgtgtgatgttttcccttgtcaacttttgtttttaggtgaacaaaataaaaaaattttttttttttttgagacggagtttcacttttgttgcccaggataaagtgcagtggtgtgatcttggctcactgcaacctctgtctcctgggttcaagtgattctcttgcttcagcctcctgagtcgttgggattacaggtgcctgccaccacgcagggctaatttttttttttgtatttttagtagagacggcgtttcacgttggtcaggctggtctcgaacctcctgaccttaggtgatctgcctgcctcggcctcccaaagtggtgggattacaggggtgagccactttgcctggccaagaaaattttattcacagaattgtagagaatatcccactccctggtgaaataactgtatttggggccactcagagtccagatttcctctcttcatccacaaaagcctggtcacatcttgctgtggatggtccttgtccaagtccttgccttctccctatctcttctgaaagtcagactctagcacagagcctcgtgcttcttaaggacctcatgaatgtcttctaaatttaattaaattccatggttctctatgaagaaaactgacaagtgacctggagcttacaaaaatgatctttgcgctgatctccagggcatcttgggctattctcactcactttagtttatctcttctattgccgtattttctgcttagtagaacttataaatttaattcatgcacattgtagaaaatctggaaagtacaaaaaatagcgagagaaccaaaggacacacatgatcctagtctttcttcctaaacatcttcctttgatgttgatgtcataccacaaatctttgtatactgtgcatcgctattgatagcgaagcaattcctatgcaatcaaaaatcttttctaaaggttgatttttttttgttgttgttgttgagatggggtcttgctctgtcacccaggctggagggcagtggtacaattcagctcagtacagcctcgaactcctgggctcaagcaattctcctgcgtcggcctcccgaatagctgggactacaagcacatgtcactgtaactggctaatttaaaaaattttttttgtagagatgttgtctcattttgttgccctggctggtctcaaactcctggcttcaagcagtcctcccaccttggcctcccaaagtgctaaagattaactttttaatgcttgcatattactctgtcatatagatagagccatacattactgaaccagtgcatacctggtcatttgggtaggtgcccattttgtccatattttggatgatttccacagggtacaaatggaagtcctggatccaaagtgttgagcaacatcattcagagggccagggaggagtgcttggatctctccgtgatggggatctcattacactatgacccggccatgcctgacccactagcctgttgggtatgcttgttctctagtgacgatgctttacatttgtgaaggctttacattgtgaaggggcaaggtttccaaaagtcctcctatgtatcccttgtgtcttctttctgcctatgcatgtagcccttcagctgttccttaagaggcagcagtgtccaggctacagtccctccaccccactcccctgctttggatgttccctgccggtcaatgtttccttagcacgtgaccttgacaaatacatgtctagttgcaatgtgacctgcttcaagtaaataaacaataagaaccacactaactggacccttctatatgccagatgttgtgtgctttagtcttcacttgattcccaattagataagcggggagctcctgtgaagtaacctgctcaggatcacacagtcagggagatcggtcttgggttgagagtggtacgctaatgttgtctcctatagccaatacatttctctctgtatctcctgtagtttatactttatataaatggctgctgtgttatttgaagcataaatattcataactgttatattttcattataaattaagacttttaatgtaagtttccttgccacatttaatgctttttggcttgaagtctattttgtctaaagttaggattgctacctctgctctcttactgtttttgcttccctggaatacctttatttttagcctttttgaatcggtttcttttaggtgtgtttttttgcatacagcatatagttgggtctttgtgagccaatttgacaatctttttctcttcttttcttttctttttttttttttttgagacagactttcactcttttgcccaggctggagtgaagtggcgtgatctcggctcactgcaacctccacccccagggttcaagcaattctcctgcctcagcctccccagtagctgggattataggcactcgccaccacgcccagctaatttttttgtatttttagtagagacagggtttcaccacattggccaggctggtctcgaactcctgacctcaggtgatctgccagcctcggcctcccaaagtgctgggattacaggcgtgagccaccacgccttttctttcagaaaaagaaaatttttttcttttaaccagtaagctaggccaattccaatacacttgatctcaactttgtagtagtatttaattataattactgtgtatattttattgtgttttctgtgttttttagatgttatttctttactgtttatttattttttggtatctataggtttttgtttttgttttactccaaccatttttgatagttttattcaagtatcacataaatacataaaagtatataaattataagtatacagcttgatgaaattttcacaaagcaaggcttgtaactacaactcagatcaagaaaaggaacattaccagaacctcagaaggcctcctcatactcagttatgagcctcccccaacaattctgactcctaccatcacaggtttgtttggcgtgtccttcaactttatataaatgaactcacagagcaggcactcttgtcttttgtgtctagcttctttatttgtgagactgatccaagttttgtagaacaatagtttattttcatcattgtgtcgtatttcattgtatgactagaccacaatccatccattgtactgtggatgtgcatttgggttgtttcaggttttggcctcttatgactagcactgtgctgaacattcttgtacatgtcttgtacaacttgctggcatacacctatgtggaagctaaagcaactgcatcttaaatgggaggctaaagcaactccatcttgaatgcttatccgccatgttggcttaactgactaactgtagttccaggaaggcctccgagatttccaatttatctactgttgcttgtgtaaaagcaggcacataccataaattgtgctcttaggtcaaacaaccttatgctatcacacttcagttgtcctacaaattgcatctgaaccattccttgacctgggtctgggggacaatggcatggggatccaccatcttgtcttgctgctgcccgaggcacaggcatggcttctgtttttaagtccctattaaatgtttctttctaagaaattggatttgtcagcctctttggcctctcagcttcctcagactttggggaatgtctgcatagctctgcccaccttgaaacaatctaggagtagaatttctgggtcatgagaatttgtatgtttagacaaatagatttccaaagtggttatgccaatttacactcacaccagcaatgacagagattgccaatggctccacgtccttgccaaaacatactatcatctgtcttttctatttcaatcagtctagtgggtgtgtcagtggtatcacattgtgttttaatgtgtacaagtggagaatacaggtgaaggcattatgggcagggagaacagggtgaacaacagtcgggaggtgcagaagtactcatacctttgtaaaacgcactttgtctctctttcctaatcttttactacctggtttatcagtttttaatgatatctcttgacttccacccactctctaaacaacgacaaatgttattatttgattttcctgctttctgttttttctttctttttattcttttattctactcttttttctattgcttttagttgcattcttttcattttgtcagagcatataacatttacatattatttttcattcctgtatctaactttgtgttagtcttagctccacaattaaacatcctaagatgctcaccatcagcccttttaccgctgaccctagtcatctcttggttagatgaagggcatcctatgatagtagtgggattgacaaactatggcctgagggccaaatcctccctgatacttgtcttggtgaatacagttttattagaatacagccctgtctatttgtctatacattgtttgtagctgcttttgtgctacaatagaattgagtagttaagacagagactatacagcttgtaaagcctaaaatatttaatatctgtctttcactggaaaagtttgctgattcctgctccggtaaattcctcaagaagggctcatggatacagcgtcctcagctcttgtctacttaaaattgtttttctaaagctttgatactcgaaggatagtttagctagttataaaatcttggtctgatctgtgaggacatcatgcagaccctgagaactgggagtctgagtctcatgagtcagaaggagtgggctggggagtagaatgagtgccccgttctgagacgagtcctaccacttgatagccacacatttctgtggagtctcctgaccccatggcagtccccactggggagccctacccagagaagtcacatgacaggaggctgctgacaagctgtacaggcagagccacagacagaccctctaggaactgtagtgcctgggtgatgagccatcagctgccatctgtgtccctgcttcatccataataatatcatgggaagcttactaagtgctctgctgacctgacccaccaccccaataacactgtcagacaggcgcagaatgttctcattaaaccctcgcacatttggggcactcatgcagccttcttttcaaaaatgcatgcaaaccatctgcctaaatcatccctcatcctctagttgtgccaggggttgacagcactctgaaacggcattcttcggacccggccatttatctgtttgggaaattgagacccagccctcagaccactggctctgctcttgtctgctgtgatttctcagaaccagtcagcagagcctcagagatgacagctgtaaagttctgtagcatcttggattggattttgtcctggaatggggttttggacacttctagaaaatcataacagtgatcataaaaatgacaaatttagctcttactgtgtgccaggaactgtcctgagccatttatttctcttagctcgcatcattctcatgacagccctctgaggtaggaactctctcagtcccctgtcgtacagacaggttgagtggcctgctgcaggtcccctgctggcagcagcggggctgagatgggaacctggctgctggagtcctcactctactgcttctgcttctcagggttccctccttagttttcttgagctgccatgctctttgcctgctttcttctacctttgccttctacctttaccctccttctcctttttgaaaagcagcagtgaacctgcactttgccttttgtcacttttagccttaacaggcatctccttctcagttttccttatttcaagggctaacttaaaacaaccacaaaaagttatctttgtcaaacctttcttagcaaggctgtttgcggacatctcgctgtctggcccgagctgcctgctaaggctccaaactgtttcctccctcccattgctgcatgcctcagtgcacttgggtctttccatctggttcaccctgagccaccagggtgaacccctagtcctgagtatgtctcccatcttatgtcttgttgggtcagttgtgattatggagtcagaatggaatcttcccagatttccgcttggtgctgagctgtattgactttctgtagctgtgggaacaaaactacctctactctgacctttacttattctattaatatcttctcaaaacatagggatctaaatttaaccctgctcggtttcctttcctgactgtggcaaactgcaaaacaaaatggccgttgcttcccaggttgtcacaaaccttcctgctttgtaagaaataaagtcagggtgatgagtcctttcattcatccatttatgccagagagaggagaaatggggagtgctttgtctgtcaattagggcatccggctgcctcatttccatccccagctccagtcaccagagctgctgccatgcaacgcctggagcctcctgcaaagtcctgccttcagtctccacttggttaggtctctgctttgtggctctctcccctcagtggcctgggctctgggccctgaagtcttcaggagatgaggtaaccgactacctttccctcctagataagccccatactctatctctactgaaggatttttgcatctgctgttagattcaagtcatgggacccaattcaccaaatctggtgatttccaccatgctttctgagttaaaatgtcaagggaccttcgttactatatgctggtggttctcaatgcagtccctggaccagcatcatgagtgctatcagagccctagctagaaatgtaagtttccaggtctcactctggatgtactgaatcagaagctctgggagtggggcccagcactctgtcagttacccagtctcctggggatttcagcacagtagagccactagacatattgggaaaataatcacccgaggcctgagccttgcttcggatcagctctctgagaggtgctggcccccagatcaccctttgtcctccctgacaactcactgggcaggtgcagctgaaatgtttttccctccctgttctcatgattcagggtaaagctctctccccctggccagggaacatcctcttcccaggaagcggattaagagtcgtggaaggaaaacacgactgagccatgtgcacggtgtgggccagggcacgttcattacctcctcagtgctaatttctgcccttaatgtcgtaaggaattccttttggaaattatgtacttcaatttcatcaggctccttccttcagtggtatttaaacccaaatacaggttagcagacagaagtgctggcaggaaccagcctttcacatccacccacaaatgcaacctcctcacgctccccctaccagggctccagtggtctgtaatgagccacctgggcatggcacatctgtgaaatctctagtcacgcgctgagcctgaaatccaatcttcgggtttgaatgatgctgagaccctcccatgatcctttttccttccctagtcttacccccatcctgctgatgatactatctaaagttcacaagtagagagctcagaagcattcaagaggttagaaatgaaccactcaagacttttctgctgttgcaatttactctgaaatacgtataaattatatgatcttgttctgacaagaaggggaatgttagtatactctgggacctgcccgcaatcttttactatctggaaaataccagcatgggtttagattatgtagttataactgtattaaaaatgtgtgtgtgcacgctcacatgtgtatgtgtgaggagtgtcttacgaaataatggataacccacaaaatgttggggtccaacagctggctgatgttcatcatcgatatagttttgtagttgagcagtgatgatagttttggctggcgttcacggagtgctgactcggggtgaaggaatttataggcattacttcacttcatctcctcaagacttctatgacagatgttctcatttcccatgtttacagatggcaagatcatgtaacttgcccgtgggtttgcatgcagctaggggtgaggtggggacctgaggtcagtctctcaatgcccaccatgtgaagctgcccctgggtgaaatggatggagcatttcattctttttctggctagctaccgaacctaacaaattgcatgtcttcctgcctctacatgataagtagatgatgatcttgctattgcttccaactttaaacaaatccatttcaataaaggctgctgtaaagcatgagcaggtaaaggaaagatttaaaatatgtctgcagaaactgctgctgagagtggaatgagtaggactagaggaagaagtcaaggtgggctatgggtaggacacagcatgggtaaagtcgaccacaggctctacctagagagggtgaatgatttaactagaagacaatccaacatacaccagggtcctaaaccagcctctgatttccaccccttcatcaacggagcatctgtccagaccagacatctgtcccctaatgggtaaatgctcatgccaccggaatgaaatctcattttcgacataatgccgctaaccatagagatgagcaattctgggatgactgaggcacattccctccaccagtatcaaacaatccatttatctgttcaaatgacttactaagacctactaagctctaggcgctgctgggcactggagactaagctgcacacccagtgatttccatatttgtagagtactcaccgtgtggcagcttggttctacaaataagttcctgacaaatatttgctgagtgaattgagcactgataaggtccttgcccttacggggaagaggaacaagaaaaagaaagggaagactaaagaaacagagtcacacagaccatacaggaatgacggaggtgtcctgtctatacgcggcacttggtacaggtagatgcattacttacccatagaggacagcatggaggtttcagaagctgtgggtttgattcctgaacgggtatcaaaggtttagttccttatccagaaaatctcaggcctgggacacagacgcacctctcctccattgcctgccaacttgcatcactggttacttggggtctgactgagagtccctcccagcccctccaagctcaaggtcagctaggcatgggtagaaagtgtgcttgtctcagaggtccaggaaggcacccgtcagcacctctcactgcctcaaccccaaatctccccaggtctcctgggaaaccaccttcatattgaaccccttatgttagatatgtcctgaattttcatttcttttctagtatgggtgcagataacactaacaacaagccagaaaaccaactaactacagcattctgaaaaattgctctagtgtttaatcccagagctttgggcctttgggctgcgagtttcacttccagggaaaggaaccactccagcttccccttgatagcactcggagttaaatgccactacagtactgtctgatgactctcttgccccgcttttggatatcaatttagagctgccttggtcaaaagggttctttttaatgccatggcagaagcaggctgtactgtttttaaaatgagaacgagaaagcagaaagtatgtaagatttaaaggaggaaaacattgttttgcattctgttaccagaatgagctgggaaagctacttaatgactaagcgtctcgaagtcttcatctgtaaaatgaggtgaatacgtcgactttccagagggactgtggggctacctaacccacgagacagccagcagccacttcctcctttctctccttactgctgatgagcaacagtgaactggcccattcccaaagagctttgcctttctgctgcttctgtactttacgtcttagcaagaatacaatttctgagttttaaaattctctacttttacaataatcattttcaagtattgttttgagagaaaaaaaatggttctctggaatttatgggtccaaactaagctctcaacgggaagcagaaggcccagtgaacagggttgaaccagcagctgatgagtccactgcacccatttttatttttttcccaagccatcacacctgatcaaattacactctggggactgaagattctgttggtacaatcttgaggttaaaataaccaggataagtctggatttggtaacaggttgtaccacacccagtcatgaagggtttggaaaaaaaactctcatgctttgagaatcacacagctgctgatgttgaaagttcccatccaagagtaacattccagttgggctggcttttcccagtacacagggattttccagtacagtagccctcttgctaacagacttgcctgctctcattctagctgagagcagaatgggttggacagtcttcatttctcagtcttggttagatcatgaccttagcctgtctataggacttaatagtttctgcctgtctcacgtcatcttccttcttctggtgagaggtgagaacacctcggttttctttaccatgctcccgtttgttggccaacaggagagcacatgagctgagaaagactgataagactttgcaggaacctgggttctgagcagagtgacctttggagtggatacaggagctgctccagccaattcggggatcttctctcccagaccaacttttcggtgtctcttcaattttgggagctactccacattctttctatattctcttatctttttggggcaagttcagatctggtttctgtggcccagcaaggcccaattgtgctctagaagccagtggtgccacgatcacctccttccatttccacaccacagccatggcttcagagcagattgggagactggtggggacagcagtttgattggcagtgatgccatcagcttattggatggtctccttaccttccactatacactagctctatccaatggaagaaagaggttggctgtgtttacttttctagtgaaggtatagggtcctccaagcccttgtgagcccacagtgccttgaccttgctgctgagagcacctctttctgcagaagctccaggaaaggtagactccaggattacaattctcctgggaagaagcacaaggctgggattctcaaagtggttcacagcacacagtggcacaccaacagtgcgtctgctggcaagagaccatggaggattcagacctgtggggctgtctgagccagcacttccctacctgacatgcccacggaatcccctttccctctaatcttggcacaggccgtgctgtgggaggcagtgctgtgaccgtggtcactgtgtacacagtgcagaggcctggccggccaacaaggaggctgcagagcatgcagtctgcagcctgggaagcacctgccactaccaggctggatgcctggcctcacctgaagagcacagtgagcccctgcagaaaggggatgccactgctgggcttgggaagaaggaccccgcgtgtacaccattgtttctatcagaactggtgtttgtgaccttggccgacaagcagtcccagacagtccacttgcaaactctttcctttgacatttaagccactaagtccctctcggaaaatgtcccaaacagaactggagaaagggccactggtggcttcagatatctccatcctgctccctcgtgtgcccgacacctacttgttctccttattcctccagcattaaaacctctcttggaaaaggacctgataaactcattcccacataagaaaaagttaaaacaggttcagcctcttccttcccagtgcaatgcccttagcttactgataaatgtttcattctattctttccttaataatccccttagcataaacatgcaggcacacagagctggaaggccaccttccttggaaaaggagaacctgcctgtctcccagcaaatgccccatcaccccggggacctaagattaatgtcatactccatggggaaaactcaagcacttggaacatttgtaaaaaggcaaccctcaggtactcagggtgctcagctttcaaaagagcaatacctttgaacagaggccaggcatgcagttccccagcaatgctctagatggttagaaatgacccaggtttcaccatattagctctgacaggcagtcctgaatgtttatgaatccagcctatgtgaggtctttctagaaggtctcaaatggtttcttagaaaggaacagatgtaaaacgtgatcataagggatgtgctcagttatttttaaaacattaattttaattctggagtatttccagagtacatatattatcgaggaaagacttaccctgtctgtgtgtgaagggatcctggccacgactttggttacgttcttattttcactgtctcaccagtgtgtaatgtttgctcattcttatccttatgtttctgttttggggtttgaggcagaggtgcaggggatgaggagaaaaggaggatggcacttttttcagggtaggatttcactgactggggtgagcaaatctaagcattgatcctcaggtgtgccgagtctcggggctagcttggggccaccaggaggacaggcgggtctgcgtggttccagagggacccccagagactggcctccctgtacagtttacaacaccctttttcatcttgtccagtactaaggtaggtgggctcaggccgatattaagcaatgtcaaatcctgcaagaacctgggagtaagtagtataaatatgaaaaagaaataacctagaaaatgaagagacgactcaccaagttattgctgaaataacatgcagagaatactgttattctctgcatgttatgagtgtacaagctactgctcagagacatagggggtcccgtccaggctcccttgcaagtgagaagcacagagaacatggggaaagaaaatccttgactctcagttccaaacccaaccagcctatgggagggtgtctccaatgtgatgctcgggatggcttttctatgaggctgcaaagatgatggctggcccagggagaagcagtagggcttctttgtcagagtctttgggaatggcagccatggtgggtgcatgacttgcaggaaagcccctccaggggaaaggcaaggagggtgcagagaggcagcaaggggaaggtgcactgtgaaagggcctgccgaagggcaacggaccacactgggcaaattctctgtcttaggacagaggcgctgggagaagccggcactgcgtaatgggaaaggacagaggaaggggtgagagaagcagcccagcatgataaaggcagccactaaacaaggtccactgattcctgcttgagaagtgacaattaggacctttctagcacaggctcctgactgtccccactgccccaagtcccgagatatcgtgagctctgggctggtgtgtcagcctctgcactcacgggagcctgcgggaggcctctccttagctcgagagcctgcaaccgtaagtgcgcacttttttgtgagttcattttttaatagctttgagacataactcatataccacaatgcaaccatctgaagcgcacaattcaatggttttcactacaatctaggatctttttattacaacaaaagaaatcctgtaaccctttagttatcaaccctcacttccatccctctccctcctcattagcactaggcacccacccatctaccttccatctctaccgattttgtctcatctagacattgcatctcgatggaatttcacatgtgaccttttgtgtctggctttttccacctagcatgttttcagggtttctctgtgccagaacttcattcctttttatggctgaataatattgcgctgcctgaatctactgcattttgtctattcttcagtgaatgaacatgtgccatgtttctacctgttagccattataatactatgaacatttgtgtacaagctcttgtgtggacatgttttcatcattcttgggtatatacatagtactggaattgctgatttgaataataactcaagcagaactttttgaggaactaccagattttttttaaaaagcggttgtgtcatttagtattcccatcccagagtatgaaagtcctgacttctcgacatcctcatcaacatttgttatcatctgtcttttcgatcacagccacactagtgagtgtgatcatatggtttgattggcatttccctgctaaggatgctgaatataccttctttagaggaatgtctgttcagatcttttgttcagttttcaattaggttctgtgtcatcttattattgagctgtagtagctctttaggtattcctttttttttttttttcttctttttgagacagagtctcactctgtagcccaagctggagtgcagtggcgcaatttcggctcactgcaaccttcgcctctggggctcaagccattctcatgcctgtcccctgagtagctgagactacagacatgcaccaccacacccaagtaattttttgtattttagtagagatggggtttcaccatgttgcccaggttggtcttgaactcctgagctcaggagatccgtctgcctcggcctcccaaagtgctgggattacaggcataagccaccatgcttggcctagatgttcttcatataagttccttatcagatatataatttgaaaatatttttcccattctttgattgtcctttatctttttttgagacaaggtctcactctgtcacccaggctggagtgcagtggtgcaatctcaatctagattcactgcagcctcgacctcccatttcagcctgccccccaccacccaagtagctgggactacagacacacactaccataccaggctaattttgtattttttttttgtagagaaagggtttcaccatgttgcccaggctggtcttgaactcctggactcaagcaatcctctaaagtgctgggagtacaggtgtgagccaatgcgccccacctccaactgcattctcttgcatgtggatagctagttgtcacagcaccatttgtttgaaaagactattctttctccactgattgctgttggcaccctggtggaaaagcagttgacagtaactgtgaagatttatttctggactgtcagttatacgccattgttctttatgtctatccttatgccagggccacactgtctggatcactatagtttacagtaagctttgaaattgggaagcatgaggactccaactttgttattcttttctaagattgttttgatgatttgaggccctttgcaattccatatgaattttagcgacatgtccccatttgtggaagaaagatggcttaaattttgatagagattgcactaaatctatagatcaatttgtagagtattgttatcttaacaagtcttctcattcatgaaaatgaatgtctatttgagatatttttgtagttttcagaatatgttttaaaattcttttattaaatttattccaaagtattttattctttttgatgttattataggtggatttttttcttaatttcacttaattgatactatacagaaatacaattgatttttccttattgatcttacatctgtaaacatccagaccttgtttattagttctaatagtttttagagattccttagtattatctgtatacaagatcatgtcatttgtaaatacagacagttttacttcttctattcaaacatggatgcattttatttcatttacttgggtaaatgcctaggctggaatctttaataaaatgttggatagaaatagtaagagcagatactgtgtcttgctcctgatctttggagaaaagcattccgtctttcactttaagtatggtgttggctgtgggttcttggcagatgctctttattcggtttcagtagcctgcttatgtgtaggactttgtccactttctgtaagttatctaacttagggcatacggctgttcatagtgttcattcccaatcctttttatttctgtaaggtcagtagtcacattcctgctttcgttctttaatttagtaatttacgtcttcttttattcttggccaatctagctaaagacttgtccatgttgttgatttcttcctatagttaacttttggtttattattctgctgtactattttctaccctttatttcatttatttctgcatgaatgttactatttctttcattctgcttgctttaggttctgttgctcctctttccagtatcattacatggaaggttagtttactgatttgaaatctttcttctttttcagtataagtgtttacagccataaatttccccttaaggcctgctttagccacattccctaagttctgttatattgtgccttcacctcgattcatctcaaaatatgatttagtttcccttgtgatttctatttgacccactggttgtttaggaagggtactgtttaatttccatgtacttatgagtttcttaaacttctttctcttactgatttctaatgtcattccacggtggccagaaaacatacctagtattatttctattgttttgtgcttgttagatttatttactggcctagtgtatgatctattctgaatagtgttccatgtgcaaattctgctgttgttaggtggagtgttttatagatatctattgggtttggttggtttatactgttaagtcttctatttccttgttgatacaccttgtttttaaaatccactactgaaagtgaggtattgaagtctccagttattactgttaggtatttattccttcatttctgtcagttttgctccatgtattttagggtctcatatgtttataattgttgtatcttcctgatggattgcccttttatcatcataaaatgtctgtattctagtagtttttttaaaaaaatctttttgtctggtattagtatagcactcctgctttctgtctgcatgatataactttttccatctttttactttcaatgtatttgtatataagtatacactcagaaggagaaaagaatcattcttatctgtggactgttcattgctgtaagagtcagccagcagaggagtccgccaagaatgaccttcattagaccccaaggggaaagggccgttttgagacgcagccaccaacatatccaagctcatttctgaaaccctcagcaattccacaagctaggaacccttccactgttgcccttactgcacagccatttcttctgtgggctgatgtttcttccagaacctggagaatacacagcttcccttcatttctgagagatcgctttgtaatcttttttggggcagcggctgttgttgttctttcagtattcctcagactaaatctcaccttttccctttacttgtcctttcttgtaactgtgacataaaaagtcaaatggaaacatcaagtgcttgatggttttcatattttattactcagaaaaatcaggaagagagaaggatctcttttgatgggttgcagagcctacatgcaaagcatttcccaacaggagaaatcctgtcacctgtgaacctggtaccagggcattctctcatcctctgtaatgatcaaacgaagggatggtcaaatgaccaaaaaaaaaaaaaaacctctgaaaatgctttcttgtcctccatcttgaatgtttcttaatttagataaataaggtaaggctttaaaacttaacatttaatttaaagacaggtgacatcctgaaatttgtgtcagaaaaagttccagcatcttggcaatctaaatttctcctccccactcacataccatcaacaaggcatgtaatacaccacaggtattagtcacaattagatttacctattttattttagaaaaagacaggaaagaaaatgtttatgtttcagactagcaagaaattgattaaaaaaccatatcttttcagattgtggcaatagctaaagatccacgtattccaggcttcattcttaagtcatggtctctctctctgtctctcatacatgcacgcgtgcacacacacaaaatatgctttaataaaaagggattccattccattttaaccccaaataaggccagcctgattaagataattgaggaaggagaacacatttaaaaaccaaatacgcttccttgcaaatgactattcaattcaattgccagtaagatgttgaatgttcttttctgaatcactctaattcaatgtacagtacagcatgtactgcctgggaagaagttcaaatcataaataccatagggaaatatctaataacttggaatggcctttttcaagtggctaataagctcttaaagactgcaaaaatgttaaatctggtaaagcacaaggtctgtgctccgggacgtgtccacttcattggcagcccctgcctccttgctccaggaccacctgaggctgggtctcaagggtctcgtcacacagtactgctctttggatgctgaatgatggggaggcctcttccctgcagactgtggttagcaaggtgaaggctgctggccatggccataacagctgggctgatctgtgatttctgccatgcctgccaatgtcagggtcaggtttgtcaatgtttttgtgttggtgtgtgagatgctggggagacgccatctgccatgcgtgtcggactccagattccatatggttacagcagggtttgggagaagtatccacagagctaggattagaataaagtggtgctaatggtgtgcagttgggaaggcaaaggaaactgtcaggaactcaatggaaaaagggttgaagaaaattaaagggagatcaggagaaataaaggaaagtataaaggaaaaagacaaacatctctgccactttaaaggtcaaagagtaacaataacatagaaaggctctttcaccttgccaggttcaacagtgggttgcattctggcttctttaataaagttcacaccatgggattcttgggcgcttcttccaggttccaggctctgtcctccactcatgccaccccatctgaaacagccatttgtaatccagaccctccacatctccaccttaccctgttgcccaggtgcagtttttacttgtgtgtccaatctccccgattttctggcactcatttcctaaggtcaggttttctacttttcttcacttactagcatgaatccatgtaaccataggttcttatgaaagactcatgacaactagatcgtgccatgcaataattcaaattttgttgtccaaatatttgtgtgtgtataatagctgtacagaagtcctcccttatctgtggcagatatgttctaagacccccagtggatgcttgaaaataaggctagtactgaaccctgtatatactatgcacagatttctttcttctttttcttcacaatttcatgggtagaagattcatttactgtagatctgagcaacctcagcatacatttgtttttctttccttattaagttgaagacgtttaccttttcacttacaggatgcattttatagcttctttttagtacatctgagttgccatcatcaccactcttgtgctttgagaccaatattaagtaaaacgcaagaactacgacaccctacagttgatctaactgagatggctactgagtgacaaccagcagggagcagagacactgtggatcccctggacaaggggatgattcacgtcctgggcaggacagagcgggatggtgtgagatttcatgacactactcagaacagcaagcaacttaaaactgatgaactgtttcagaaattttccttttaatatttttgggcaatggttgaccacgggtaactgaaaccacagaaagtgaaactgcaaataagtgggaactactgtacataatacatatatatatgtatatggtgcatgtagatacatttacatgtgtgtatgtatatatgtatgtgtatgtatgtacgcacggatctatcttgttaggaattgcaagagcttcaaaatctattatcagatcatacatttctttagccaaacaataaatcctctttgatgagtcatggcactcgcatatccagtttaagaaaaagtacaaggtcagatggttcagaataaacaaatcaacaaatgagcaaacaaaaccagcctggggcagggagccaggcacttgctgtctacagtctctaaggcagatcttaggtgctattttctcctgtttttcaatttcattttcttctctgctctaagtaattccactcattctttaagtctgattcacatgattttacagtcaggaagggagtgtaaggaagtgggaaagagaagtggtggggaggcagaaatcgaatatttatcaagttacacaataaaaagaaattcagaattctaacacgtcctcctttgtataataagaaaatacattccctgagctaatacctgcagagctctggctcatgctgagagcgtggtgccaatatctcagtgggcaaaacgggagtaagcaataatccaaaacacaggccagcaaactcttacgtgtgggctatgtctggcctgcggggttatttttggacaacccaagggcgaataacaaattttacatgttttaaaggattatgactcaaaatacagaaaaaaatatgccagagaccacatgtggcctgcgaaggcaaaaatatttattctctagacctatacagatgaagtttgctgacccctgttctacggagatactaagaacttgcttctgaaattgcttttagtctgaagtgtatttggcttgaacttggctcaaacgtggcaacacggcaggactgtggtccatcaagccagaatgactctgaactttctgtagcaatacacacacttgatgttatctatcgtaggcttagcacagctctgtggcactcattaatagagtctgcactcatgtttgtttatgtcactttgttttgtaggtgttttcctacatgatcttctggtttcagttttgcagtgcagcatggttctctcttagaagatacatgggaggcaaaatcacgaacttgatatacttgcccacttgttgcaatgatcagagggctctgttatggcactttgaattaatctggaatctagttgaaacatgaagatgtgatctgattacctctcatctgtctttcacaaacctgggaaatttttgatcactgtttcttaaatgattattttctgctccattttctctctcctctccttctgtgactccaattacccttatgctagaatgcttgatactatcccacaggtaactgagtcttgctcattgtcaacaattttttccttcccattttctagactgaataatgtctaatcctctatcttcaagttcagtaatctttcatcatcttactctgttgttagacccatggagtgaatttttaaaatttcagatattgtatttattttttagtcctaaaactgtgtttttgtagagtatatctttgttgcttctaagatctcctatatgttccatgaccatgagcatagcttttcttacgtttctgagcatagttacaatagctgctttaacattcttttcttctaattccaacatacatgtcatcttccagtcagtctccattaatggccttctcttttgagtatggatctgtttccctatatgactagtaattttggattgtacctggaacactgtgaatgatacactaatcaacagcagcactgctcaacagaaagaagatgagaactggatatataatttggattttttttttttttttttgagacggagtctggcttaatcacccaggctggagtacagtggcgtgatctcagctcactgcaacctctgtatcccaggttcaagcaattcttctgcctcagcctcctgagtagttgggactacaggtgcacgccaccatgcctggctaatttttgtatttttagtagagatggggtttcatcatgttggccaggctggtcttgaaatcttgacctcagtgatctgcctgccttggcctcccaaagtggtgggattacaggtatgagccaccatgcccagcctgttaatttggatttttttagaagccacattaaaataacctcaaatttaattttagtaatatattttgtttgtcctaatgcatcccaaatataatcatttgggacgattataatcaaagtaatcacgttaaaaattaagatattttataatcttaaatattttataaaataattgagacttataatctcttttcatactaaatctttgaaacctcatgtatattttatatttatagcagatttcaatttggagtggctagtgaccaccatattgaactatgcagctctagagtttcattttagaagaatattgaatttttgttttagtaggcagctaatttggctggaataaaactccaggcactgtctctcttgtggtgggcagcagctacagtctcagttcaggtcttctagctttagctgtgctatgtggagtctggccggcctgtcttattcttagatttggccctagtctctaagaattcccagagattcttgagatatatgcagaatttgggagtcactctctgtggctccctcctttctggagtttttccttctcagtttccagctgctatgggtttccctgaatattctcctctgatggcttaaccagtaaaagatggcgggtaactatcagagttttagctagtctcaatgcaactagggccttcctttggttgaagagctgtcaacatgggtaattcaattccatgccattctattcctccatttctctatttctcttcagtttctaactgctttctagatttaattaattaattaatttttgagatggagtctcactctgtcaccaaggctggagtgcagtggtgtgatctcagctcactgcaacctccacctcccaggttcaagcaattctcctgcctcagcctcctgagtagctgagactacaggcatctgccaccacacccagctaatttttgtatttttagtacagacagggtttcactatgttggccaggctgatctcgtactcctgaccttaagtgatctgcccgcctttgcctcccaaagtgctgggattacaggtgtgtgccccctcacctaggctgctttctagcttttaaacaattgctttttatactgtctccagagttcttaattgttatctgtaggagggctggtccaatataagctactctatcgttacaggaagcagaatcctttattttaaaatcttatccctggagttccacagagaagccagggcgtactgtgagaggtggaaaaggcggagtagactggcccactctgccacatcgtgtgtgtgtctcaattcagtggtagcagttctcatttcatctgtttcattttactggtttctgtgcataattttaaaaagacttgggtataaaatagcttgaaaacagaactaattttaaaacatgttgtgggaagtcaggaaccccgaacggagggaccggctgaagccatggcagaagaacgtggattgtgaagatttcatggacatttattagttccccaaataaatacttttataatttcttatgcctgtctttactgtaatctctaaacataaattgtgaagatttcatggacacttatcacttccccaatcaatacccttgtgatttcctatgcctgtctttactttaatctcttaatcctgtcaatttgtaagctgaggaggctgtatatcgcctcaggaccctgtgatgattgcgttaactgcacaaattgtttgtagagcatgtgtgtttgaacaatatgaaatctgggcaccttgaaaaaagaacaggataacagcaacattcagggaacaagagagataaccttaaactctgactgccggtgagccaggcagaacagagccatatttcttttctttctaaagcaaacgggaggaaatatcactgaattctttttctcagcaaggaacatccctgagaaagagaatgagcccctgagggtaggcctctaaaatggcccccctgggtgtggccgtcttctatggttgagacagtaggcatgaaatgagccccagtctcccatagcgctcccaggcttattaggatgaggaaattcccgcctaataaattttggtcagactggttgctctcaaaccctatctcctgataagacgttatcaatgacaatggtgcccgaaacttcattagcaatttttcgccccggtcctgtggtcctgtgatctcgccctgcctccatttgccttgtgatatcttattaccttgtgaagtacgtgatctctgtgacccacaccctattcacacactccctccccttttgaaaatccctaataaaaacttgctggttttacggcttgggggcatcacggaacctgctgacatgtgatgtctcccccggatgcccagctttaaaatttctctcttttgtactctgtccctttatttctcaagccagccgacgcttagggaaaatagaaaagaacctatgtgactattgggggcaggttccccaataaaaacatgcttctcgaatggagccctaagacctttttgctcaatcatgcccttgagctcatgctgacctctcctcctccatcgtctcttaccctattttctaatcacttcaccagggccaggccatctttagtttccagagaagaggctgtagcctgttagactgctgagtctttacagtggcaaatcctccattctgtggcccctgaatatgacctgatggactgatcgataggttcgtggtacagctgctcataccgaggtgctcaagcagatttcctgcagtgagctcttcctccaggccttcagcattagggtggaatttcattcttaatttggcaaggagcacagaaaatcatcacagcaagcctcaccttctttttttccttcctgtctcctctctttctcactcaaacacattttaagagtttgacaaaacaaagggggtcggtgcaaaagccaaatatgttgtgaagctcttgtactaggcaagcggcacaaattgagttaagaaacctagaaaatggaaatactaaacacctagcctagttagaaaaggtcaatatgcctcaaatgatacacagaaccacaaagcaaaaaccattcacctcaattcacagcaggacggaaggccaaagggtgacatgccacaacgtaatggattcattattaaagtcccgctaaaatgactcaaaaagaggaggcttagctgatgaacgcatttcacacaattcatctcctgacaacccaagagagtccacaagggtaacacggccatgaaagctggggctgggacagaagttctgatggatcccgaagaataaacaccaagatccacactcactggcatgaatttcagccactgaaacaggtcacccacaacattagcctgtgtgcacctttctcctgggcactcagactccaatatttgtttccttctccaccaagacaaagtaatttggggaagccaatggttaaaagtgtgtggtgatggccattttttttttttttttttttttttttgccatgagatgttactaatggtctcctacacaatgccttccagtgaaggttgtatttccatcagagtcctggcttagtagctggaaatttggtaatttgagcaagcggaaatctctcatcaacaataacggaacacagcatagagcagtactgtggcattaactgcatatcactccccaccactgatggtgctgccgccccagactctggtgggtccaagctacagaacccagcttcttaccgtgactggcaggggtgcaagttgcaccttcggacctggggctctgggcggcttgcttgagggcagtcactgtcgttcaccagagttgtggtcttgttgacaatccgtgtacacgagacgatggttctgcgctcccctggaaaccaaaccacagggagctgagagactgtggctgcacccacgtggaaaggctgggcttgcatgcccatgaaagcatgtttgggtgctgctgatggtcacttggtcatttaaagtgactgctgtaaatgtcatgtgggtttttagagaggaagaactataatcgtagggaggagagtacaagacacagaaggcagagtggggccctggaagattctagaacaagataagaaagcagcaacacctcagatcagcggtgtccttggacagcttggggttcgttgatttgggcctttgatttccaaagattgctcatctttttatctgcttgtttgatgtttaaagtctatggagatctgatctcaattaaagacctgcacatcagccctcagcagagtctggctacctattacagaattcctgcttgctggggagaagtgggagatgaggagtctggtctggaagacacacagacctgcatcctctagacaggcattccagagccattctgacttgtctagccagccagctggtacttatggctgagcccccacctgctcttgggaagctttgctaattcattatcccaaatagatgtagcccttcttataggtgttcccagagcaccctaaacactgcacggccatgcctttgtcaccctaaatactgcacggccatgcctttgtcaggcaggctgagtgactgggagttaggagggtggcccttggagccaggctgtctgggttcaagtcttggctgtatcacaaatagcatcacagtggccatagtgtcaacagttggccaccatacttctgtgtctcagtttcctcaagcagcctggtttgcttaacttccctgtgcctcagggtgcctcagtgatgattaaaataaacaaatatatatggtgtccatagaacagaacctggcaggtggctaacacttcatcttagctctattgctgtcattattattatttgggaagagtgacaataaaagattaatagggagtcaagcacaactatttggatcctgggctccctgctgggtctgtgtcctgggcaatttgtcatgtagggatgactcgaaatcatggagacctgaactccactgccagttgctgctgccccacatggcagcctcgcatgagtacagaaagcacggaactgctttcagctttggtggcaggtctgaccactgtgttaggaagctggaagtcatcagtgtcataaaaggattgccaccaagccaacagcaacagaacagcctgcccctgaccccaggagagcctgactattccatgtgggctatgcttagtttgtaacaagctgcccaagaggaaaacctggctggaatcagaggtagatgtgtcagctggatttggaggttgaaaggccatcggcacaagcggcagctaagggctgagggggagaaggccccccggggagaggtgcagagtggaggatgcagggctgatggtggtatccggaggctatgccaactgccgcagggctgttgcaggaataggctaagcacagacagtgagggtggttggccaagatgcccaggaagaaactcctgtgtgtctataactcctacccatgaaaaatgggatgaatcccttaaatggtaagcaatgctttacatattggacatctaacaaaagttatccaagcagtcaataggtgctcaggactagggatggcgggggctatgcccggggttccactccattatccaactctctgggttggcctaccagagtccaggtcaaccttctgtcccaactctttgtccactaaaatccacccaccctgtgttccatctcccatgacccttctatgtgccctgctagggtgacaaacagcactgtactaagaaactgctggctcagagttcagaatggcttcctattgccccctctcaatgacacaacaataaacacaatgccttttggtcatattgattcttgctgtacgacaggctctttggctcaccctgtggaccctgcagtgtgcatgagagacaaccatcctatttcagaagtgaagaaacatggggtagagagaggaagtcatttgctgaggtcaagcaggaagttgtgcagtcaggactcatgctcagaacgtttcacccgacttgcaggactttttctttccattgtatcctggagtgaggtgactgtggccaagagggaagggaatttgggagcgggcagagacatgctctggtgcccctccagcaagcagcagcagttgaaggtctattctgtttattcccagggtccacctgtcacacccgagatgtaatcatacatcagccaaaccccgcttcacccataggtcagagctgtggggccctgggccccaggcaaagcagaggtatgggcatgaccctagtgtgggagttgggaagactctgtccaagtattctgcagagagattttcggtgggatatggttaaattcccatggagctacaggttgcagatgtctcacactctgcgtgctggccacagatgcctttctccttccttcagcaaaaccccacacccaacaggtcatggaccacggccactcacctccgccgcactgcacactgcacccttcccagccgctgtgggtccagatgaacaaagagtcctgcggtttttctggttcgctttgattttccgcagtgcggtttacaggaacagtgtattcataatgaattccataatcttggtcgtgaaataacaacacctggatcagccgcaaaacaaaaggccattttgaaaaggaaggaaggcccgtgggaatgccgaatctgcacacacaggcacactgcggctgtttctttatgaggggtaaccagctcttttctggggctgaaaacaggttccactgagggtgctcctttatctcagccctggattcctcagggactcaactgaggagtggggtgaatgcaaaccatcgtgagggagttctgttctttcctacccaagagagagaccagcttagactaggagctttaggataagtgactctgaaacctctcactgcacttttgatggagagctgcgtcacgcagagaacagtccacattcctgcatgctcacccacaaagctgcccttgcagacaggaaagacacagataaacttttacctagaaaggcatcagagcaattggggtgactctatttctttggaaatgaacatcttccttcactccccatcatcaatcactgctgtgtcagttggtccagagtcaggagtaaggcaagctcaagggcaaaatgcagctcactggtgatactgattctgcaaacaatgtgtacaccccagtttggggaccatggctttctatatagaggcaaaggggcacctctcattttcagttttaaaatcttgaagtgacaatcacattttgaaagaaaagccatcaatattaagcgagggctgaaacttcagttacggtagtagttgctttctccgagttttgttcatcctggtctgaatgaatccaggctggggacttcactttaacgggctaaccacttgctcagtttacaaaggcttttggtgaaaagggaaatacattcacattggtgtttgctagagaaagcaaattctcatgctaacaggtgaagtttcagtacaggttttatgttttgcctcctctcttagtccctctgaataactgcttttaactcagaataggaggatttgttctgactgtgactagggaacaatcttatcccagataaatgacttaggtacacattcttgggtcccagaaacctacttgcaggaacgtatttgcagtggacttagcgggctgagaggtgcgctggcagatttctacatggtttggttgcacatgaaaactgccttacctttgtctccccagaaattttaacggggttaacaccactacggggcaacgcccaccctgggggccagcgctccccggcagagccagcctcctcaggagattccctgggcaatggctagaaaatcttttgggtgtcaactaacctggaacacttacaggctgccagagatcacaaattaacggggaagaagaacttccacggagagactctggcaggcactgtggacaaagcgtgttttgattacaggggcacaagctgccacaaatcctgttttttggaaggagacccggaatcgataatgatgagccatcagaagttagccatgagaactcctggatcttgagacggaagcagggcgctccattccctggagatctctgacatgtttaaaaggaggcatcactgatgtttcagtggcttgcatggaggcctccctgagacaacaggtaagacggcgccctggcctggcccaatggctcacaggtttctggaggtcacctggggagtagaatacccacatcatctgatccccctccctgattcccaaatgctcgttgcaagctgggtctgtgaaacctgagggattccagttcggacctggagtcatagttcatttccgaaaggtaatgatatacactctgtgcaggcagatctatgcatctcaccaaccgatgcaaaaacagacttggagtggggctgtctgcttaatgaggccaagtctccctggctgccatccacgtggctaagcatttccttctttgaggcagctccttttgaaaaagataggagctcggccagggaagagccaggggaagcaatgagagaattctgaagcaagttgtgcaagggactggaaaagaaaggacccagagaggggagaggactgagcagcaggggacggcataaacccctggaagccagatgcatttcctgcccccgaggtcccaggcagaagtaaactggaaagtaacctagtagacctctcggagccacaccccctaagacaagtgtggaagcccagcaagttaccatcaagtgcagcggtagtttggttggtcccttggcagagatcttctcccacagcccccttctcacatagcgaacagttgtgcctgcaatctggaactctccggggagctctatcttccagtcactgttgatggaccccttacccgagtctttgagagctagaaagcaagttgaagaccaaagaatcaaggggctgggggtagggggatccagcctgtctttaaacggaatctacagcccctgagtggggcagaggtctcccttccacagggggaaggagggaggcctgaagcgagagaaggcgagtgctctgtatactgagaacaaaagcctggatcgcagggagcacggagatgcagacccctaggatccccagggagagctgtgggattgatgggcacctttcagcctgggcttctgtctcaaaaccaactcagatagctggggttaggggtggaggggcagggaatggagaagaccatggtctgatatcatttcactaaacttatccagcagatggttttctgcctgatgaattcattccattttaatgtgtcccaggctacaaaccaggttttgctgctttagcaaaactcatcagttccctttcctattacctacctggggttccagaaggagaagagcccatctccagcacctcttaaggatctgatatccccccattactaaagtggacgtcccttcaatcaataaccattactctgttaagtatgaaggtttggaaaccctagccacccacagatgtggtggtcacacttggcagctgtggacgagcagtggttgggggctgagcgtagcaggggagaggcactctcacaccctagctctgtgggcttcaggttctcacgtttgctcacccacatctctaccagggacagcctgtgccaggaggggctgagaatcaacatgctgctgacgggccataagcagaaacttggttttccacacaagccatgtatttactattttctgagtcgctcaccaggatttttcttgtgtcttcccacttcggggtgaagatcatgtggttctcatgaggacagcactctgcagtgacatcctattttgttgctgctgttatttagggaaaaaaaaatcccaacaactaaaacctattctggcattttaggagaagtcggcagatgacaagaggtgacagtaagtctgtcatttcccaaaatgggaactccagggcaccctcagtcctatgcccacactccctgtacacacaactggagccccaaggacaccccaaactgatctacatatatctcattgggaccctactcagtccatatcaatgaaatcagattctactgcattgactgttctctgcttactgaggccagaaataaaatgcccacatttaatactgattttggaaaatgagagttgaaacccaaaaggggttttggttactgctgaattcatcagccccaggctggagcaggccacaagcaacagagggtcgctgggtagtcactggcctcagttcttgtctccaggacattatggtcccactgctcgctcccggcaaacacacagacgcaggctcagggcttctcgtgttagagggactgccaagagaaacaggttcctcgcttctaggaactttccagcagagtggcttccagtggggtctcgtatccagggtggctatgagaggctgaggattataggactccagggacagcttaggaaagagaaagccctgccacttggagccgaatctgtttcccttcaagaaatccaacccacaactgaactgtcctggctatgaaaaggaggtgagaatgttgggacacccacagtttcctctcctttttctcttcttctgccaccatctgcaaactgccatttaaggtgcatattctctaggttggctctttcatatactctgacccatttaatcttctcaacaaccctctgaattattgtcatcacttcatgggtgaggcaatgggggcagagagaagtaccttgcccaaaatcacaaagctattcagttgtagagtggagacctgaatccaacagaccaaccctactgcacttatcactctgacaactttcaattcccatttctttagcatcagtctagattttatgactaatgctgaaatgtgcaaaggtaaggcctgttttcaaaaaggacaaattctacgctctgttacagggtttcatattctatatacccttacaacagtgactgatttcacggatttccaatgcttctagtgagctaataatgcaaatacatacttggttatattaactataggcaaatataggcaaagggtgcatggacgttcatcattctttcaagctttctgcaggtttagaaaattgtctcttgcatatgcatgtgtctatttggttttaggatccagtgtgggctggtgggaaggagcagatagaaaaaaccaaggggccagagtcctttaagacagcagtccccaggactgctttttgggactagggactggtttcgtggaaggcaatttttccacagaccagggggttgggggaagtggggtggcgggggatggttttgggatgaaactttccacctcagatcatcagccattagattctcataaggcatgcacaacccagatcccttgcacgtgccattcacaatagggtttgcgctcctatgagaatctaatgtcccacttctgatctgacaggaggcgcagctcaggcggtcatgctcgctcgcagggcactcacctgctgctgtgcagcctggttcctaacagaccatggactactgctggtccgcaacctggggtctggggacttctgcttgaagaaacacctcagaaagcataagttgggggaacagcagatgtaccctgccattccctcagcctattttgagggcctcctcactgctggctaaagacagacacagctcttgctcccagggagctcacagtttggaagggagagagagaaaagatgaacacaacacaatttcacaagctttatggtaaggtgcctccggggcctgggaatgttgtgggacggggcagatggggaaggcttcctgggataagcccgctttcagctgagcgtgtaagacagggagaggagacaacgccacccgcagtgtgtggctcagtggtgtgtggctgcctgcagtgtgtgaggcaggacggtcattcctgatcctcagaggccaggactgctaagatcagttctgggcggggtgatggagggaggaaggcacagcaccccatatggagaagcaagtggaaggtaaagttttttccacttttcagaggtttggctgggaaaaggaggcaagagagggagagtggcctcagagggtgggaagaaggaaggggctcactgtgaggatagaggacacccaggcatgctgaggtgccctgtacaaaggagacagagatgagcaaatgatttctttgaagctgtgtgctgaccacagccacaccagggcctgctccgtagaacccatttctctcacaaagaccagagggaagccaggcagctgctctcctccttgctgggccaccagcacggaccggctgagtcccatatccacaccctgccagtgacagactccaacacgggctgccctgagctggggccccaggctcgtccctggtttgttgcttctgtgaacacccactgtgcccatgacacggcatctgtttctccctttaagcaatggtacccagggtttctcctgggaacatgttttccctcccgtcacgtgggattgaaccccacagttccaggcacaggcccatcacccaaccccaaacagggggacttttgttcaccttaggaaaaggcagctttcttcccacagggtttcccagagactggatgtgagcctggatctaccagcccacaggaagatgtccacagagaggacaggcaggagtgccagtgcggagagaaaccgtttctcctgtgacatcattttaagcccctggatccagcagtgcctgaagctggtgctcagcaactgagagctgggtttggcattcacacatgctttttggaggttgggttaaaaaaaagctaatcacgatgagggcagaacaggcgaggaaagaaaattactattacagcttcctataaataggccccagatgtttaccacccagctgagtacccctgagaggcagaaggcctggcacactccacccctgcctcaaactccctccagggcctctgcccatatcccagcactaacacctctatcccagctctaaccctcctatcccggctctaacacccctatcccagctccaacacccctattccggctccaacactcctatcccagctctgaccctcctatcccggctctgacacccctatcccggctctaaccctcctatcccggctctaacacccctatcccggctctaacacccctatcccggctctaacacccctatcccggctctaaccctcctatcccagctctaacactcctgaggaggtgactctttctccactggccttgtttatgtattcctcgggccctttttttaaagatgttttaaagtgactctgaatgacaacctacaaactaccccacttccatgccaaaagtaaaacatctgggaagtcaagagtgaaaaggcccaaaaaagggcaggagggcacacctggagacggttataagaccatcctcagaaacgctgcacagaggtggcggctggcctggggaagccctgcttctgccatcggaggcccgacactgggcggcagcagcagcagcaactacagcacgaggtggagatagagccactagggccctggagcctgccatcctctgatcaccggagcggggtcttgcttgtctgtagcggaatgggtgggagaggtgtcaggaagagggctactggaggccacggaggagtcactgggtatggtcaaggaattgtgggataggaaagcgaaagaggctgcggctgacggacaaacccaggcaagctcaactgctgatgggaaggaacatactggacaacagagtgctagcggcagccggttctctggggaaaatagcctagagtcatggcgtatttgcttcccaaagtgtaaataccctcaccatgacagattttgctatccacctggcatcagtgaacaaggagtggggaagagatgcctctaattggctctcacaagccacacacagctgtgggggcactccaacgaattctgaagatgcttgtctttgctttggaggtcctggtctggagccgatgagttggagaactcctgcacaatcacaacttgtttgaggccaggcgtgggtttggggtcagctctcacagccccagaaagaatacacttggcatgcccacgcactgcctgtggccatcgccgcagtggctgcaagttctggcgcactgcaaatgcagctttccagctcagagcctgcacgcctctcctcgggacagcgtgctcctagccacgcatttgtgtatctcccggggagaggaaaacacaggcagagttattagcaggaggtcagcagagccaggaggcataggggttacttccaaccttttcactttggtgtcacttagcaagattccaaatttgcaatttgccgtggtccatctgaaaaatcataacttcctgctaaaatcagaagttcgcgcctgacatccctcaaaagagatgtcagcctcagagattcctttgggacgtcaagatcatttttaacagtgaataaataggttcattgtggagtcccaagaacaatgacttcatggggccatgtcaaatccagagagacaatgcaggtcacctcctggccccttctgtggcagcttgggttgctctcctgccttgcgttagctgcagagtggggtctgcaaaggcctatgaggcccatgaggctgcagctccaggcacctctggaggagtcctttccacagccctatgcataatgtattttttttcctgaaagacaaccttccaaattaaatacattttgggctctacaagttcctgtcccctcaaaccttgggcatcagtgagtatctccaagccccctttgtctctaagtattttgagattaattagtgtgcacttgaaatcaggatattgttggacccagaaagcactccatggggcaattaaaatgattacgaatgctttgattttatgggcaattaacagagtgaagaacaggggactcccccagtgatttgattttatctgtgaattctgaagctctggtttgctggggagattttcccttgctcatttcgcctgggccagagattggaagtcttaaatcactacccaaaacataactatgctcacttttgtgggttttgctcagaagctctcaacagttagacttctgtggggcaccacacgggtgggtacactttcctttgccaccagggcagaacaaaacctttgcaatgagctggagtgtgaggttacatgcagaacgtccatttcggtctctggcccttcttcctctctgtggacacttacacaccatcctggtcttccaggcactgtgggaaagaccatgagccattccagggagcgaggtgggggcattcctgagggaagggcactgctccttttcagagctggctggaggcagatgcgagctctgaccctgtccacatgcccctctctggcatggagctgcacagaagcccgagtggggttcttttagtctctctccgtcctagcttcactggaagacctgacccacagtcaacctacttctaaacctggcagcaagtcagctccttttatttccactcggagttctgccagctctgttcttagctatggatacaaactgcccaggcatttcctgttccaggtggttttgagcagaaagccagccagcgtgggctgaaggtaggtggggtgaaattcttcaggaattgctcccagcaaatgtgagagtaattcaaagtaattcaaagttacactgggttgacttccaaagcacccagccccgagtggagacaaggcctttttgaactaactttagaaacataatgagtgtggaccaccttcaggcttgcccgaatccatcagccaggccctggagtcctgggattatgccttctgggtaagataaggcaggaagccggctccaacctcccacggaggcccactgcttctggagagctgagcagtcaccccaagacgttaaaccaatctccgtgggatgcaggtttgttccgaagtgcatacaacgtagtggcaacaacaggcaggtttaacttgtgttctccaatgaaaagtctccatccggcagtctctggccatgattggacagagtaattctgagaggctccatgaacggcagcgaaatcagaggaggtggagaccctggatgagacaccaagccccctgaagcttcagcttgcccctctaagaaggaagcagagcaagaccttgcagcccatttagggagattagggatcggctctccaaggcacagccgagctccgtgactgggagccactatcgcggatgctattgttctttttttgtatacatggccctcaggcttcaggagctgagggacgatcacaagagctggttctcctgggtggcacctgctagttagcacctgttggccttaaagtgaatgtgagtgaaaggtccatttgtgccacaggaatgggaagttgaggagtgatccaaaggattctaacatcctctgtcattctaaaattaccatgcaaaagtggagattaggaagacactcctatcgccagacactcagggctgagccaggcggagcagccatgctgggaaatctcagaagccggggtcggaagccaagggacttactcgcagggacaccttctgggcttgatggaagaaccactacttcgacctccaaactgagtacctcttggaatacccagactgcgaattttgaattaggatgaaaggtaacatcagcatcccacggagggcctccagtacattcaaatgcatgggttgggaaggggaagggtaactttttggcatgataccagctggtggggcttccaatgcaaatgctggtgaggttgacccaatgtcctttgatgggcaggagagggagtgggctctttgcgaatttagtaaaaagaggctgtcactttgaagctgccaaaagcagcaagaggccttgttttagaatgcatttttaagtgttgttctatttgcagagtgacagctgggacagctgaggaggagagtgccaggcgaggcagggacactgtccatgcaggggaggtgaaaaaccatggggctgatgaaaatgcacatggatgtcaactccagggatgtcaaggtcttaccctggcagcagaagcacgagcggccgtcacagcctcaaggaggcagggtggatggcaggtgaccaagctaggaggaggtggcagggcagcttgggacagggggggatccacagagtgtggtgccagtgataccccacgtgggtgcttggaaatgggcatgcctgccttccccaaggcaggtgtgcgaggagcatcttagcgtcaaagcatttcctaactcttcaacaggactgtggtcttcattgtaaacttgcctattagagatttgttttgtgtctgtctcattagactttgagtctctcaagcagagaccatttcaaagaaagactccgacttttgcatagtctataaaggcaggaatgtagacaaagatgtcattttaaaaaatcagtgataaaaatggaaataaaagggtttcatgggtaacttcgatttagctaaaatcatttttgaaactagacaaatcatgtcttactttttctttcttcagtctcaatcagcactttgcaacacaggctgagagatgatgacatgaaaacagctcagaagaggggtgcctgaggaagatcagccaccttgagtttaagtttaacccaagacaggaacatgggattaaagctggcagaagggcaggggccacagcatgttccaagccaggaaggtaggagcagaggcaccctctgggcaccctgctgtctccacttctgtgtccaactgagaactccaaccaccttggggctcaagtcctgggctgacctttgctggggtcgtctgggaattgggccaaggataccctcagaaggtcttctctggctaggaagggatttatcagaatggctttgctcctgcatagttaggaaaactagtccagaatagaacccaagtctacggaaagatgcaggtgtttgtgcttgaagtcaatggagctggccactaggaatttgggatacacagaccttagtgaaattggtatccttctgggtttccattagacttaagattgttgttctttttccagctaagaagtcatccccagagccactggcagcccaatggggcttcctgcaagttggccaatggcctgcactgctcagactcaagctgctctcagctctcctggggttactttgggggactggtaacctgccccaattcctcacaacttccttcactcttctatgatcctccttcctgtcccaagcttgtcttccatcattttccttcctgttcccgcccctaatccaccatgggggtggctgcatgttagtcaaatatgacagcactgtgtggtcccctctgggtgctcatgtcattacaacacaggcgtgaaaccagccataacccgggaggaatgacactgaaccaatttaccagactgatcatcaaaatcgattctcaacacataaatggtgagtcaagtcatttgtgttttacccagaaagctgtgggcaggtttatcctccaccacacggatcctccgagctccagcaggaatgacggcagcttcgatataacctgtagcaacaaacgacacagaagtaaaccacacctccaccctgcaccagaggccgtgcagcatcccccggccaaaatctagctaccaagccccccacagtggcttcagaaatggagggctggcgcagaagaaggaggctctcctaaggccaggacctcccagtggccccatttccagagagcaggatttgcacgtgtttcaggttgagtggtgtccccctcctccaaattcgtatgttgaagttctaactgggcccccccttcaaccagaacatcagcatgtgaccactgcagacatattaagatgaggtcatcctggagtaggtaggcctaatccaaaatgactgatgtccttataaaaaggggaagtttggaaacagacatgcacatagggagaatgtcgcgagaacatgaaggcagagatgaagtgatgcttctacaaagcagccaaggaacgccacagactgccagcaaaccaccagaagttaggcaagaagcatggaacagatcctccctcgtgacctgcagaaggaaccaaccctgctgacaccttgatctcagatttctcaactccagaaccaaaagacagtaagtttctggtgcttatgccacctagtttgcggcactttgttacggaaaccatagcaaaagaatatagcctggtattctgcgagaatggcacctccctggtgcatcagtgaatagtggccctggtctcattcatctgctggagggccttttgctctttgttgtattttgaactttccctgaacatccgtgggatgacagcagaaaccaagcaatttaccctatgacgaaactacagtattgccttaacacacggtgcaccgtttcttgcttccaccacctttggccatttcacttgtatagttttgtccatttccttgcatgtttttaagcagagtagggggccaggacggcaggtaggaagtgaagactcagggaaaacatgacggaagctgccagggcagaagctggcaactggctaatgcctggttaatagggtgattgccagtaagtgagcctaacatgacggtgagattctgaaacgtaggctggtaataattttggtttgatttttatttgggatttagacaagcgtattaggcgtttgtttctgcgattcagatgaggatctcaacttagattacaaatcctagccctgttgttcccaatgtgatcaccagaatcatgagcggagctgtaaaaaattagagatttctaggttcaactatgtggaaatcatggaaatacctattttgaggggtttatttattcattcattttctcacaataaaatggatttatttttataataaaaatagtatacaaaagttcaaacaacatacagcagaaaaccagaattgacctataccacatcacaatgagaaaattaccccaagaaagtaatattttggtgaccagccttttcaacacctcttaatgcatataaacatacatatatcattttatgtgaaaagaatattatatgtacttttaaaagatcagtgacaacttcaaaataattagttttgctaggtaatgtatgtataaggtacaaaattcaaaaattataaaaggatcaagcaaaaagtatattgatctataggctatatgaggtgttctgtagccagctacatttttaaactataataatttctatattttggctgagtttctatgtagctaactctacatctgctaatatgacagttctgtttcttcctttctagtctttatgcctttagtttcttctttcactattctggttgcaatttacaaaaccacattgtatgcaaaatgctattgcggcatactcgtgtaattcatgatgtcataggagtgcttccgaagttttcccaccgaaaaagattgttactgtgagaacaggataggtatcattaatctatcaggttagggacattctcttgtttaaattttactttaagttctgggatacatgtgctgaatgtgcaggtttgttacatatgtatacatgtgccatggtggtttgctgcacccgtcaacccatcacctcggttttaagccctgcatgcattaggtatttgtcctaatgctctccctccccttttcccccacccctcaacaggctggggggtgtatgtgatgttcccctctctgtatccatgaattctcattgttcaactcccacttatgagtgagaacatgcggtgtttggttttctgtttttgtgttagtttgctgaaaatgatggtttccagcttcatccatgtgactgcaaaggacatgaactcattcttttttatggctgcatagtattccatggtgtacatgtgccacattttctttatccagtctatcattgatgggcatttgggttggttccaagtctttgctattgtaaacagtgctgcaataaacacacgtggggacattctctttttgaatacttagtgtgctaatagcttttatcatgaagaggtattaaagttaataaaatgtttttgtgcatctactgaaatcatcatactgtttttctcccaaaccataccaagaactcagagttgaactgtgatcacgcttgtcagggcttagatggcatatggatacacgtcttagatttttttttttaaattatttcatacatgtggtgtttgcttagttttacataaacatttatcatttttttctcaccatttcttccccacatcagaccattcttctgatatctttttttcttccttaaatccatgtgaaggtcctttagtgtaggtctcttggttgttgtaaactctctggctttatctataaatgtcttcattgacattctcttggctttgagaaatggtgttcttgggcatttgattctaaattggttgttattgtcctttaacacttgaaatacatttttccactgtcttcccttatgatacagagaaggcaaccatccttctacgtgtcgttcctttctaagtggcccatctgtctcagcagtattccttcaacacttgaaatacacttttccgctgtcttcccttatgatattgagagggcagccatcattctaagtgtccttcctttctgtctcagcaatattccttcaacgcttgaaatacacttttccgctgtcttcccttatgatattgagagggcagccatccttctaagtgtccttcctttctgtctcagcaatattccttcaacgcttgaaatacacttttccgctgtcttcccttatgatattgagagggcagccatccttctaagtgtcgttcctttctgtctcagcagtattccttcaacgcttgaaatacacttttccgctgtcttcccttatgatattgagaaggcagccatccttctaagtgtcgttcctttctaagtggcccatctgtctcagcaatattccttcaacacttgaaatacacttttccactgtcttcccttatgatattgagaaggcagccatcattctaagtgtcgttcctttctaagtggcccatctgtctcagcaatattccttcaacacttgaaatacacttttccactgtcttcccttatgatattgagaaggcagccatcattctaagtgtcgttcctttctaagtagcctatctgtctcagcaatattccttggtgttctgcagtttcaccatgacatttctaagcacggataacagggaaataccagttgtcaaatttttccagtcacattttacctttaacgtctaagaactattagactactcatagttttgtgtcaacctttcttgggacacaaagctatattattagtacacattttttttttctgatctatttggttttcttttgaacatcagagtacatatgtttatctcttttgtcttctgcagcacttatcttttatttaccctgcttggatgactttgtgcttcccaggtcagatcagatcaatcccttggattgtttcctaccttttatcttttaaccgtttattaatttgtacaaaaaatgcaactggaaaaaaaagagccaagatggccgaataggaacagctccagtctacagctcccagtgtgagtgacacagaagacaggtgatttctgcatttccaactgaggtaccgggttcatctcactggggagtgtcggaaagtgggtgcaggacagtgggtgcagtgcactgagcgtgagctgaagcagggcgaggcatcccatcacccgggaagcgcaaggggtcagggaattccctttcctagtcaaagaaaggggtgacagatggcacctggaaaatcgggtcactcccaccctaatactgtgcttttccaacggtcttagcaaacggcacgccaggagattatatcctgcgcatgtctcggagggtcctacacccacggagcctcgctcattgctagcacagcagtctgagatcaaactgcaaggcggcagtgaggctgggggaggggcgcccgccattgtccaggcttgagtaggtaaacaaagccaccgggaagctcgaactgggtggagcccaccgcagctcaaggaggcctgccttcctctgtagactccacctctcagggcagggcatagccaaacaaaaggcagcagtaacctctgcagacttaaatgtccctttctgacagccttgaagagagtagtggttctcccagcacacagctggacatctgcgaacagagagactgcctcctcaagtgggtccctgacccctgagtagcctaattgggaggcaccccccagtaggggcagactgacacctcacacagctgggtatccctctgagacaaaacttccagaggaacgatcaggcagcaacatctgctgttcaccaatatccgttgttctgcagcctctgctgctgatacccaggccaacagggtctggagtggacctccagcaaaatccaacagacctgtagctgagggtcctgactgttagaaggaaaactaacaaacagaaaggatatccacaccaaaaccccatctgtatgtcaccatcatcaaagaccaaaggtagataaaaccacaaacatggggaaaaacagagcagaaaaactggaaactctaaaaatcagagcacctctcctcctccaaaggaacgcagctcctcaccagcaagggaacaaagggacagagaatgataagctgagagaagaaggcttcagatgatcaaactactccgagctaaaggaggaagttgaaacctatggcatagaagttaaaaaccttgaaaaaagattacatgaatggctaactagaataaccaatgcagagaagtccttaaaggacctgagggagctgaaaaccaagccatgagaactacgtgacgaatgcagaagcctcagtagctgattcggtcaactggaagaaagggtatcagcaatggaagatgaaatgaataaaatgaagcgagaagagaagtttagagaaaaaagaataaaaagaaatgaacaaagcctccaagaaatatgggactatgtgaaaagaccaaatctacttctgattggtgtacctgaaagtgacggggagaatggagccaagttggaaaacactctgcaggatattatacaggagaacttccccaatctagcaaggcaggccaacactcaaattcaggaaatacagagaaatccacaaagatactccttgagaagagtaactccaagacacataattgtcagattcaccaaagttgaaatcaaggaaaaaatgttaagggcagccagagagaaaggtcaggttacccacaaagggaagcccatcagactaacagtggatctcttggcagaaactctacaagccagaagagagtgggggccaatattcaacattcttaaagaaaggaattttcaacccagaatttcatatccagccaaactaagcttcataagtgaaggagaaataaaatactatacagacaagcaaatgctgagagattttgtcaccaccaggcctgccctacaagagctcctgaaggaagcactaaacatggaaaggaacaactggtaacagccactgcaaaaacaagccaaattgtaaagaccatcaaggctaggaagaaactgcaccaactaacgagcaaaatatccagttaacatcataatgacaggatcaaattcacatataacaatattaaccttaaatgtaaatgggctaaatgctccaattaaaagacacagactagcaaactggataaagagtcaagacccatcagtgtgctgtattcaggaaatccatctcatgtgcagagacacacataggctcaaaataaaaggatggaggaagatctaccaagcaaatggaaaacaaaaaaaggcaggggttgcaatcctagtctgataaaacagactttaatccaacaaagatcaaaagagacaaagaaggccattacataatggtaaagggatcaattcaacaagaagagctaactatactaaatatatatgcacccaatacaggagcacccagattcataaagcaagtcctgagtgacctacaaagagacttagactcccacacaataataatgggagactttaacaccccactgtcaacattagacagatcaacgagtcagaaagttaacaaggatatccaggaattgaactcagctctgcaccaagtggacctaatagacatctatagaactctccaccccaaatcaacagaatatacattcttctcagcaccacaccacacttattccaaaattgaccacttagttggaagtaaagtactcctcagcaaatgtaaaacaatagaaattataacaaactgtctctcagaccacggtgcaatcaaactagaactcaggattaagaaactcactcaaaactgctcaactacatggaaactgaacaacctgctcctgaatgactactgggtacataacgaaatgaaggcagaaataaagatgttctttgacaccaacgagaacaaagacacaacataccagaatctctgggacacatttaaagcagtgtgtagagggaaatttatagcactaaatgcccacaagagaaagcaggaaagatctaaaattgacaccctaacatcacaattaaaagaactagagaagcaagagcaaacacattcaaaagctagcagaaggcaagaaataactaagatcagagcagaactgaaggaaatagagacacaaaaaacccttcaaaaaatccatgaatccaggagatggatttttgaaaagatcaacaaaattgacagaccactagcaagactaataaagaagaaaagagacaagaatcaaatagatgcaataaaaaatgataaagcagatatcaccactgatcccacagaaatacaaactgccatcagagataccataaacacctctatgcaaataaactagaaaatctagaagaaatggataaattccttaacacatactccctcccaagactaaaccaggaagaagttgaatctctgaatagaccaataacaggctcagaaattgaggcaataattaatagcttatcaaccaaaaaaagtccaggaccagatggattcacagccgaattctaccagaggtacaaggaggagctggtaccattccttctgaaactattccaatcaatagaaaaagagggaatcctccctaactcattttatgaggccagcatcatcctgataccaaagcctggcagagacacaacaaaaaaagagaattttagaccaatatccctgatgaacattgatgcaaaaatcctcaataaaatactggcaaaccgaatgcagcagcacatcaagaagcttacccatcaaaaagcttatccaccacaatcaagttggcttcatccctaggatgcaaggctggttcaacatatgcaaatcaataaacgtaatccatcatgaaaacagaaccaaagacaaaaaccacatgattatctcaatagatgcagaaaaggcctttgacaaaattcaacaactcttcatgctaaaaactctcaataaattaggtattgataggtatctcaaaataataagagctatttatgacaaacccatagccaatatcataccgaatgggcaaaaactggaagcattccctttgaaaactggcacaagacagggatgccctctctcgccactcctattcaacatagtgttggaagttctggccagggcagtcaggcaggagaaggaaataaagggtattcaattaggaaaagaggaagtcaaattgtccctgtttgcagatgacatgactgtatatctagaaaaccccaccatctcagcccaaaatctccttgagctgataggcaacttccgcaaagtctgaggatacaaaatcaatgtgcaaaaatcacagtctttcttatacaccagtaacagataaacagagagccaaatcatgagtgaactcccattcacaattgcttcaaagagaataaaatacctaggaatccaacttacaagggatgtgaaggacctcttcaaggagaactacaaaccactgctcaatgaaataaaagaggatacaaacaaatggaagaacattccatgctcatgggtaggaagaatcaatatcatgaaaatggccatactgcccaaggtaatttatagattcaatgccatccccatcaagctaccaatgactttcttcacagaattggaaaaaactactttaaagttcctatggaaccaaaaaagagcccgcattgccaagtcaatcctaagccaaaagaacaaagctggaggcatcacgctacctgacttcaaactatactacaaggctacagtaaccaaaacagcatggtactggtaccaaaacagagctatagaccaatggaatagaacagagccctcagaaataatactgcacatctacagccatctgatctttgacaaacctgacaaaaacaagcaatggggaaaggattccctatttaataaatggtggcgggaaaactggctagccatatgtagaaagctgaaactggatcccctccttacaccttatacaaaaattaattcaagatggattaaagacttaaatgttagatctaaaaccataaaaaccctagaagaaaacctaggcaataccattcaggacataagcatggggaaggacttcatgtctaaaacaccaaaagcaatggcaacaaaagccaaaattgacaaatgggacaaaattgacaaaattaaagtatagggcttctgcaaagcaaaagaaactaccatcagagtgaacaggcaacctgcagaatgggagaaaatttttgtaatctactcatctgacaaagggctaatatccagaatctacaatgaactcaaatctacaagaaaaaaacaaacagccccatcaaaaagtgggcaaaggatatgaacagacacttctcaaaagaagacatttatgcagccaacagacacgtgaaaaaatgctcaccatcagtggccatcagagaaatgcaaatcaaaaccacaatgagataccatctcacaccagttagaatggcaatcattaaaaagtcaggaaacaacaggtgctggagaggatgtggagaaataggaacacttttacactgctggtaggactgtaaactagttcaaccattgtggaagtcagtgtggcgattcctcagagatcttgaactagaaataccatctgacccagccatcccattactgggtgtatacccaaaggattataaatcatgctgttataaagacacatgcacacgtatgtttattgcggcactattcacaatagcaaagacttggaaccaacccaaatgtccaataatgatagactggattaaaaaaatgtggcacatatacaccatggaatactatgcagccataaaaaatgatgagttcatgtcctttgtagggacatggatgaagctggaaaccatcattctcaacaaactatcacaaggacaaaaaaccaaacaccgcatgttctcactcataggtgggaattgaacaatgagaacacatggatacaggaaggggaacatcacacactggggactgttgtggggtggggggagggggggagggatagcattaggagatatacctaatgttaaataacgagttgatgggtgcagcacaccaacatggcacatgtatacatatgtaacaaacctgcacgttgtgcacatgtaccctaaaacttaaagtataattaaaaaaaggcaactgatttctatgtattaattttgtacccaacttcctgaatccttttataatatgtcatattttcaaggttaattctcttaggttttcaagataaataataatatcacaataatatctaccacagtaatagttttactcttttgaactgtttatggtataaacatatatatttctcacccatccaagtactaaccagacctgaccttgcttagcttctgagatcagacaagatcagacacatttggggcggtgcggccgtagtcatttttcttttctaaatgcattggtgagcaccatcagaaaaatgtcaaatattcctggagagaatgtacacctttgttttgttttttattacaacaagaatgcttacagtgttttgctgttgaatataatgcgggcttacggttatatagagtgtataataacatctcatatataacatattttatgcataatataatcatattaaagacatatacattattctcatatgaagagttttgttaggaataaaggttgaattttactgcatgctctttcagcatctaagggcatagtttcctcttgctctcacaccttgttctattaacagtataattatattaatatattttctaatataaaaccatcttcccatctcagaataaacctcacttggtgatagcatattattttaatatgctgctgaattgtttgctaatattatatttagaacttttgcaaaattattcctaagaatgctctgtaattgttcttatgcttcctttgttggattcggttttggtatcagtattattcttgctttaattaggagtatttctatgcttctataataacttatctgtgttgattttatatagaggcacgattgggaaattttttcaatcattcatttcaaacaggttttaaacttatttacagaaccgagcaatgtaatctcttatgacttattaatttcctctatactttatttccctattctctattattttacatatttgtactttcctacccccatttggttcattaaatgagaaaacagtggagctgtatactatttagttggatttcttcatcctgtcccctaccaataaattctagttgttatttttgttttatttaatgttcttccataggcccgtatatttatacttctattgtgtaacttatgagatgcaattttgtccctggatattacaaaataaggaaatgagaataattatggtgcatcctactttctcacatcccatttcaacttttattatatcattttgacattgtattagtttgtcatatttactttttactctctaaggtaattcctatagttgttttagttttcatcctaaaaaggaatttaatgtttgttatgcatttttctgccagtttctctaataaattcttgctggtctcaaatgtgttccctttgagatgggcttatgggaattccattttctgaaatatgatactgtacagcaaaaaataactgttcattgtccttatccttgaatgtcaatttggctgctgtaacatgttgaggtcatacttgctttctctgaggctgttgtatgagtggctccataaaatgtgaccgtggagaagtctgaggactgctggttactgccctattattaggttctctaaaatttagatgggatgctcaaaagagtcttacctttaatgtctaataactattaggctattcatagctttgtgccaacttttcctgggatacaaggctatattatctgtacacatatcttttttctgatctatttgcttggttttcttttgggggggatatcaaagtatatacatttgtctcctttgccttctgcagtgctcatttgatcttttatcctgggactttttgtttatttccattttccactgctgtttttctcaatcctgtcctccaggtttcttactgcactctcatagtgctgattttctctgtctgcttccacgtagacctggtttctgtgatggattcagtgacctctcctacgtatgtcctcaattctgctaagtcacgtttcatctctctttcttgcttcattgtatcactgtttctttcttgaggttttgtatcttagctatgaattcttattttctttctttttttttgttttcgagatggagttttgctctgttgcctaggctggagcacagtgccgtgatctcagctcaatgcaacctccaccttccgggttcaagcaattctcctacctcagcttccttagtagctgggattacaggcgcccaccaccatgcacagctaatttttgtatttttagtagagatggggttgcactatgttgggcaggctggtctggaactcctgacctcaggtgatccacctgccccggcctcccaaagtgctggggttacaggcgtgagccattgtgcctggcctatgagttcctattttatcaaggctactgttgatcaatttctgaaatttatggcagtaactctgggtcacaattttcatcttttccttggtaagattttgccaagatttttaaaaagtcatatgttttccttgtcccctttatctttttcctattgctggatacttgtatagatcctgtgctggtaaatttatttcaaattttaaagtgagacaagttctaatcatactgactgcttgcagtaggtgtggtagggagaaatagcacagtgttgtaggctaacaggactttccttggtttacagtgaaattcgttaggacatagatttattgatatcagtgtgttcattgtcattttccttttaaaaaacaatttatatattttgaatttatacaaatacacttgagtatactttctcactggaagaagtttaatactacacaaacaaaaacatagcatagtattttcatatttacatttgtctcaattctatgttaggagtaactcaatattatatcatactacatttgcaatttttaaaaacatgtctcagagatcatgtatgttattatgtatagctctatttttttgcttaaatcgctatgaagtttatatatctactcacctactaatggacatttaggttgtttcaaaattttcactataagaaacaacactgtatcatatatgaatatgcacagaaaacccctccacaaaatactagcaagcccaatccagccacatataaaaaggattctacattatgatcaaatatgatttatgctaggactcaagcttggtttaacatatggaaaaatcagactgggcacactggctaacccctgtaatcccagcagtttgggaggctgagacaggtggaacacttgaggccaggagtttgcaaccagcctggccaacatggtgaaaccctatctctaccacaaaaaaaaaaaaaaaaaaaaaaaaaaaaattagcctggcatggtggtgcgtgcctgtaatcccagctactcaggaggctgaggcacgagaatcgcttgaacccggtgggcaagggttgcagtgatccgagattgtgcaactgcactccagcctgggcaacagagtgagactccctctcaaaaaaaaaaaaaaaatcaatcaatataatcctccatgttaataaggagcaaaatccacaagatcatctcaataggtgcaggaaaagcatttgacaaatttcaacactccttcctgataaaaatactcaacaaactaggaatagaagggagcatgctcaacctgataaagggcatctacaaaactccacagctaacagcatatttaatggtgaaatactaaatgcttgtcccctaagataaggaacaagacaaggacgtcctgctactcccattcaacactgtactgggagttctatctagggcaactaggcaaggaaaagaaatataaagcatacagattggaaagaagaagtaaaattatctctatttgcagatgctaaaatcttatatacagaaaatcccaaggaatccattaaaaaacctatatgacagattcagtaagattgcaggatacaaggccaatatataaaaatcaactgcatttctatatgttagcaatgaacagttggaaaatgaaatttaaaaacaattcaatttaagtagcatcaaaaagaaacacttaggaatacattaaaaaaagacctggagggtttgtaagatgaagactacaatacattgctgaaaggtattaacaaatatctaaataaatggaaagatattttatattcttggatcagatgacattgtaaaaaatgtaactgcttcacaaattggtctacagattcaacgtaatccctataaaaaaatcccagcttttttttttttttgcgaaaaatgacaagctgttcctaaaattcagatgaaaatgcaacagacccagaatagccaaagtaatacttcaaaagaagttgaagaactcagatttcctgattccaaaactttctagctatctgtagcaatcaagacagcaaggtaatggcataaggacagtcgtttctaacaatggaatatagagtccagaaaacaatttttttttaaacaaaggtgccaagaatattcatcggggaaagaacagtcttcaaccaacagtgttgggacaactggatatccatatgcgaaaggatgaagttgtacacctatttcagaccatacaaaaaaattaactaaaaaatggatcacagatgtaaatatcagagctaaaactagaaacctcttggaagaaaacataggggtaaatcttcatgaccttgaattaggcaatagtttcttagacacagcagcaaaagcacacgcaacaaaagaaaaaatagtttaactggattgcatcaaaactgaaaacctgtgtttcaaaagataccatcaagagagtgaaaagccaactcatacactgggagaaaatctgtgcaaagcatttgtctgataaaggaactgcatccagaatatataaagaaagcttgcagctcgacaagaaaatgacaatccaatttaaaaatgggcaaaggattttaacaggcacttccgcaaaaaagatatatgaacaatccataagcaaataaaaagatgctaatgatatattagtcattagggaagtgcaaaccaaaaccacaaggacataccacattgtacccactaggatgactctaacaaaaaacagtaagttggagagaacatggagaaacagtagccttcattcactgctaccagaaacgtaaagtggtgccgccactttggaaaagagtttggcagctactccaaaagttaaacacagaattctcactcaccaattccattcccaggtatatacacaagggaaatgaaaacatgtccacatggtaactcgtacacaaaagtttatatcagcattattcctaacagccaaaaaagtggaaacaatccaaataccaatcaaccaatgactgtatttatacaatgtgatatctccaaacaatggaatagtatttggcaataaaaagaaacattgatgtatgtgacaacatgcatgacttgaaaatactatgctaagggaaaaaagcctgtcaggaaggaccacgtattatactactccatttacatgaaatgtccagataggcaaatttgtagatacagacattagatgagtggttacctagggcttaagagggagatggggaatgactgctaccaagcatggggtttcttttgggaatgactgtggtgatatggcaccattccttggggtgatcagccagcaacctggtggcaagttgattatattgtaccttttccatcatggaaacggcagtggtttgtcctcactggaatagacacttactccggatatgggtttgcctatcctgcacgaaatgcttctgccaagactaccatccgtggagtctcggaatgccttatccaccatcatggtattccacacagcactgcctctgaccaaggcactcactttacagctaaagaggtgtggcagtgggcttatgctcatggaattcactggtcttaccatgttctccatcatcctgaagaggctgcaaagaacggtggaatggccttttgaagtcacaattacaatgccaactaggtgacaacactttgcagggctgaggcaaagttctccagcaggccgtatatgttctgaattagcatccaatatacggtactgtttctcccatagccaggattcacggtccaggaatcaaggggtgaaactgaactgacaccactcaccatcacccctagtgatcccctagcaaaatttttgcttcctgttcccccgacattacattctgctggcctggagatcttagttccagagggagaaatgctgccaccaggagacacaatgattccattaaactggaagattggtacccacctggacactttgggctcctcccacctttaagtcaacaggccaagaagggagttacagtgttgactggggtgactgacctggactatcaagatgaaatcagtctactactccacaaaggaggtaaggaagagtatgcatggaatacaggagatccattagggcgtctcttagtatcaccatgccctgtgactaaggtcaatgggaaactacaacagcccaatccaggcaggactacaaatgacccagaccattcaggaatgaaggtttgggtcactccaccaagaaaaaacccacgtcttgctgaggtgcttgctgaaggcaaagggaatacagaacgggtagtagaaaaaggtagttatcgataccagctacaaccatgtgaccagctgcagaaatgaagtctgtaattatttcctcctttttttgctaaaaacatgtttgtgcatgtatacacttgtactaagaaagtatatttccttttcctttatcatgtgacataacatttattgacttcatatcagcatgttaagtattgttaactttatgtaatagtatttgggttggggattggtgtatttctggttgtacgaaggatagctgtagtatgttaggggtaattatgaccttattattgtctttatttgaagactatgtgtgttctcaggagatgtgtatgggttcaagttgacttggggtggacttgtgatggttgatactgagtgtcaacttgattagattaaaggatacaaagtattgatcctggatgtgtctgtgagggtgttgccaaaagagtttaacatttgggtcagggggctggggaaggcagatccacccttaatctggtgggcacaatctaatcagctgccagcaaatacaaagcaggcagaaaaacatgaaaaggagaggtgggcctaggctcccagcctacatctttctcctgtgctagatgcttcctgccctggaacatcagaccccaagttcttcagttttgggactgggactggctctccttgctcctcagcttgcggacagcctattgtgggatgttgtgattacgtaagttaatacttaataaactcccctatatatatatgcacacatacatacacacacactacttaataaactcccatatatatgtatgtgtgtatctcctctacagaaccctaatacatggctgcatgaccttgtgctaaaactcattcaatcgcacactttaaatgggtgaattatatggcatgtgaattctatctttataaagctgcttagaaaagaaacaatacttctatgaatggctttgtacatgtcttcttatgcatagatataatgtcctaccaggtcagctactgtgagaatcactgagacaaacacaggtgctgcttagttgaccttggtttaaatactatttaagccaaccaacactatacgagagtaaacgtttactcaaagatttctaaatacttgacaaaatcaatcttcttagtatttgctaatccatttggtgaaaagatgttgtcataagttgaatttgcatttccctgataaccaacaaggctcagcgtcctatacacttattgaccatttgttttcccttttcagttaatggccttgttcttaagctttgcccatttttctaccatcttttatttagttatgatgcagtagtttaaaaaatgtccataacatatattactataatttgataatatttggactcagactctttacttactagacatgttgcaaaaattgtcagtctatcagtctatcatctgttgtttctttgcttttattgatttttttgttttctttgagaccaagagtcttgcttctgttgcccaggctggagtgcagcggtgcaatcttggctcactgcaaccttcgcctcctgggttcaagcgattctcctgcctcggcctcccgagtagctgggactacaggcacgtgccaccacgcccagctaatttttgtatttttggtagagatggggttttaccatgttagccaggatggtctccatctcttgacctcatgatccacccaccttggcctcccaaagtgctgggattacaggcgtgagccaccgtgcctggccttattgcatggttttgatagtctttttttttttttgagacagggtctcagtctgttgcccaggatggagtgcagtggcgtgatctcagctaactgtaacctctgcacccccaccccagctcatgcaatcctcctgcccccgcttcctgagtagtggggacttcaggcacacaccaccgtgtctacctgatttttttgtattttttgtagaggcagggtttcgccatgttgctcaggctggtctgatagtcatatttttaatttttgagatctcttttttgttttctgattgttccttcccatggcattctgttcttgttttgtggctacgatatcatcttaaatctttctacaaatagttattagagaacttatattatttgagttactttttctcgttagtcttttttttttttttttcagttcatcttggtttttctcatttgtgttgcagactctccttcaagaaccaggaggctgcagctgggtggtctcccgtggggatgcgcagggtttgcttactctcaggattggctttctgctgggtgcagggagctgttgctgtgttggcaaccaaaataccagaatgaagaggcgtttcctagaggtgctgtgttgtgggaaaactcctagagctgctgtgttatggtgctggccacaaatatttccaagtctttctctggaaatatggaagtaacacatttcaccggccacttaaacgtgtgtgaccatgtgacttgaagagtaaaatgtaagtgaaaatgaggtgtgtcgcttccccgcaggagcctgaagcacctcagggcctggtttgccatactccctttccttgccaaggtgactgtggcagcctgtgaacagataaagtctctgccagcctagttccaggagtgacctcactctgcagggcctcctgctgacccacagtgtgcaagcagcaggggctggaagcagacttttgtgttaagccactgagatctaggaggcacttttactttagttttgtttgcttgtttatttcagcaaaaccaagtatattcattctgttccatccatagaggaacttccacctgagatgtccttcttctccctaaacctttcaagaagttccttttcattcattttcaggttatcttttgaagacctgaaaacaaccacatgttcaatcatccagaaagaaagtttctcagtcagaaagtttagcagtgtccttcagccttgacagcaaatgccttggcattgttaccacagacctagccttggatgtttacaaataaatgtcctgcaggatgtttggagagacttcacaaatgtaaacaaagtctagtttgagggcagttggtgccttattgttgtgccctgatccccaggcagttgtgtggtcatctagtatgatgctttccaaccacatgtgacttgggaatagtgatgctggcatgccagagcagctggcacttggcccttccccctccagtggctctagagcaagggcaaggtttttgagccaagatgaccaaataggaacagctccagtctacagctcccagtgtgagcgatgaagaagacgggtgatttctgcatttccaactgaggtactaggttcatctcactggggagtgctggacagtgggtgcaggacagtgggtgcagtgcaccgtgagtgagccgaagcagggtgaggcatcacctcacccgggaagtgaaaggggtcagggaattccccttcctagtcaaagaaaggggtgacagacggcacctggaaaatcgggtcactcccaccctaataccacactcttacaatgggcttaacaaatggcacactgggagattatatcccgcgcatggctgggagggtcccatgcccacagagcctcgctcattgctagcacagcagtctgagatcaaactgcaaggtggcagcgaggctgggggtggggtgtccgccattgccgaggcttgagtaggtaaacaaagccgccgggaagctcgaactgggtggagcccaccacagctcaaggaggcttgcctgcctctgtagactccacctctgggggcagggcacagacaaacaaaaggcaggagaaacctctgcagacttaaatgtccctttctgacagccttgaagagagtagtagttctcccagcatgcagcttgagatctgagaacaggcagactgcctcctcaagttgggtccctgacccccgagtagcctaaatgggaggcacccccctgtaggggcggactgacacctcacacgactgggtactcctccaagacagaacttccagaggaacgatcaggcagcagcatttgcaattcaccaataggcgctgttctgcagccactgctcctgatacccaggcaaacagggtctgcagtggaactccagcaaaatccaacagacctgtagctgagggtcctcactgtcagaaggaaaactagcaaacagaaaggacatccacaccaaaaacccatctgtacatcaccatcatcaaagaccaaaggtagataaaaccaccaacatggggaaaaaacagtgcagaaaaactggaaacgctaaaaatcggagcgcctctcctcctccaaaggaacacagctcctcaccagcaatggaacaaagctggatggagaatgactttgatgagctgacagaagaaggcttcaaaagatcaaactactccaagctaaaggaggaagttcgaacccatggcaaagaagttaaaaaccttgaaaaaatattagatgaatggctaactagaataaccaatgcagagaagtccttaaaggacctgagggagctgaaagccatggcacaggaactacgtgacaaatgcacaaggcctcagtagccgacgtgatcaactggaagaaagggtatcagcgatggaagatgaaagaatgaaatgaagtgagaagagaagtttagagaaaaaagaatacaaagaaacgaacaaagcctccaagaaatatgggactatgtgaaaagaccaaatctacatctgattggtggacctgaaagtgacgaggagaacgcaaccaagttggaaaacactctgcaggatattatccaggagaacttccccaatctagcaaggcaggccaacactcaaattcaggaaatatagagaacaccacaaagatactcctcgagaagagcgactccaagacacataattgtcagattcaccaaagttgaaatcaaggaaaaaatgttaagggcagccagagagaaaggtcgggttacccacaaaggcaagcccatcatcagacgaagagctgatctctcggcagaaactctataagccagaagagagtggggaccaatattcaacattcttaaagaaaagaattttcaagccagaatttcatatccagccaaactaagcttcataagtgaaggagaaataaaatattatacagacaagcaaatgctgagagattttgtcaccaccaggcctgccctacaagagctcttgaaggaagcactaaacatggaaaggaacaactggtaacagccactgcaaaaacaagccaaattgtaaagaccatcaaggctaggaagaaactgcatcaactaatgagcaaaataaccagctaatatcataatgacaggatcaaattcacatataacaatattaaccttaaatgtaaatgggctaaatgctccaattaaaagacacagactagcaaactggataaagagtcaagacccatcagtgtgctgtattcaggaaacccacctcatgtgcagagacacacataggctcaaaataaagggatgaaggaagacctaccaagcagatggaaaacagaaaaaggcagaggttgcaatcctagtctctgataaaacagactttaaaccaacaaagattaaaagagacaaagaaggccattacataatggtaaagggatcaattcaacaagaagagctaactatcctaaatatatatgcacccaatacaggagcacccagattcataaagcaagtccttagtgactagaaagagacttagactcccacacaataataatgggagactttaacaccccactgtcaacattagacagatcaacgagacagacagttaacaaggatatccaggaattgaactcagctctgcaccaagcagacctaatagacatctatagaactctccaccccaaatcaacagaatatacattcttctcagcaccacaccacacttattccaaaattgaccacttagttggaagtgaagtactcctcagcaaatgtaaaacaacagaaattataacaaattgtttctcacagtgcaatcaaactagaactcaggattaagaaactcactcaaaaccgctcaactacatggaaactgaaaaatatgctcctgaatgactactgggtacataacaaaatgaaggcagaaataaagaggttctttgaaaccaatgagaacaaagacacaacataccagaatctctgggacacattcaaagcagtgtgtagagggaaatttatagcactaaatgcccacaagagaaagcaggaaagatctaaaattgacaccctaacatcacaattgaaagaaccagagaatcaagagcaaacacattcaaaagcatgcagaaggcaagaaataactaagatcagagcagaactgaaggaaatagagacacaaaaaacccttcaaaaaatcaatgaatccaggagctgattttttgaaaagatcaacaaattgatagaccactagcaagactaataaagaagaaaacagagaagaatcaaatagacacaatacaaaatgataaaggggatatcaccactgatcccacagaaatacaaactaccatcatatcttataaacacctctacacaaataaactagaaaatctagaagaaatggataaattcctcaacacatacaccctcccaagacgaaaccaggaagaagttgaatctctgaatagaccaataacaggctcaaaaatttaggcaataattaatagcttaccaaccaaaaaatgtccaggaccagatggattcacagccgaattctaccagaggtacaaggaggagctggtaccattccttctgaaactattccaatcaatagaaaaagagggaatcctccctaactcattttatgaggccagcatcatcctgataccaaagccaggcagagacacaaccaaaaaagagaattttagaccaatatccttgatgaacattgaagcaaaaatcctcattaaaatactggcaaaccgaatccagcagcacatcaaaaagcttatgcaccatgatcaagtgggcttcattcctgggatgcaaggctggttcaacatacacaaatcaagaaacgtaatccagcatataaacagaaccaaagacaaaaaccacatgattatctcaatagatgcagaaaaggcctctgacaaaattcagcaatgcttcttgctaaaaactctcaataaattaggtattgatgggacgtatctcaaaataataagagctatctatgacaaacccacagccaacatcatactgaatgggcaaaaactggaagcattccctttgaaaagtggcacaagacagggatgccttctctcaccactcctattcaacacaatgtttgaagttctggccagggcagtcaggcaggagaaggaaataaagggtattcaattaggaaaagaggaagtcaaattgtccctgtttgcagatgacatgactgtatatctagaaaaccccaccatctcagcccaaaatctccttgagctgataggcaacttccgcaaagtctcaggatacaaaatcaatgtacaaaaatcacaagcattcttatacaccaataacagacaaacagagagccaaatcatgagtgaactcccattcacaattgcttcaaagagaataaaatacctaggaatccaatttacaagggatgtgaaggaccttttaaggagaactacaaaccactgctcaatgaaataaaagaggatacaaacaaatggaagaacattccatgctcatgggtaggaagaatcaatattgtgaaaatggccatactgcccaaggtaatttatagattcaatgacatctccatcaagctaccaatgactttcttcacagaattggaaaaaactactttaaagttcatatggaaccaaaaaaatagcccgcatcgccaagtcaatcctaagccaaaagaacaaagctggaggcatcacactacctgacttcaaactatactacaaggctacagtaaccaaaacagcatggtactggtaccaaaacagagatatagaccaatggaacagaacagagccctcagaaataataccacacatctacaactatctgatctttgacaaacctgacaaaaacaagaaatggggaaaggattccctatttaattaatggtgctggaaaaactggctagccatatgtagaaagctgaaactggatcccttccttacaccttatacaaaaattaattcaagatggattaaaaacttacatgtgagacctaaaccagaaaaaccctagaagaaaacctagtcattaccattcaggacataggcatgggcaaggacttcatgtctaaaacaccaaaagcaatggcaacaaaagccaaaattgacaaatgggatctaattcaactgaagagcttctgcacagcaaaagaaactaccatcagagtgaacaggcaacctacagaatgagagaaaatttttgcaatctactcatctgacaaaaggctaatatccagaatctacaatgaactcaaacaaatctacaagaaaaaaacaaccccatcaaaaagtgggcaaaggatatgaacagacacttctcaaaagaagacatttatgcagccaaaaaacacatgaaaaaatgctcatcatcactggccatcagagaaatgcaaatcaaaaccataatgagataccatctcacaccagttagaatggcaatcattaagtcaggaaacaacaggtgctggagaggatgtggagaaatagaacacttttacactgttggtgggattgtaaactagttcaaccattgtggaagacagtgtggcgattcctcagggatctagaactagaaataacatttgacccagcaatcccattactgggtatatacccaaaggattataaatcatgctgctataaagacacatgcacacatatgtttattgtggcactattcacaatagcaaagacttggaaccaacccaaatgtccaacagtgattgactggattaagaaaatgtggcacatatacaccatggaatactatgcagccataaaaaatgatgagttcatgtcctttgtagggacatggatgaagctggaaaccatcattctcaacaaactatcacaaggacaaaaaaccaaacaccgcatgttctcactcaaaggtgggaattgaacaatgagaacacatggacacaggaaggggaacatcacacactggggactgttgtggggttgggggaggggggagggatagcattaggagatatacctaatgttaaatgacgagttaatgggtgcagcacaccaagatggcacttgtatacatatgtaacaaacctgcctgttgtgcacatgtaccctagaacttaaaagtataataataaaattaaaaaaaaaaaaaacaaaataaaattcagaaataaattggaaaaaaaattgtgtttgctctaggattccttctctactgaaaaattctggccacaagaaaaccagcttttaggattgtggcacaaaatattctacagcaaatctctcttagagaaatccattccttctggggagtttcaactgtgattggattccaggcatatggaatccaaggcagtaaaatgtcaaaaactgagataaaagttgttcggggtcaaagtgattagaatctttttcagaggaatctccactcaaactaccaaacatacctgcaaacaagatccgcttgtgggggatgagctgttcttgaaggaagctgctgttgtatggaaacttttgcaactaacaaaccttggcattgggatcaccgatctgcagaatccgacagagctgatggggccctgatcaattcctttccctcattccacagcaaggtccctgtgcagctgatgcatggtatccacatctattcttaagcttaactttgccacaggatgcatcagtgaaaagacatccgttttctgtcttttctcatgtgcccctggtggaggtgctgatgaaaggcagttcagggcggactcggtacccaagtgagcccaccctcaggtgacctctcaacgcagggcagtccttatgcatgcgctctgctaaccgtcctacgacaagtttctctgttcatgataaaaaggaaaccagctgggcgcagtggctcacgcctgtaattccagcactttgggaggctgaggcgggtggatcatgaggtcaggagttcaagactagcctgaacgacacggtgaaaccccatctctactaaataatacaaaaaattagccaggtttggtggtgcatgccagtaatctcagctactcaggaggctgaggcgggggaatagcttgaacccgggaggcggaggttgcaatgagccgagatcgtgccactgcattccagcctgggaggcagagtgagactccgtctcaacaaaaaaaaaaaaaaaaaagggtaaccaatgaaaaagacagtccctgaactgaaaggcaggccctctgtccacaaaccggggaaactgcctcgagctcacagtcctccaacccctgctctgacccagagctcaaagtccacctgaggcaggtgtgaagagccaccaagaagggaaagagtaccaccaccaagtcccaaagcaccctggcgtctctcaggccagatacccccgatgtggatgccagataccaccacactgccgaagcatgaagaataattatgaggtaggatttactctcagaatttacaaggtagattcacattttaggtaaggctttatctttggagtgatttcccattccagcttcagccaccaagcaggagaaatccagttacaggaacatgatttggtttcatgaggaagccatggataaaatccaatgcctttgccgtggttccaggagaacatgccatttctgccctaaggaccagcagtaagaaggaacttcaaagtgatgttgacctttaacctgtctcaaatcttccagagttactattactaggctatgagcaatttccctgtgaagtcatttgtgtctgaatttctcaagtagacttgctgtgagatgtcttggggctcccatttttcctcatgttttcaggagcattaaccatctttggaagaaaaccatcggactgaaaaggtaccatgatggactagaggtaaaactctggctacgtgtacttggactctttcccctgaaatcagagttctttttttttgtttagtaaatagatcataaaatatttggagaggcatttgttttatttttctcttcttacaaaagttattcacaagaatattactatcttacgtttctccctaatggtggttcctgggtctaatggaaaagaactcattgtttgggaaacccgtgaggctagactgtgccttggttcgcccctcagaatgggaggtcagtgtagacaaacgaagaccagaagggtgttaccaaatgcccctctgcctgtagggacaccagtcctgaaatatgaaaacttttctatggaagaaggtgccagcgaaggctaaattctctggcatgtctaggtattttctgccagagcacacggtgtgcttgaggggaaagaaaacttacccccagcaggctagggtacgtttccatttgactctgtcttttatagctttaaaattggtttcatcttacagtttttctgatggtaatcagtcttcaacgtcagtttatgtaagcatttaatggcctctgagtttatccatggcttcgcacacaacttactcccattgattctattcagaaaacactcagacgcgtgagccaggcaagagccacaccaagcatgtcactgctgggacgacacgtaacatccagcatcttacatgagaaacacttgggaacagcctctgccatcacacatgtggataccttcgtacagagatcattcttaactgagaaaaagaaatacgttgtaattggtttatgtgcacattttacgattcttcatcacagtgtaaagaagcctcattttgtaccataagccccaacagtgaatttccgcccccacgagattccacaccccacactacacagagcatggaacctggcatgtggcaggggctctagaggtaattactgaacaaatatgtgacacatggatctatccacattcaaaagggatcctcaccccaccctttcttttaaggattacgtgaaaaggttctcgcaagaacacaaagcaaagggatccgaagcccacaggtatccttggctggttctcagtgaggacttcagtccaggtgtgtcctggctgtccatgggctggtcacctggagactgaccagccacctttttagtgccaaggagcagggcggaataaagataatattgttaaaatggcaatttaatgaaatgaaagcatcatactcaaattactaggttcagataactcagctgtcttgagccagcccaaggcatgagcattttgaagcccatccatcagaaaagcaatatgatagccaagttgagttgattccttccatagataagtagctgaggacctcatttgttcaaagtttggaagcaacaggctggagggcgataaacgccctacactcaggatgccacttcccctggtgccacactgggacctgtcatgacagagagggagatttggctctgctgggctggacacttcgccacgtgtgggtctgccctggattctcagctcaggaactttggtaagaggacccacaggagttcaggcaggggtcaggacttcacaaaattgggcaaaaatccagcatttgattccgctttatctttctggtgtggagtttctctttgatattcaccgttaagggtgataaggcactcctccttccctcattctttaggggcaagcagagatgaaagtcagcttcctatctaaactgataggcctggtgaatccacccactcagctgcacttggcgtcaccaagatgcctcttgacctgggggctttctacgatttccatgctgggtctcgcaaggatatgtttccccttcagcctgaagtgtcctccccctacccccactatcagctgatttctacttgtcctttagtgctgggggccaccctcagcttttggaggcctaggtctggtgccccaccagaacctggggtctcacaacacgcctgctgggctgcctccacctcatgctcacataggctgatgctgtctgtttgcccgggggtcccctccctcgactgtacctggggtggggacaataacttatttctgtatacctagcggttaaaatgtagtcatgctgcataaataaccattgcgtgattgggcttgggggtaaccatttgtatctctaaagtgcattccagtatgtcagaccatgatgacaagtttgtgctgaatgaaactatactagataggcagccagtgactcattcttgtgcaaatgagtactgcaggcagattttcaatatatacaatccacatggatgtgggctcgtggtcacagactccagctgtgaggatttgaaaaacaaaaaactgctgtgtaccttaaaatgaatgtgtgacaattggcaatcactcagaatgacagtccaggtaggtgaagcgaacgtgtgcttatttttgcctgaaggtttgctgaggcttctgtgccttggcagctggaaggacacacactaggctgcaagccagggtgggagcagctacccaaggaggcttccagtatggtccatccttccatgggggactcactgtcatggccacaggggtctgacctcacattccagacagggatgtggcccaggccggagtggatggagaagggaaaggggtgagcaggagaggaggacattactgtggccagatgaacaggtctgcctaggtcaaatcaagggctggtatacagatcagagtctgggtaaaggaagaccacttttgaccttaatctgggttatctcagaagtgagatcctatgttagttagatgtgtggtagaactttccttagtgttctacatacagagttgcccagggttggcgatgggagtgggcctggctgtacctgacttgtcttctacagaatcacgcacttgtagtcagttctctttatgggagctcagtacaatgttcaatttaataaacaaagggttccaatgcttccattaaaaaagaaaagccaacagtaagtagtaatcctttaccaactgcaggagttttgctcctaaatgttgcctcagcagcaataggcaaggtcaaattctcatgggagcccaggagctggggtaccaatagagaaaatggcattaagtatgtcaaaaccagtagcagaaatgggcaacgctctggagctgtgctgtccaatagaaccttctggaatgctgggaatattgtctgcctgtgctgcccaacacaggagccgctggccgtgtgcagcaacggagtactcaaaattttcccagtgagatggaaagatgaacttttaagttggtttcattttaatgaattacagtttggatcgtctccaggggccagtggctgctgaactggacagtgtagctacggaggccactttcccccaaaccaacctgctcctgcctctcctttctctgttgacctcaggagccacgtggcaggcacagcttctcacactaagctccgtgcctcactgactaggtacccatctttaaaatccacctgaaatttcatttttaagtttcattttgcatttgcatttcctctggttttgctttcacagggtcctgcaaaatgttggcgcagtaggctgtctttcccgcaggcatctagaaggaacgtttcttccagaccaggtttcctatccacacagagaaaagtggagaggagagcatgcctcaccttacggggctgttctgtgagacagggaggcataaatgtgcttctgttctcttgttgggggaaaatgaactgagaagcttctatgcagagcaacttgtggaaattaaaataagtttctcagcttcttcctcccaacacaagttctcctggtgatggggggtgagtgcacactcgctaaggctgccagagctccctctccagctggcttgcctgcctcgtgctcccctcactaggtgtcaactacagacgctttcttaaacattgtcctccaggacaggagatcagaaagttgtgtcccatgtaagacaaagcagcctgcagctgcaaaaaccatgcaagcagaaagatgaagccggcccatcaaccgaatcctggcatccctctctagggacagtgctaaggaatgtctgcccctggggaccaggaggctcaggtactccggagtcacagctggcagtggcacctgagaccttccagactgtacggcttcatgcacgttttagaaatgtgttatcctacttttactaacagaaaattcaaacacagagcaaacgtcttccatcgacaggtaaaatgatttggcaggtgtctctcccaccttctctgcctgtgcatcagaaggcgagatgccaggaagtgctgagctcctggcccagggcagctaccagtgattcatggacctcaggctaagtggggagctgtttccgttcatggcaaactattcactactagcaacgtgaaggcatcattcttgctaaaatgtcctttcttgcttttcagaaatgaaactgaagttccaggtcacctatccactaccatctagcccttaaatatgaaatgtagggaagactgcaatcaatagctgtaggcaaaggacacaaaacactgtagccacagcagccccatgggccaacactcacctgtcccccgggcgtggctgaagtcgcccttcaccaagtggcaggtcttgccgtccccgctgcagaccccgcatctgtcctctttggctgcagacccgatgatgccgtcacagccgattttctaaagaaccagagggcctcattattctgtggttaagactcagaggagttttaaagaggctgccctgcaaggctaacttttccatgaggtgcagcatacatggggcctggggccctgatccattcagaggcccaagaaaatattttaattcaggagagaaaaaagatgcacagaatccaacctagattatatttgtctttatacccgcatagctgtaaagtctattttttggtatttgttctggagggagatccatgaaggcacaagtgcccatgggggtcacgctgaggcctgacgccctgactgcctgggggcagagaccctggggagagagtgaagcctgaaccctcacaccagcaggtgcagccacaatttctcatgatgggggttcccctctaggctgtgggggtcacctgcaacttggctgaaacaaccagtagtctcagaacatacaacagaaaccacagacttttctaacaaggtagggatgcccacagctcattcaggcagggcttggcacgggcccctcttttctcaggtaggaagacctagtctatgaagagccccatctctcataccttttcaacaaggcacgtctgagagcagaggagaggctgcctctaccctaggtggatctgagaagcacagcctgttttctaaaaagcagaaaaaggttttggactctttttttcttttttaaaaaagtgagaattttgtatcctgcaaaataacctaaatttatactgaacattgggtaattatttactagccacattgcctaaatgtccctccacattttccccctataaagctaatgcttccagaacaagaactgggtttttcctactgccctgcaccccagattacatattggcacttcagactccaaagggatctacagccagaactcaagaaatcaagatgcaagataatcctggtggaggtgagttagccccttcccgtgatgcctggacgagaagcagcaccgtgcttccccctcacaggtactcccacctgcaggcagggcttagagctagcacagcgcctcgggtgccaggctggctgcacgcgcatccctggaggcaagtgcctggccccacaactccccaaagacatcagcatcctctgttcatcatggcagcagttctccaacttaagtgtgcatcggcctcatggggagggctgttaaaacacaaactgctctgtcccagccctagagtttctgacccagcaggtctgggtgcacctgagaatgtgcatttctaatcggctcccaggagatgctgaggctgcttgccggggccatgcgatgagaaccgctgcatcatggcatgctactcaaaggaataggtgaatgctcttcatatttagtaatcctcaggtctcatcctcggagccttttatttttttgaaaaagatctaatgggaaattactattgttctgtccaaaaatgatagcataactggacagattccagagaagacttttagatgttctaaaagctgagcaagttgagtctaaaaatgaccatgatgaaatctgaaaaagggcagagcttgaataaaagatcaaacttgttcaaagttagtataaaaagaggaaaagggtaaaattgaaggctttagtggccagaggacagcaaggagcaaatggataacagtgggcttgatggtggctggggagatgtaggtaacacatcaagacacatatggtaactggcaaccaactgcaatgctttgccggggctgaccatccagtagtgacctggagggaagccagctgtgatgaggcaccgtgagcctggagcgcagtgcagggctgcctagattctcggtgtggactgctagccagctgctatcaagttgctcagtataaagattacaggggctggcccggtgcggtggctcacgcctgtaatcccagcactttgggaggctgaggtgggtggatcatgaggtcaggagttcaagaccagcctggtcaacatggtgaaaccccgtctctactaaaaatacaaaaattagctaggcatggtggcacgcacctatggtgacacgcacctgtagtcccagctactcaggaggctgaggcaggagagtagcttgaacctgggaggcggaggttgcagtgagctgagattgcgccactgcactccagcctgggcaacagagcaagagtccgtctcaaaaaaaaaaaaaattataagggctaagaataaagagtagccaagatcagaaaatgtcccccagcagtgtttagcaaacgccgagaccaaatctgtgagaccacgtgtctgttgctttgtttcacttcagagctccagtgcatggtctccagacttgcttctgctggggccacagggccaatgcccacagagctggtctctcccactggcctctttcctggcacctgttccagctcccacctgggctttctcatctcaggtgccctctgctgtagacattccttacactggcttcctataattttcaaaccacacccttgcttggtaggagtgagtctctggcttcaggcctggttccttgtcctgcacctcagttaaggtttcctgattcaacagcttctagatgccccatttggtccagtttcctccagccccaaagaagggggcttttcagggcaggtgcaaacaggaatgcatacagcgttgccctttcagttaattctggagaccatccaggggctgggacaggtccatgggttctgcccactctacttggtgttattttagaggctgtctgcatctggagacagggaatgcagggctgtccatgtctgaacagcagtgactctaaatgctgacgggtgacagccacaaaatctgcgaacgggggcattttcttccattgtttcagtcagcgcaagcaacttataatcttggcagaaactgggatggttttcaaatggaagctgccataggacacaactgaagtcattaattctgaatattaggggagctttgatgattgtatttatgaggcttggtgttccaagagaacaagatgaccaagcctgaggaaactccaggcaataaactctctcaagtcttcccatgttatcctggtgatccttagttactttcctaggaatcttcatcacccatttctcagctttcaaagcagggcttcaagttcctggccagcatttgctggtcgcgccctgtgcctctggctaagtcagggtgtatgtgacaccaaaggaccaaggaacaatgtcccacggcataattaaaggcatgggatggtatgagatggtatgagatgggatggaacggggggaaaagcacaagttcttcattggtcaagacagctcctgagaaacatgcagaaagtgcttggaaaagctttagtgctcagatccgtgtgctgaggagggcacaggatgggccgtggacagtggcaaatgtccatctttagctgtctgagtcctggattccaccctggaactttgcccctgttgaagataaccagggacaacagcctcctggtcatcacacctagtggacgtgtctccagcctcatctttcacctcctgctctacagcgtccgctgtgtgtaacgcccaccctgtctctgttgtgcatgtattgattcacccgtggtgcctgttatgtgcctaacctggaaataaagacatgtaagatggagggagacgccagtgcggaaacaagcagacaccccagagtgtgtgctaaagatgccctggaagccaaggatggctcctgtctgattctcctcccagcccctggatgactcctccctcctcttgcttcttcgactccgtgaaagtgggtagctcccccggggctccctgctttttccgatttttcattttcttggtaatttcgccttctccttatttcagccatcatcctcatgcaaagagctcttaagcccacttctcccctcactccaccctggctctcactactaagagtctgctgagcaatctctccactttcaatgcgacagcttctcctccaaagctgcctgacctcttaattctagttggacaccccctgccactgtcttggaactgacagacaggcatcctagcctgaaacctccaagccatttctgactcttctattttgggatgtacccagttagttggtgagcttgggttttttgtgccctgaaaacctctgttgcctacttctcctccatgttcagctccactccctagtttacaccctccttaatcaggacatgaactatgggagcatttttctcctgcctgctgccagactaatctccacacaaaaagagagataagatctgtggccaaagatccccactgcctatcagaaacgtccgcacatatgaatttaagaccctccatgatctcattccagctgctcaccaactcagcctgccttcctcccccactccagatgcacagtgaatccaaccccctccagcccactcttgtaagccctcccccggaatgacccctcagccaggtgggcaaccagaatagcctcttaacttgtttcctgggatctacttgagtcagttatccatagctaagatcgcttcactcctctgcatcaattctgcctgggccctggctcctttgtgccagcctccgccctcgtctgttgctggaatgcacccatctccctcttgcttccctctgcctggagctctctgcccccaactctctgccaggctggctcttcctcaaaggctgtctcctctaagagaaatgccatgccacctgctcactgtcctcctcagccacagtcccccgctgggtctctctatggcaccattttcttcttcacacataccaatctctggaatgatcacgtttgtgagctgacatggcctgtctgtatgttggacagggacagggatcctcttggtcctgctccctaatgaaagcccagcacacaatacagtgtgcagcactcggaatgtgatcaacaaatacctgatgcaggaataaacgaaattccaccctatgggttttctgctatgtctaagtggaacctcttcttggttgttaaatcacgccttcgcctctggtcgttgggtttccaagtgagtatgtgtcatctccctaacggaccataagcacatagaggactgtgtctgagaattctttgtattcttggccttcccccatcctctgacacacacagtggctggtgtggtattaagcacatgtgtgttcagtaagagcatacaaatgatgacctcttatcaagctggggagtctagttttctcatatttgaattgggacttcctcgtacaagttttgatggtacttgttttttctggctggaataagcagtacttgctttcttcaacttattagctatcttccaactactgcctcatcccatctcttcggttggagggaggccaccgacttcttgaatgacttttaagcgagtgcagattttaggccagttgcgcagccgtgactccaggatttactgggttcctgggtgagtgccaccagggcctgtagtgcccatcttcctctttcttgacttcattcttgttttgctaaactacatgtaacttctgcagaacgcatgcatggaaaatagaatttctgagttcttctgtgtctcaaaattagtttccctgcatgcttgcttgatagtttggctgcacggagaactccataattatctcaattttctgccagggtcagttttttctgtttgtttttcttggtctttctccttcatgctgctggttttcttcaaatagcagatgatgtctggttgcccactcgtatttgagaacaagcaacaggaagcccgaccgaaggagatctacatttgagggccgaccgaaggggatctacatttgagggccgaccgaaggggatctacatttgagggccaaccgaaggggatctacatttgagggccgaccgaaggggatctacatttgagggccgaccgaaggggatctacatttgagggccgaccaaaggggatctacatttgagggccaactgaaggggatctacatttgagggccgaccgaaggggatctacatttgagggccgaccgaaggggatctacatttgaaggccgaccgaaggggctctacatttgaaggcctactgaaggagatctacatttgaaggccgactgaaagggatccacatttgaagctgggcactgctgcatggtaggtttcctttcgtaactagtgcgagggaaattgacctctaaccccaacgcagaaggctgggcaccgtcctcagcacagagacctccctgcctgctctgggtttcctcaaacagttcattccatgaccctggaaagcagctccctaacattttacttgacagcccgtcaagctctgagtgtgggatcagacaccatgagcatgccgatgcaccctcggacttgttttcagcccactcttcacttccgaccctccattctcaagcccacagctctcggtttgggctgtcttttcagtggcgactctccgcctcttccagctctggcctctgctgctttgttcctgcatgacacttccacccacttctgtcatccagaaagaggtgggatctttcacctggaagctcctgcttcccttcactgtttgtgctggtttagtggagtcccgcatggaagaggcaggaacatgtggcttggtctgctggcttcaaccagaagttgtcatgggaggttaatcagaaaaaaggggtgcagggaatgaccttcacgtttcaggcactgctatccataaaggtttggcacccacagtaacacacgttagagatgccagctgcagggtcacggtgcagggaagggcagcatgtggggagcatcgtgaagatgcaaacccaggcttaagtgccaggcacgctttcctgcaggcttgttacctctgctttacctgggggtcctctgagaccagggtctctttgaattctcctaaacttccccagtaattctacctgcctcacagatgatctttggacaggaaataggaggccaataaattcttggcaatgaaagtcgtccattgaaatgggctccagattccagaaccactgaaatcctaagaacacataatccatccatccagccactctttttttttcttttccttttttgagatggagtctctctctgtcgcccaggctagagtgcactggtgcgatcttggctcactgcaacctccactgcccgggttcaagcaattctcctgcctcagcctccttagctggaattatgggcatgcactaccatgcccggctaatttttgtatttttggtagagacggggtttcaccatatcggccaggctggtctcgaactcctgaccttagataatccacctaccttggcctctcaaagtgttgggattataggcatgagccactgcacctgacccttctttcaatatgcaatcaaaggctttcctctgggccagtgtatagggaagcacaggttaatgagacgtacttccttcactgaagaaggtcacaggccctgaaggtgttttggcttggtattcatcaagcccaggatatgtatacaaattatggtaccaaggaagtaggaactgaattggagaatgttggctacaggtgtgcacaaaccagtaaggcaagcatagctgggtctcaggtacatctgggtctgtccatcatccaatgggcaaagccgcgcgtcagctggactcgctcattgcatgtcagcagctccagatgcagttgtgtatcagaggcttattaacccggtgtctctccttctggaggccaacagtaggaatcattaatgatgggactcttgatttataggagcttgctgaaaaatacacaatgtttctgttactttccccaattccctcccaattttatgagtgctgttaagtttaatttcagcatgttaaataatttgtgactcactgaaatgaaacttaattcagtcctcataaaaacagaataaaatggcatttccatgtttcatgttatggtttgaatcagcctgctatttggagtgcagtggaatctactcaaaatgccattttgaagcctctcatcccctaccaactagttactatgttcctcgacatttcccagaatgccgtctgctaccccaaaatagcacaatttatagctgaaggggaaagagaggaaaacgctagtaggcaaaccacggcaatatttctgtgagtgctgtctcatataaaatgtgggtgatttgtatgtttaatcggttgtaattagacaattattatcaatgaatagatacagactttccactcattaggcccctgaggttttaacattacaattactattattttccttaaccatttctttcttgctatacacattcacaaatgccacaggaatccagaatgtttcatcttgacaattactgcaacaagacataagtactatatttgaattgaatttgtgatcttatttaagaatgcctgatttttataaaagttcattaactacgactaacaatttggagttttgtgagcatcgatttaagagtgggctgaggttaacctttacagtatctgtctgaagaaagtactgttagacaaatagcagatggctttttaacttccttcagaaagcaagttgtttctcacagttttaacctggagaagtacatgcaggtaggtgctgttgccacccaccaggatggtggctcttttgtaaagactggtggtctgcctggaggcagcgggttaccagggtgcagccacccgggagatggtgctttcgagaattggtaggcagggtctctgcagtggcagggtgaggctcccaaggagcaaaagaccaccatcgagcatcatgaaaggtgcctccatctgcacctgcgcaccctggtgactctacttggttaatgtgaggtgcagtgcaggcaccaaccaatccctgcaatgatgatgacaatggtggaggcactggaaatagacaggctggtcctggggatggagtgacatctggggatggagtggcatctgggaacaggaaggcgtgcatcccaatgtcactcccatcacatctgcaatggactggatgtttgtgtcttctagagttcataaattgaaccgttcataccaacgtgatagtatttgggagtgaagcctctgggaggtgattaggtcaagagggggtagagctcatgaatgtgctggtgcctttgtaagaagaggctagagagctagctagctctcttatttttattttttttgagatggagtcttactctgtcgcccaggctggagtgcaatggtgcaatctcggctcactgcatcctccacttcccaggttcaagcgattctcctgctttagcctcctgagtagctgggattacaggcacccatcaccacatccagctaatttttttgtatttttagtacagatggagtttcaccatgttagctgggctggtcctggaactcctgacctccagtgatctgcccgccttggcctcccaaagatctgggattataggcgtgtgccaccacacctggcctcaagaaaatgatttttttttttcaagacatggtctcactctgtcacgtaggctggagtgcagtggcaaaatctcgattcactgcaaactctgcctctcaggctcaagtgatcctcccacctcagcctctggagtagctggaactacaggcctccaccaccatgcctggatactagctctctttatgccatgggaggacacagagtggcagcagtctacagcatgaaagtgggccttcaccagaacccatctatgccagcccctggatgttggatttccagcctccagaacgttgagaaataagtctgttgcttataagctacccagtctagggtattcgttagagcagcctgagttgactaagacgacacccaagtgcagaacagggttgggctcaatgctatcctcatgaccacagacttaggccattcaaatgtctggagcagcattttctctttgattctacgactaaaggtttcattgtcatagtatggaacatcctctagttgaaaaggctgtgattaaaaccaagatcatggatggagcccattggcacagatcgcacagagcataaattatgtccagccagtaacacagaccccactggctagacaattttaggattcttagaaatgcctccccattggcaagaacgctgcagaagatgctggcagaggctggggatggctcggctggtgctgctctaaagggtgtaagaactctaacttgggaggaacgttaagtcgttgggcaggatggtctgtggaagtgtgtaatttgggtcggacaccagccctgcacttggctggttagaagtttaccaagaaccatcggcgatgcctcatttcagtaacaatgataagggctttgttcatactgcccgacgggcagggccttggacattctttgttacaagaaagcagccaggaggggccagctcaaccactcatcactgcctccctccccgtgaggttgctgtgccaagactcttgggcaccaggcgcttatcacccacatttatctgtatttgataacaaagccaggcagtgccaaaggagtctgggtcttgtcaagcttttccctgaaaaatcccagtttcagactgatttggccttagcaggaaaaagcatctgtttgggtggaaacggtttgctgcagcaatcaccctggaagctgtctttgtgtctgtctttatgccttgcctcctcttgttctgtttgtcacgcacactgaaatgttgatgcctatgcactctgctaggcactgagcaagcaaagagcataagcagatctgctgtccgcatgggcaagtggacctgacgcctggaagccagcatctggctcaccacagttctgtgagggcaacgcatggtgatcctgacactgatctgcctgctccagacatcaggagctgccattgtcactagctcttggtgggctcccctgtggaggacacagttgagggaacgtggtcataggatgacaggaacgcgtatgtgtggctgagggcagagcgctccctgggtgctgtggtctgaatgtttgtgtctcctcaaatccacatgttgaatcaccagccctcaaggtgatggtgttaggaggtggatgttttgcgaggtgactgggtcatgagggcagaactctcatgaacaggatcagggcccccataaaagagactcacaagagagctcaccagccccttccactatgcgaggacacagcaagaaacactgtctatgataagcgacccctcatcagatcccaaatctgcctgtgcctcaaggcctcaatcttggacttcccagcttccagaactgtgagtaataaaggtcagttgttcataagctgcctggtctatggtgtatcgttacaggtgcccaagctgactaagatgctggggctctctcacaacatgcccagcttgacccgagtcaccagggagtatggtacctgtggcataagcgaggcacagaaaatacaaagcttcgacacccactccccatcccagctgctgcgccacctcaggaggtgctcgttctgagggacaaaatgggagcatggagtcacctctgctaccccaggctaggagccccacctggggagggtaagggctacaggtggccctcagcttgggcagggttaatgcaggtggagggtaagcttccttccttcttctcgcattccttttttttttccccccgagacggagtcttgctttgttgcccaggctggaaggcagtggcgtgatctcagctcaccgcaacctccgtctcccaggttcaagcaattctcctgcctcagcctcccgagtagctgggattacaagcgcatgccaccatgcccggctaatttatgtttgtatttttagtagagactgagtttcaccctgttggccaggctggtcttgaactcctggtcttatgatcttcctgcctcggcctcccaaagtgctgggattataggcatgagccaccgcacccggcctctctttcttcacttaaatggtttttatcactgttctaaccagtcatggccatccagccctcaatgcctttgggactatataccagtagatggatgctccctgacagctgggcgcacctatctgcctggcgtgacctgcacaggcattggctcagttctgccgtctcttctgcactaaatggggcctggcttgtgcagacatcctttaggcgcatcttagtaccctgcctaccttcgtcttggtcatgatgtctaaagcaattttcaaagtcttagaatacgttgtgcctgttctttccacctccactccttgttggcctagcactcagtcattactgagctagggttggtgcaccaggcaacactggcggcaggaggcggcatcactgggtgccttcctaagaaaatccactcccctaggcctcctgagacctctgctctaccccactccctgtctggggagagtgagtctcctctccaaagccccaccaaggaccgaaggagaagtacgtcacctggcacttgccgtgcacgcagagatcagtctcgtagggcccgcagggtgtaccgtccaggaccctgtcggccaccagcagtggggactccttcccgaggggcgagcagtagagttcacatggcttatctgaggagggaaaggttggaggacgttgacacgggaaggtgtgcgtgggccatgcagggcacaggtacatgtgggcagagggaaaccctgaggaagagaggtccgcacaggtcagtaaaggtgcatgagctcaggtacgcgctccaggaagcggaaaaagacccacagccacaggggaagacagtgcaggactgagctctgtggggatgccttctctcatctctctatcctttgcaatgatacaggaagtttccttttccttaaggcatcaactatacccggtgaacaaaggaagagttgtgtgctaatctctacgttgaatacacatcaagggggagctggagccactcttatagcgagggtgtgaagggagggggaggggaaggggaacgagaatgcctctgagtgagggcagcggccccaagggtcaccatgacagtagctttggtaagagcttcagtgctcccctagctgctgggtgacagtcgagctgtgctttggggtacggagatcccagaagaaactgagtgggagtaaggtacaaaggggacatgtgcgccgctaggacaacttataagagccgcatgtgcacccaggcaggatggaaacctgggtttcccctactcctaaaaacacatgacctcccagaacgcgcccagctccccagcctttgcccggtgtgcgctctctgcctggaaatccctcgcagcactttgccttctactgccctggaagcttccaccctgcagctcttccctcacgccagctctgaggtggggcaggagcagcatctccacatgcactgtgcacacacctccattaaagcaacagcatctgcctgttgtcctagaattgtttgggcacctcccatatctgaagggatttattataaggcaggtcccatcgctaaaagagtgtgaaagggatgacttttattcatcttcagattgaagtaatgctgggtctgtgaactcttagagggcaggggacttaagctttcatttttttgtccccacagtgggcccaggacctggctcacagaaagactcagtatatatatatatatttatatactgatatatatatatcagtatatatatatttttatatatttatataaatatatatatatataaatacatatatacatatatatatatttttttgagacagagtctcactctgttgcccaggctagagtgcagtggcgcgatctcagctcaatgcaaactccgcctcccaggttcatgccattctcctgcctcagcctcccgagtagctgggactacaggcacccgccaccatgcctggctaattttttgtattttcagtagagacaccgtttcaccgtgttagccagggtggtctcgatctcctgacctcgtgacttgcctgcctcggcctcccaaagtgctgggattatagaagtgagccaccgcgccccgcaagactcagtatatatttttgaacaaacaggttgaatagattttgttcttctgtaagtaattgagcaagaggaatgcatttttctcctctctctctctgtcacctcaccctaatgccatctatgtggttactttgcacagggcgagagtcaaagaccttcatcctccttgctgctctttgtcttctccaccaggcctcctcagtgggtccttctggtggccccgggccagcaagagcagggacagagagaggcttctgagccgacctggcctcggacgaccttggcatcccacctgcagagttcctgtcagagcagacgtgctgtctcgtgactggaggactaaaccacccctgtgttcagtcaccttccaggcctcctgtcccacgaagtctgcttctcaccaggctccacaggaaatcttgtcttacagcgctggaaagaagctccaggagtgtgctggaaatgcttccctcagttcttccggttagctgtgggggtaaacatctgcccacgagaagactggagatctgaagcctcccaggtaaggggagtaatgatgcctcaccatgcatccattcaccaagcagggactgacccctccctcacacaaggcactctggggggcacttccggggaaagacagacacgtgatgtttgcttctgaaggccccagtgggctcatggacaagtgtacagcaaacccagggtgaggccacatgtttcaggtctgatgggagctgtcggagggctgggtgcagcctggaaggaatgactcatttcccgtgctggcaggctaggggcagctgtccttccacttgcagggaaggacctcaggaggtggctggtggaaggagaactctggaagatggagacatatactgagattagctcgagggagcttgcttgacagggtcactgaggtaccctctggagccctgaggttccccaagcatcttgtggagctggtgggagaaatacagcaacacagcccccagcgtggagtctactccacacactgggctgcctctactgtttcgttgaaagcaagggtcccttggctgaagtggtttgaaactggattttaattacctttagactgaaatgttgactcagtactgggagtaattgagctttgaggtgatttgctcaacagctgcagtagtaaggatgatgaaatcataaacgatatttactactactgtgttccaggcagcatgctaagtagttatctattcgtttcaggtgggtgctgtcactgttccattatacagacatgcatacagggctcacaggaagtgctcgactgtcttcagttggcagggtcacgccccgcctcttggctccagcctgcttctttttccatcatcgcaatttcctctctaaactgagaactcctagggccaaaattaccaagagcaaagtggcattgctaaaaacaaaccaccagtttcatgcatgtttctggcttccgagtgtatcctctgattcgagtagaagtggaagtgggacttgggtagaaaagcagaggctgttttgaggcaagttagaaaggccagacttcaaagggatgaaggctgtttatctggactctttagggtgagcagagaaatgcggactctgcaaagcaggaaggccaacctcagctggagggatgctggccacgagccttgcacgaaggaacgctcagctccacctgcatgcagctctcacctgcagacactgccctccacagcttggacagctggggacactcaggctccagaacagagtctagaggtggggcttcccttccctgctcagccagaactctccatttgtccgtctcccctttgaggcctctgcttggaattcagggcacccacatctctagcaaactatatggcatgatctcccaaaggataaggtttttaaaatgtgaggaggaggctcagaatccctcaaaattctctatttccctccaggttgccttaggtgggagattaatctccaggaacaagaccccagtaaataacatgaggtggtgggattcagctttgcacccagcatcaacactcttacatccccaacagcacagaagatcacattttcttaaaagttatacaaccacacacttgaaggaaggaagcttggaacgtgccacctgcatggctggtgtgtgctgagatggaattctgactgaagctgcaaagcctggggccggtctggcttcttgctggcctgcctggcatcaggacttctgcttggctggaggtggtcacaggcagggcagggaagatgggctcagaagcttgggaaccacgtggtcacatgtgcccgctggaggtttggaacattcctctgcagtgaagaagacactcgtggctctcagcagtctctctgctctctctctaggccagcagttagaaggtcttagtatggtggggacattgctttgagttcatcacagcactcatccaagttctccctggtcctctgtgggggacacatgctgacgaggctactcagactcctgttcccaaagctgcccaacccggccccctcatcagtccccggcggacaggcctctgcggattttaccagcagtgagcacctgcccatagctggcccattcctcgtctctttcctgggaactcggtactgaaattcagatgcagagaggtcatgtctgctcgtggttgacggatcccaaagaaggctacactcccttatatgtaattcagaaattcaaaaagctctgaaaactctaagtgttctcttccatttgtggcaaacacatttggcagcaaaaccagcctggactgatgtgagctctaggtagtgtcagtatcccccttaatgaggtcacctggtggacagacccacgtgactgactatggggtgctctcctggagcccactagcaatacaaatatttggttgatgcactgtcattaccttttgaacacataaaatgctctgaagcttgaactgtatgtggcccaaaaggatctgggtaaaggatgtggatttacataagaggtgccgtgggctaccctaccagcttccacacggacaagttctgagaaagccagtctgcagtgggtgcacggggttgtgactaccaaatgcaagcttcggagaccacagagctaaggtcctgacatcttcagctttgcaacagcttccctccttttcattaagcggccccagctggcttggcggagctgtcgtcagagagtcctaaccatcacgcccctcatccccacggaggctcagacctggggggttctgccgtgccaggcaggaggcgctgggaacgcacagccacgtccagacgcagcctttgccaagctctccgacacttcagtgggcccatggcctgctggcctgggcaaggaggactgaactcttgaaggtttccacttcaatgagattccatgagaaaagcagaaatggggtgggtttggcagtgggccatctcaatgggtttctgtctaaaggcttttccatttagaaatattttctaaggaggatctttgtcttcttttggaggtgggatggatttgtggtcctgaatcctcccttggaaaatctacctctgcaagaattctttcttctttttttttttttttttaaaaaaaggaagaggaaaaaaaagaacaaaaatacagcttcccttcttttgaactgtgcgtcactcgccaaagaattccgcagcgatagcactgctatgaatagggcagtcataatgggcttcagaagagcccggagcccaaccacaggaaacgttcctatcacggctcagctagaactgtgcctcttataaatggagttttcagaggaacacttataatccgtattcccctcctgccttctaaattggccatctattattttgtttttacccttgatgaagtgctccttttaaaaatgctggcttctgttggtatttgagagaaatgaaactgcagatgcaagaagtcagggcgattctaccccagagcaggacgtgtcgagctacctgtgcaaagccccgagcgtggggtctctccttcaaacgcgagatacttactgcctggtagctgtcctcatcaaacagggctgctcttttcagatcaaaggcggtggcactctagtgacaataacttaggacttaggcagagagaaacagaaaggaagtgggtgaaaggtcacattcccaatccaagtggccccccagagagccacaccgcaaggcttcctgggtggaggatctgggcagactcaagtcccaaccactgtggtgataaggcaacgaaacagtccagccatccaaaagcggtcagaaggaaaacagaagtttaatctggacttggagaaatctgtggaaacacagacatttcagtgggatttctgtgctgaataaataagacgggagcattgaaaactgaagcaggcaaccaaggaaagaacaacttggggcacaaagttgagttgaaatttgaagagcgtgagtctgtcccagacctgacctcttcttgctcctgcaaagtgggagtgggcagtaaagaggtctaaaagtatctttatctggcatgccggggaaagctgaaggttcggattcaaggctgcttctcatgagaaccaaatggcagctctctcgcttccaattaggggtctgcgtgtgcctgacacagcgggaagcctcctgccacctcctgcatccgactcacagccaggcggagggaggcaaaggccggtgtgcaactgcacggctccagccgcacacgttccttctaggagggcaggtctcccctctccctcaactgcagggaaaattcagggtgcaaaggccgtgtttctcttgaattctgctggcgagctgatggcgcagctacattacacggtccccaaaggtggtgttctttttaaaaaaggacaatgatggggctccccaatactttcaaatgagtcctcatctgagtgggctggtgttatctgctacaatttagagcatcacatgttgctctacgagtcagctcaaagaggatgggtcaggctgttagactaaaagctgcagatctgaggctgctattccagagatgcccgggcccaccttcacacagctacgcacacctgaacttgcgacagcagaaggccaaatgcagatttcaaaggctcttcccatcacagggaagaaacataagacctggcatcagaacttcattcttctgcaaaacacttttgaggctgtctaaaaatcaggcccagtttcctgagttcttcttcaagctccctcactccacacccatgaagtcatgcggtctgtcttcttcaagtgttggcagccaggcaatagctgcttattttctgtgagtcaactgctctggaagtgaggtcagctcccgccctggcctcttgtcagctgcaggtgcttagaggtgtcctgtaaccttattccctctcatcttctgcacagcttgttttgcgtattaaatgagacgatgtatgtagagctaacttgtgtcttgtacatgacataccgataaacgggttcatatgtcatcattatagcacaaagtcttgtttcctaaagaagaacagttttaggtaaaaaaaaaaaaaaaaaaaaaaaaaacccaacaaccctgaagcgggtcctggggtgtcctcatctattaaggacattaattaagcagacattacaaatgtatacatgacacaccacctagaacttcatcagctactggaaatgcttgcagtggcccgatggggcagagcctcttgattcaggagaaagctcttggaaagaaaatgggacctgtgcttattatcatctttcctaagttgcaaactattctcaaaatgttccccaacatcctagccaaggattaagagccaattcaaaataaaccaagagaagcaatacagggatcatccacattggaaagccagagagcagccgcaccagcacactgggatgcccctgtaaagctccttggtctcctcagctcgtcctgggtccctccacacatggcgccaggggcaggatgccagcacagcctcctcgctacaaatggggttgcaggatgcacctggcctgctgcctgcttcaacagctgcagttggaacatctcagagagctgggtcattcaaggtcaaccccacaacttacaaagttgggccgcagctgagctgggcagaggactggagtgtcttgctgggttggtttgggaaagggatgccccccggcttccctaggtggtttttatattcttaggggaggacaggaggctgccatgcaaggacatgccatatgcctttaccgtcaaccaccacggctgtcagcaggcctttcttcttggggctcagccggtcgtgtgcctggcactgctggtcccggaagctgggcagacccttggggcagggcaggttctcgcagaccgcatgttctacactggcacccgggcagtgtgtgcctccaggcccagggctagaaggaagaagaaggtctgtgttaaccaggtggtgcgaccaaagggcaggagagctgtttccgtctctcttgccagggggaggagaggaagggggcagggcaaggtttccaaagccaccccctctctgctgttacagaccaaatgcccacaatcccagacccacactgccggcatgtttaagtgagccctctgaaaggtgcatgagagaactgcaaatcaaggtcatatggaaaaagaaggcagtgagtatgagtttggcaagatccacacattgcgtccttcatctgaacttaaaatttggccatgggtaacactgaaaacccaagggacacttctggagagggtgtgtgtgtgttctgcaggggtcttctctgaaatgaagacctttaaatgcccccccaggtatactctggaggttaagtttcaggatgagtaaatacatagctcatttactttataatgaaaagaataagaacaacgagttcactgctcatgggctttgactggagaccagttagatccgggctgtgctacctttacctgggcaggtgtgagaccacacatggtcaatgctatggtcttggatcctagatgctctgtgctgaggctggggttttaagccattccggagttccagactgtgttcactggccaagtccacatgtgtgagggcctggctggcaaagcatggctctgccctgtgcttctgcaaggccccagggtgtccttgacaacctgggcaacctcagtggttccattcgtttccatgatgccaaggtcatcatgatggaataagatttcttatccactcccacccctcgcactttttattgaaattcagtctatgaaagaaagaaaagggcacacatccaaacagttctgctcaatgaatttccacaaatcacacacacctgttggccaaatgtcatctggacacattagccatttcgtgttgtgtatttctttttcctcctttgccattttccatgttcagagagcaagaccaccctgtgattggtgctttaggggagagatgtaacagcagaagagggcagaagcctttgggcttttgtgtcataaaggtctactccaggggttgaaaacatgtttctgtgaagggccagatagtgaatatttttggttttgtgggccaaatagtctccaaccactcaactgctactgtggcacaaaagcagctagagataacatgtaaaagaacaggcatggctgtgtcccaataaaactttataaacacctggtggtaagccagatttggcccacgggccttacttttgccaactcctggtctacccagttgtcttggagaaaatatcctgaggagaaaggcccctttcatacttctgtctacctcatatacactagaaaacagttccctcccccaggagaagaagagatctagagagattaaacctactggtggccccatagtggggccttgagctctgctggtcttccagttaggcaatggctaaccctctagaaggtttatggaatctgagaacagaggggccttgtgttctgcttcctgtctagaaggcaagggaggcatcagttccagagaaatgactgcatggtgtgtttaggcagaaggggcctcggacagcctccccaggcagcctgggccaggtaccattggcagacagaatgaatcaaatcctgtgccacggaacacggcatggaaggagcacagaagggctggcccccaaaagccacatggatcagtaggagaaacatcaccctggcaataagtgagtccccacgagcgggcaccggagaaggaacgagtgaggcagcagatgcagcatggcacaacgtttcaagctgaactgggcccccacaaaactctatgcagaagtcctaacctctagtgcctcagagtgcaacccgatttggaaacagggtcaacagggcacagacaaaattagttaaaatgaggctatactagagtaggttgagcccctaatccaatatgaagtgtccttatgaaaaggggacatctggagatacacacacacacacacacagagacaggcagagagacacacaaagaatgccaaacattgtcagcaagccaccagaagctgagagagaggcctggaacagattctccctcacagtgctcaggagaaaccaaccctgtcgacaccctgatttggacttccagcctccaggactgtacgacaataacttctggttgttgaagccgcctggttgggggtcctttgttatggcagccccaggaaactaaggaaccggacgacacaaggaccagatgctcctcgcggaacttacatgcagactaagggaaagcagggcagacatgaagtcatgaggaacaaaacacggactggaagggagtaaagaaatacaaattaggtgggttcgtagaagaataaagaaagctacctttcctacacacttgagtatagactctgattggtgaacatcatgtgattaacttcctgagtggttatcgagcttccttttacgcttcagtttcctcgcctttccagtagctgatttctccagttttacatctgcctaacccgcacacaacaattaccttcacctctgacagtgaggaggcggagaggagatatgatgtgatatgatgtaagagaactggatccagaagcaagtgggtctggaggcggagcacatgggataccacacgtgccttggcacacctccctccacatctgcttctgctgctgcttctccctgacaaattctccaacaggcagtctctgtgtggccccttatctagctcacaggccccgtaatccccacttcccacctcctaaccctctgtccatctttgaggccacctccaccctatttttccttcctacctggagcatctccacatcttgtttgggtatctgctatgctgcttaccactaaccttatgaaatggagggctgtcttcctcctgttcctcttatctggaaggatcttatctcccaaatatctgggttctgtgttctcagcagagagcattgcacaggagggtctccaataagcactagactgacgtgaactatattatcagagctgatcttaaaatgaccaacagagggaatgatgtcgggaagagagctgaggaggaagcaccaggaatccagttctccatccagacaataatcacactggcaaaaactacctgaagaaactattttgaaactctgcagtctacttgaaggcttgcagcttccaggggaaagccaggtcaatttcagttaattttgctcaatttcagcctttagtgtggtaacagttactgcccatccttcacccacaaggcaggcagctatgtctgtgctcctgttgcaactttctggagtcagggtgagcagtaagaaccttatcttccaaatatctggtttctgtgttctgactgttgattgctactttcagttgttaaggtgcagatgcagaagatggctgacattgctgtaacctccaccaggtgaagtggcttccaggggatttccctccttttttcttttaggagccagacatttaggcacaaagacatttaaaagcaacttcatctaggagaacttagaaagccaccagcaatggctaggaaaagatacaggttcaaaaaagacctgataagaccttcagctttcacttcaggttaattcctgatccagagataccactaaatcataaaacaaaacaaaaccaaacaccctggggaaggggtacaatctatttctagagttactgcattctaagatttgaatgtctagtttttaatgaaaacatcacaaggcatacaaagaaacagaaagtatggttcattcaaaagaacaaaatgtattggcggagcctgtccctgaggaaacccagatgttggccttgctagacaaatactttaaaacgactgtcttaaaaatgctcaggaaccaaatgaaggcacagataaagacaggaagacaatctataaacataatgagaatatcaataaagatatggaagttaagaaaacaaagataaattttggaattgaaaagtataagaactgaaatgaaaaatccaccagttcagagaagattttagcaggcagaagaaagaattagcaaacttgaatataggacaattgaaattgctgagtctgagaagtaaaaagaaaaaaatgtagaaaagtaagcagagatatctgtgggacaccatcgagtggatcaatgtaggtactaagcgagtctcaggagaaaaaagagagaaagggttaagagattatttgaagaaataatggctgaagcttaccaaatgtaaagaaagatgtgactctataaatccaagaagctcgagaaattccaagtaggatacaaggacccatactaagacacattgtaattaaactgccaaaagacaaagagagaatcttgaaagcaccaagagagaagtgacatatcccatacaagggatcttcaacaagattattagccagtttctcaccagaaaccttgaaggccaaaaagaagtgtgcttatatacttaaagtgcctaagaacagaaccgtcaagcaagaactctatatccatgtaactgtccctcaaaaatcaaggtgaaaattaacacattcccagataaacaaaaaatggagaaagtttgttaccactagacctgcattacaataaatgctaaagggagtccttcaagttcaaatgaaaggatactagatgtaacctgaatgcaggaggaacaggcttttctccctggtcctggtatgtggcttctctcagcatgcttcttcagtggcctgtgatgcattccacctccctgtggacagcattctcctgtactccagtgggtagcttccaagcacaccaactttttggatagattcctatcctggttggagatgcagtttcttcccttggaacctttccctgacatcttaagtgtggcttcccagagagttccaccagtacagaacctctacaagcctctccctcattcagtgggccccagttgcaccctctctaacaaggtccaaggaatttcatccctggacaaaactgtggtagcagctactgtctgtccttcacagtagctgtgtgtgagtcactgtcatcaagatttgttccttccttgggtgctctgcctcagacctaaagacacaggatgctacctgcttctgctcttcctgtattctttagagttctctttacctcttagtaagttcccattactccaaccacctgttatagctaatatttccttgaactttccctgatttaaaaatatgaccacaggaactgattttcttcagttttaagtcattattttgaacgacatgagaaaggagagaagtaatccactaggtacacaatttgctacctaaataatccccaattgctatgcggcaggaccccacatgtggtccttcattttttatgactgtctctataacacagggcctctacagtaacatcaatgcgggcctcctgcatgtgcagctgacctctgaacaatgtgggggttagaaatgctgacccctcacatgtagtagaaaatccacatataacttttaacacccccaaaattaactattaatagcctattatcaaatggaagtcttgctgatcacataattaacatgttttgtaggttatatgtgttttatactatattcttatagtaaagtcagctagagaaaaggttattaagaaaatcataaggaagagaaaatatatttcctactcattaagtggaagtggatcatcataaaggccttcctcctcatcatcttcacattgagttggctgagaaagaggaggagttggtcttgctgtctcaggagcagcagagacagaaaaaaacccatgtataagtggacctgcacagttcaaacccatgttgttcaagagtcaactgtaccttggtcctgagacaacagaaagaggcatcctccatctgcggcatagagaagacagaaggagaatccttgtgggggagggtgtggctggcagtttccacagatggctacctgacagaagttctgggggaggactcaaaggaggccccaactttcccaaggaccccacactgggctgggtggatgaagcctgaactgtgtggacacggggcttcaggagacagtgtgcggggccagcgagtgcagcagggaccagatccccaaaagcaaccggagagaccaccctcacacagtctcagtagtagagggcagggctcttactcactctggaagttgctctgagctacgcagtaaggagaaaaacaaaacacatctagggagactaaaacgacagaaagacagcttgacagggctaaaataaagaacagttaatataagagattcgtgatagagttatcccttcccaggagctgaaggtgggtccagtctttccctcaccctctcctgtgagggcaggaaggcgcagccctactgggctccaaggctccgaggtcccatgaggcctccaggggaaagccaacaagttgcaatctcatcctgaaatgaggactgatccctgaggaccgggaagaaacttcaaggcaagaggcactttcacataaacagtgatcataaaacagccgacacgcccagagggctcccattttgctggcccttctaaccattacttcattaaatccacatgcagaatcagaaggtgctcctgactgcaccctttgggtgaggaaatcaacgctccaacaggtgacataaccgcttggctgacgagcaagaggtggagagaagaaatgtagcgtgcaagagctcctggacccagcaggaacaggcgccctgcccctgcctctgcctctgggaggggctgcccatcagccaccacgaggcctgaaggacagcctgactcactgaccagtcatcggggtgtgatgggttttttaatttgaatttttactatcaatcgtttctagtttttctgttctaggacttttttttttttggacagagtcttgctctgtcatccaggctggagtgcagtggtaagatctcggctcactataacctctgcctcctgggttcaggtgattcttgtgggtcagcctcctgagtagctaagattacaggtgtgcgccaccatgcccggctaatttttttgtatttttagtagagatggggtctcatcatgctggccaggctagtcatgaactcctggcctcaggtgatccatccgccttggcctcccaaagcgctgggattataggcatgagccactctgccaggcctgttctaggactcctaaacgtgaataaaatagaagcttagatacaaaaccaaacggcttgcatggctacttcacaagaaaaggatatccaaatggcaaataaggaaacagaagttcggcctcactgttgatgaggaaagtaccaattccccagccagatactgctacacacgcatccgaacggccaaaaccagagagaattactgacaacaccggtgtcagtgaggacatggggcaagtagaaagccaccccagccacggcaatggagatggcacggccattctgcaaagctggcagctgttatgtggtcacacatgcgcgccccaggggccagcaactgccctcctactgtactgacatatacctgcacgtgcgccccaacacacatgctcgaccgtgatgagcaatactgtgcacggagctgtgcttctttgtatattctaccttcataagtttgtttaaaaataagcaaaagagtaaggtagagaggctttggtgagaaaccgaaagcgtggagagaaaggtgagctctaccccaaaatttcccaagcgcctgcagaacaaggaccgtctcctgctgaagtggagtcctcagggccttgatagacacaagcccagagcagagaagcagcaaaggtttgctgagaccaacaggatcatatggcagaacatctgcccctttctttgagagtggatggacaggtagaatcaagagaggctggaagagaaagatgccactttttattttcaggtttgctgtattaaatgaagacagaccagaagataaagtcacaacagcagttcggaccagcttcaccatccagagacacaggacgctcagtacaaacctggcagttctggtccctgccctggcggcccctggctctgtgagctctgagaagagagcagggcaaagccatagggtttcagaagtgctgcgagctgctaacgcaccctcagggcagcagacatcccaggtttaaggcctcctctgaaaggtgtccaagtaacacatgtaacttatgcttcagtgtagaatacttaaatttttaaaaattatccatatgaatgccagatcgctggcacatggaaagcacatagatggggtttcactgtggaagcaaaaaccagttacaggcacataaccttacaccagccgtcctcccgccgtcttagcaggctagccgccttcctctccctttctggtgcatgtgggcggcacctcatgatgaccctgctgtgtcccagctctgcactccactctcctgcccctgctgcacctgctgggatgcagctggcttttcatacaagtgcatctgagccttcctctcccctccctccccagctcttccccacacacaaactgtcgaggggtaacagaaggtaaattagagatgcattttctaccctgcagtcttctgacgtaactcccaccaacagcaacataaattatagcaggaaaggacgggcctagggagtcgctttggaaacaccgatggtccctaaggcctccacgtcagctagcaaaaaataaaaattccaagagctgtgaagaccaagactaaaaaaaataattgtgtgtggggggactctcttgccagtatttttggacagtgaataaaccagctgcagaagacagggagcagagccaggaatataaagtgaagggggtgagaagggggtcgtgggagcgttccaagcctgagacctacatagcagtgaatttgggacaaccttgtgaaatctctaggcagcaggcctggtgatttaaggagtgagacggggagaggacgttgttttcgtcagagcttggctctgaggccctggtcagctgcgctttgtaaccatcactaccatcagggcatcctgcagaagcaggctggaggctgcagcctggacttcataaaacacgccacatcctgcgtctctttgggaagccccggagatggctggtaatccacccacccaaggcctgtcccgcctcttcccattcacctgggctggatccatggaggcaagaaactccatagaaaactacatgggaaaaaggagcatgttgttttcattcacaacagaaaacagagctacggtgccactgcgaaagatcgaagagactaccaaggtgtaaatattataggagcaaaaaggtatcacttctcttactggggaaaaacaaggctgggttctgtgttgaagcttgttctcaaggtgatgccgagcactccagactgagatgccaccttgctggagaagggcaggcacaacaggtgacagataggcctcatgtggccgtttatagcatctgggcctcagtgaggggagatgatacaagggcatgaggtctacctggtggtctgccacttttggcctaatcgtttatgatcagctttgtgtttcagtgaaaaaatgatattagggatgtgttttggaggcactggtattgcagagagattggttttctggggcaagtgcacatccaggcaggaaggcagtcagcacattttatggagtggccgctctgctgtgggcacggaaggcagcatggtgtccaaacaggtgtggcctgtcccgggcctgcacagagctctcagctcaaaggccagtggggaggacacagtcaaaacaagtgagcaaatacataacaacaatatcagctgttgtaacacgtgtaacgtaaggaagaggtgccgagggagacttaagcagcaccccatttgaagcaggctgtcaggggcagagatctcttgagaagacatttacactaacacccaaagaaaggaaaagggtaagttaaggaaagggaagacagcactggggagggtcctggggttagaatgctgtggccgagagcacaaaggaggcttcgaggctgcagggggctgaacggtgggtcccctcggcctcaaaagatagtccactcggaacctgcaaatgagaccttatttggcaaaagggccttggcagatgtaattaagctaaggatctggagatgagaccatcctggatttgggtgggccctaaatccaatgacaagcgttcttccaagggaagaaaaggtgagaggacacacagagaagagaccacgtgaagtcagaggcagagatggaggtgatgcacctccaagccaggggaggccaagggttgccgggagccacgaaacggattcacctttggagtttcaagaaggaagcactgtgctgacaccttgattttggacttctggtttctagaactgggctccaaacgtggcctgccgctgcctcgtgtgtgacgttgggcaagttaccaaacttcaatgtgattctattttttgtttgtttgtttgttttgttttgagatggagtcccactctgtcactcaggctggagtgcagtggtgtgatcgcagctcactgcaaactgcacctcccgggtacaagcgattctcccgcctcagcctcccaagtagctgggattacaggcatgtgccaccgcacctggctaattttcgtacttttagtagagacagggtttcaccatgttggccaggctggtcttgaactcctgacctcaggtgatccacctgcctcagaatcccaaagtgctggaattacaggcatcagccactgggctcggccccctgataaagtttttttttttttctgtacaatgaagataaaaataatacctctcccatggggctgcattcaataatttcctacataaatgcctaagggaacccagtgcgtggtgcaggtctgctgcattcaccaccctcctcatgaccagacatggaggaggcagaaaggatataagaggaaactgcatggactcagtggctttggactcaagcaatgcaaggatggtggtgctatttactgagaggggagatgtgggctaggagtagaggtcccagtttagaaagggtcctgtttgaagtgtctgtgagagaacaaaggggagctggtgggactgcatcccttgtgggtaggcagggattttatctgtgtttgcttctcactgcaggcccacagctagcagagttcaggccctggcaaggtttactgaaggcttcatgttggaaaggcttcatcaggaaggggcctgcggctgggaggagtgggaatgctgcaggctctttctgttccttctgccatcgccctgccccacaggacgatgctgctggacaacagagattggacgtgaagatgcatcaatgactaacaatccgacgtgctgagacccacaaaccctcagctgtctgtgtaccgaggccctgcaaattctcccattcctcaatgataaaatacaggaaaaagcaagggagagaacagccacgactatcatggcgagggagagggaggacctgatgaagaagaagagtgaaagattttcacaactttgtgatttacagaacagcctctctcctggggccatgggacctgggggaatggggtgagaatcccaatataagaaaccccatggcaggccaggccagcgagagtacgagagtacactaatgccgctgtctgaactgggtggtgtttaggatccccccagagcaaaatgcccctgtggtatcccagagcaaccatgggtgggcagggcaggaagcagttcagatggtgacagggttcctgccaagacatgaaggcaaaaagctctggaaagccttgtctttgggctaccaatgccagggaagccctagctaatgtcatcccgagaaggcagacaacaccagttcccttcaaagaggcacctatggcatttgcatagcgttgataacgtcttattcttgcaaatgttgccctcgcctagagacaacttaaatgttgacagtctcaggacactggctccttcagacattcagaggttctgatatcctcctgctatgatgtttactgggtgtcacctgttatgagataagacacgtaacgtgccaagaagaccagtcttccactaggacccacaaactccaatcacaaacgtggagcacccatgacaaccacaatccctgccaatttctctctgcacttaacaaagccttagacagggaagggcaactggtaccatcctcgttcttctgtgagtgctaataacaagaggggctgcttattaaatacacaccaaggactttctgtgcattcccatgaattcttccaagtttcagatgaaaagacaagtaccagccgtcggcgctataagaagtcatgctggcagccaggcacagtggctcacacctgtaatcccagcactttgggaggacaaggtgggcagatcacctcaggtcaggagtttgagaccagcctgaccaacatggagaaaccccatctctactaaaattacaaaattagccgagtgtggtggtgcatggctataatcccagctactcgggaggctgaggcaggagaatcgcttgaacctgggaggtggaggctgtgatgagccgagatcgcgccattgcactacagcctgggcaacaagagcgaaactccgtctcaaaaaaaaaaaaaagttgtcatgctgggatttgaagatttgtctgtcctggctttgaagcctggctcttcccactctaccatgtccgctccctctagtgggcagaactaaggccagggaacagaagagtcgtgaggtcacatgaccattaaccaacagggtcaggcccaatgccatgactccaaacccagccctttcttcacgaggccagaggtcaaactattaacgtcaacacagagtaatgcaaaaactgcaaccacctattaatttcccaccatttagctaaacagggtttctaatcatctacccacctatgcccttaattaagaagtcattcctggattgggcatggtggctcacacctgtaatcccagcattttgggaggcagaggtgagcagatcacatgaggtcaggagttcaagaccagcctggcaacatggcgaaaccccatctctactaaaaatacaaaaagtagctgggagttgtggtgcactcctgtaatcccagctacttgcgaggctgaggcaggagaatcacttgaagcagggaggcggaggttgcagtgagccgagactgggccaccgcactccagcctgggggacagagtgaggctccatctcaaaaaaaaaaaaaaaaagtcattcctaacagactaaacacctatgtgccccgcactctgctgggtgctagagggaaatgttttaataagacataattaatacataatgccaattcttatagcattgctgggaaaatggtgctcctgtcactgaccagactaggagcataacccttcctttaatccagaggttccaacattgactgctgctggagtcacctgggaagataaaatatccaattcctgggccccacccttagtgttctgtgatttgatcagtctggggtatgacctgggcatcaggatttttaaacataagaggcatttgctaattatccatcaacaggacttaattgtggagatttctttatagtcactatttagaacttgctcgttttcaaaattgatgtgctgcaactgctgacacacaaggcataaaacagatcattaaaagaaatggtaagaaatgggaagcttcatttgacccagcaatcccattactgagtatatacccaaggattataaatcattctaccataaagacacacgcagccatatgtttattgtggcactattcacaatagcaaagacttggaaccaacccaaatgcccatcaatgatagactggataaagaaaatgtggcacatatacaccatggaatactacgcagccataaaaaaaggatgggttcatgtcctttgcagggacatggatgaagctgaaaaacatcattctcagcaaactaacacaggaacagaaaaccaaacactgtatgttctcactcagaaatgggagctgaacaatgagaacacagggacacagagagggaaacatcacacaccggggcctgtcgagggggttgaggggcaaggggagggacagcattaggagaaatacctaatgtaggtgacgagttgatgggtgcagcaaaccaccatggcacgtgtatacctatggaacaaacctgcacattctgcacatgtaccccagaacttaaagtatgaaaaaaaaaaaaaaaagaaatgggaaacttcaagaagaaaagggaaaaatctggtgatggaattatcaccatcaagcccaaaatcgatccctgagtttcgtggaacaaatgtacaaaggtgaacaggaaaggtcatggtgtcattagagtcaataaaaagaagccaaagagaaaaaaactaaatcacattttttctaacagttacaggaggacccatggcaaatattaggatgaggaagacagctgcacccagacactctgtgactcatgaaccaccaggctgctcccacatcagagacagccagtgtggaatgaccctggacttgctaaaccacgggcaggctggagggactgtcatacagctgtctccgaaaacctttccactgaggcccagggaaggaatgagggagtcagctcaccccagactctactgtatccatgttcacagaaagagcaatttaagctgagatgtcatttgacacacacgaggtccctgcaccctggaccttggctgggtttcattttccatatcttctaatgctcagcgggagacagaccctgctttgtgtgaggcagcgagagctgctgttgggaaactccaatcgtggcacgttggggtatggctggtcaggggacttacggggggttgtcacatttcctctgcctgaagcgggctcccgtcccacatgttcggctgcacatgctccaggcgccccacgggctccagtctccgtccacatgctccgggatgggcgtcttgctcacgcactcccccgcgcggcaccactgaaacacagcggggagggtcggggcccaggcactcagcagagctgctcactccagcccgccaggccccaaaatgccgtgctgccaaaaacccatttgctaaatttacataaaggtacagtctatttcagggtttgcacgtttgctaattttagagacatgccttacttactcaaactgacactcatatcgctgtagggtttggattttgccctcaactttcagatggatgtgctccatggggattttctaaatcccagaaaaaggatgaatctacgtagctcttgaagagacctgggcttctgcaaactttgtttgacgtgagtgcgtttctcgctgggaggcggcatgccccggttgaggttgtgaacctgagagttgtgtttgctgcttggcgatggcacagccagctccacgtgagggaaccttggttctttctgaggataactcaaggccagccctataaaacaatttctcaaagtgcacagcacataccctgaggtgctaggtgtgatttctgtggttcccaatcacggcatcagagcaaacctttactcctttttcaactctttcaattcttgcaataagactggagagaggtcctggggctgcagatcccgaacaccccttctctccaacacctccccatctctcctgcacatgaggaacaagctcattctctcaacatttagctagaattggataatactgttctcactgaattatttttacgagagcctactgtgtatggcaggtgatgttgtttttccatttgaaatatactggtgaaagtgttccttttaagtaaatttccttacatgatgaaaggagttaatctaacaaaaatattaagtaaatgatacttgtatcttataagaaaaaggaatgaggtgatgtaggcaccactctgtgcccggagtggcctccatgggcatttctgtgccgcctgggggatgtttcaggggctcctaagtagagtacagattgtgtgtcagaagaggtgccagttgcctgcaagatgtggagctgcctgttgggggcagtgggaagtcagaggttaccttgtctgccccacactcggtgccatccaggggagggtccagcttggtcttgcaggatgtgtctccttctaccaggcaccacagtccagcacacattagatgctgcaggacaagggaaggaaccataattgtggagaacacccacactcacaggtcacagctggggtcagaggtgtggcccaaccactgtttcaaatttgggattcgaaacgtatggggaagccagagggtcataagtctgtatgtccaaaatatcagtgcatcacttgaactggctcatttagctcaacaaaattctgtgcatctactcctaggagggcttgtctcacggagttgagttcaacagctccaacaaccaccgagggcctaggagatatcagaggcacagccctggccaggagcagcagcccctgcctcccaggagtgatgagcaaacagacatcttccatttacagcagtgaggggctgtctaggggacacagaaagaggatctaaccaaacctcatcagggagggcttgctggaagaggcaactctgaagtcaaggccagatgggtaggcaaccactgtgaggccaagaaatgacagcccaaagggccatgaaggactggtaccccgacagggttacaggggcaaccttctgttctccctgcggtcacctgtttctagctcagctgagctgtgcacaattttttatagcattttacctacagaacttccagaacatctacaaatacacaattaaaataattccactaaaacaggaattggcatttaaacacacagactcccaactgtatcattaggaaatctgggcatcgacaaagtgctcagaaggagacaatttatcaaaatcatgaaagcagacacagccagtgtcctctctgaaggaaccacatgcagacagtgacctcaaccataagagacaggagctggtaactccccacccgcccaggggacagggagatgatactgaggcaagttccacacgcctctcagagggtcctgggggggatggccccgctgccgacagcagtcacttactcaggattgcacctttcttgactgctctctccctcaccccctcacagtgcttcctgggatcacttcccagataaactacttgcacccaaatcctggcctcacagtctgaaaattgagaacagatgtacttaaagatcttgtgaagacgcagtgattccaggatgacaaacccaatcatggctaaaaggcccaagttggagcaggaagacatcaccctccagggtgtggccagggacctgctgcttcacactgagcaggatgaaggtcaaggagctcctgtagctggtgcagggtggtcaccgtgtggtttgcaaagggtgtcgagttcagtttagaggtctgctcttccaagtaatctcaaacatctgcatagaagagacgcacaactgtgctgtctaaaatcaaacagtttttagaagttgaagggataaaaataagagaaagggaaggaaggcagagctggagggagcttttaaagagagctaagaaaagcccacagctccttctcatttttcacgtatgtcggagctgatctgtgccctttaggaagtggatggctcaagtggaatactgcacatgcgcttcagaaaagcctgcatgttcccatgattgttcacccctcaaaggaatggtaaaaagatgagagccccagtgcagcacagctggtcctataaagaccaactgcacctcatcaaacatttgattccatgcactctgacctgcgagctctttgagactgtggtgtctgtgtgtggacatgtgctcacaagacaaggctgacccagggggagaatttatgggacaggagcggttgggattaggagaaatgaccactccatcaggagaaagaggaagaaggtggtgtcaactgttcgttatggattttatagacagggctttctcatgaaacttttctaaccatcaaagaaaagaagaatgaggttagacaaagatttcttaaacagaacacaaaaaggactaatgataaagtaagaaaactaatgaattacaccatattaaaattaacaactttttttttttttttgagacagagtctcgctctgtcgcccaggctggagtgcagtagcgtgatctcggctcactgcaagctccgcctcccaggttcacgccattctcctgcctcagccttccgagtagctgggaccacaggcgcccgccaccacacccggctaattttttgtatttttagtagagacggggtttcagcgtgttagccaggatggtctcaatctcctgacctcgtgatccacccgtctcagtctcccaaagtgctgggattacaggcatgagccactgcgcctggccaaaattaacaacttctgtttaccaaaaggcaactgtaagaacacaagaatatatttgcaatacataagagatttgtaatgtgtataaccaacaaagtgtttgtatccaaaacatgatttaaaacaacaaaaaactcctatagatcaattaagaaaaagacccagtagaaaaatgggcaaaagtcttgaacagacacttcataaaagagaatgtttaaatggctagtaaacatatgaaaaggtgctcaacttctttagtcatcagggaagggaaattacaaccaccattagattagataccttgacacagcagccagaatgggtagaatgaagaagatggagagcaccgctcattgggaacaatggggcacaatgggtccttttggatgctgagaatgagattttaacttggttcaacagctttggaaaactttggcagtatttgctaaagctgaagacacacacattctaatacccagcaattcgaatcctaagtatataacgcaaaaaatgtgtatgtgttcaccaaagacattgtcaagaaagttcactgaaatactacttgcattagttccatgttggaaacaacccaaatgcccatcaagagcagaacagatgaatgctggtatattagaacaatggaatactgtatgatttcatttacatacagtttaacaacaatgttgaaccacagtgttgggagtcaggatagtggctacctttgtcgtcagcttaagaaaaaagaaaacgggaatgacagcaaaggagaagttagcactgcagcgtctcatccaagcttggccaccagcactgctctctgcacccaagccaagtcctcaccattcttgtgatacattttcactactgaacagatgcggtgactacacgaatgcttgtcatcaccttgatgccttctagatcaacagcctgcattcatgtcatgcattgcaaatgacaaagtgctcaggttcctgtcatcctgagcctcatggcagccctgggaggcaggcaggagggggctttctctattttttccacttttccaaagaggaggtcaatgtttgtgaaggtcacagagtctgagctgggttagaagcacaagactcataaagaagagaactaaagtgatgtaaaagaaagggcatttgaatataaattcaagaccctcaactgaaatgatggaaggtcttattctcagattgcaaagcaaagccccaagaaaaaatggcgcaaaataatgagcccagaggcgtgtcctgataaagtcactgggtttcagagatacaccagaacactctttgggtagccagcacagataatgggaaaagagctcgggctgtgcagatgtctttgcagcagcctctctctacaggcactggagtgagtgatgctgatacagacacaaggaaaggcagaacatgtggcccaggaaatttatatcaactaaacgtttgctcaagtacttaggcaatggaaaaagatttttgaacttacaagtagttaaatcctttctggagaagttaccacaggacgacccttggccaactaagaaatgactgaagaacccatagaaaatgggccagcagtgagcactgatcaaagtattgattgaaaccaacgtaggaatgggagttagagaacagaattcatgggacggaaacccagacaaggcagaaatgacagagagaagaaccggctgggaagaaggtgcactggggtgggagctgtgggaggctgtctatatgtacatcaatgtctttatcttttctagctggggaaagagtaaaatataacagataaaatgtgaaaactgagatataagaacttccaaaggtaaaatgttaagcacaaagaaaaataacagaattgggtggtggaaggagtgaaagggtggggcttggaggtggagatgcattcatcatgctcaggaagccaggcaccctaaagagaagggtgactgatggatgaaccttctgctttcagcgaatagcagactttgtggcagacagggctgctcttccagtacacaacagctgggtaccataataaaggatagttcttatagctgagctcacccccaagtaaaggaaatattcgaggaagcaaatacaaaacccatacccagctgtctttatacatatacactactgtatagcaatgtgtgatgagcacatgcaagggtgggttccccaaagggcaggcgttggttgccaacaccaacacccaccctttcactaccaacatccaccctttcactgccaacaccaacacccaccctttcactaccaacacccaccctttcactgccaacacccaccctttcactgccaacaccaatgcccaccctttcactgccaacaccaatgcccgccctttcattccttctaccacccaattgtgctattttttctttgtggttaacattttacctttgaaagctcttatatctcagttggcactgaagttgggagaagtcatctggggctggcctatctcagatagaacaaggtcaggagatctatctgagacacccaggttaaaccagggaatctggaagggtgtttaccagttctgaaaaggctagaagcagccccttttcagaaaaaggggttctggttgaaacaaatttaagttctcctaaagagagcaatttaggatcttagaattccatggttatgtccaataaagtataaacccataatcaaacatggtaatgtgagtgatggtcagcagcaacaacaaacagaagatttaaactgtcaaggtgtttaggtaataaaattgtcagatacagaatttatagtaactatctataaagaaatagaagatgagattacataaacaagctagcagcaagatattaacactgttgaatataagaaactggaaataacatttaaaaatgaaatatataattgttgaagaaaatcaatggattttgacagccccgaatgagagaatctgtgactagaaaacagacctgaagaaattatccagaatgcagcctgcagaggaaaggcggtggggaatataaaagatgggttaagagatccgaagaaccaagtgagaaatactgatgtatgtgtctaatcagacccagaaggagagaatagaaagagttgggcagagacaatatttgagaagaaaacagctggaacagaacacatgccatgtagaataaagacattctccacttaggggcgggaggcagtgttctactatggccgcaatgatctctgtctcttaggattacaccctcgtgtgaccccctcctcttaaacacgggctcaaactactaacttgccttttaaaaaaatttaaaatgctttaatatacattttaaaaaacaagaaggacaaaaattatcagtgatttcccggtaataggggaagagactagcttgaaggcgcatggggggtattttgggcgatggacctgttttgcaaattgattggttatataactctgcatttgtcaaatttcaaagactgggcattaaaaagggcgaaacagaaaagccaacgaaaaatataagggttggctctttggggggaaactagatgaaccttttgttaaacaatacaagaaaaaggggagaaaagtacaacaaagaagaaaagaaaggagaaaatatccaaaatgtagagaaatctaaaaaaattatcaggggcgacttagctcagttttatgtacataagcctgagatgaaatgattttctaagaatgtgtaagtgagcaaagccatcgctcgggaaagactaaaagtgtatgtagactcattgacataaaagacccagaggatgtttggcaatgtccgaaggcattttttggttgtcacaaccagggggagtgcccccgagctatagggggcagaggccaaggatactgctaaagatcttctattgtacaagacagtgccctgcaacaaagaattattcagcctaagacaccaatagcgctgaggttgggaaacggctacagaaaaactcaacaaaaggaaaaacagtaagttacggtggagtatcctgccaggtaacagcttagctaggtgaccaaggctagcatcaccagtaacgagacataatgaccacatcacctctgtggtatccttcccaataacgcggaacctcaatctagtcgtgagaacacatcagacaaacccaaaggcaaactaatagactggtactcttcaaaagcgtcaaggtcatgaaagaaaaggaaaggctgaggaactgttattggaggagaccagagacatgacaactaaacgtgaaataggatcctggtatacagaaaggacattgatggaaaaactggtgaaatctaaatgtattttacctaatagtattgtaccaagcttaatttcctggttttcattatggttctacgggcatgtaagatttttttatttttgttttttatttttatttttgagatcgagcctcactctgtcacccaggctggagtgcagtggtgcaatctcagctcactgcaacctccgcctcctgggttcaagcgattctcctgcctcagcctcctaagtagctgggactacaggcatgcgccaccatgcctggctaatttttgtatttttggtagagatggggtttcaccatgttggccaggctggtctcaaacccctaacctctggtgatcctcctgccttggccccccaaagtgctgggattacaggcatgagccactgtgcctggccgtgtaagatgttaacataacaggaagttggctgaaaggcatatagtattttttgtaagttttaagagttacaattgtcttacaacaaaaagttaaaaaataacacaattttttaaaaatgacgggacaactctacactagtcctgactaactccaagacacacacacacacacagacacacacacatacatacatatatatatatatatatatccagtaaagacgtgtggaatgtatgaatgggatgaatactttcatctgtaaaccagtgcctggcaagctaagcagtcaccaagtccagacatcatagaagtgctttatcagggttgtctctttcctacccacatcaaccttgtgagacagacacttcctgttcccattttacagatgaggaaatgggtggacctgttctaacccagaacacaggctccttcccactggttacactacctctccatcagtccccaatttcctcttcccgcttcccctgcaatcatgcattctcggtgtgagtgtccatcctctcatctgcagtgagatggggcgctctgtgctcagcgacatgccgttccctccgcctgcagagttctccctggaaacactgctgggcagcacgtccctgggcttcagcgacacgtgatgcactagaacagggtggaaacacacaaagggcggctgcccaggccaaatcaggggtgggggtactaagacctcctctcccactcccgcccccggcggcagtgcttgagttgcggtggaaagtcacagtccgtgcacatggcaaggaaaatgaaacagctctctggttctagcatttgtcacctcactggctacgcttacggtttgtcaagagtcatccccagcatgttttgctgcatagttcctcgagcggctgcatgatgagccagcagcaagcatgcatccctggagcgctgtgaaaacgcgggaaggtttgagctgctcagatggcaccattgctcacgtacacgagccttcgccacttttcttcaactggtggtgtccctgtcaaggactgtgaaggtcatgttgctgttctcttgcctcatcctctctgggcatctgctgagggtttggagggcggctctaactcaaaatgatactgaatgagatgcttatataaagtctctcaaaaatgtgctgctgataacacaagccaaaagagagagaaaatcaacgctaagagctggatgaaaaagtgactcatccaaattttccacacatactactgcagtgtgaagtcttccccgggccagcatgccagccccactcctggaaggcttcctgagtcctgggagggccactccttccatgttcctgagggctacagagaccgtcacctggctggggttgggggctgccgggtgagggtggggcccaggacttcagctggcagcagggacaagaaagacaactcacaactggcatggtgtggagagctctctgaaaaggcagtctactgtaaactttcaaacacttctggaaaattaggaccatctgctgccaaagtccaacggctctgagaggctgcagatgctgggcaggaagcggagactgagacaggcaggacagctttcagcctggcatgcaagtccacgcactaccgtacagccctgagaggggcaaggccaggctccgggaccccgccagccacccattctggccaggtccaccagcattaaagggacagacctcatttagatgagcagtttcctaactaagctggatggaagaatctccagggaagctgtacggaaagacagatacctaaaacccatcttcctgaagacttttaagacagaaaatctggagtaagacacagaaacttctaacagtctctggaggactctagcaatccaccaggtttaaaaataactggcatcagaggaacaaactttgttgtcccaaggtagaattttgtcaccccaagcatctctctagccatcagatgcccatgtaaatctgcaggacgtgagaaaggagaaaagcctggagactgggattttgcccaggtagaggtactggacacgggaaagcaatccctgggggttccaggctcccagagtaccgggagggatggtgaggacagcacagggaaagatatgggaagggacaggcccatgtgatctcagctaaacagtgtttcctcctgtccctctggctccaggcgacaaggaggcacagaatggacactacctaacatttattgagtgtgtgctacatgctaagtgctttaattcagttactactaactctcatgtcttcacaatgatggataagtagagtttatattcccattttgcagatgagaagactgagacatagtgagactaggcaacctgttcaagaacagaggcagaatggggccctgggcagcctgactagagagtccttctcaggcactgtgtgatctagaaagcatctccacactgtaccaaaaggcaattaacgagaaaagagaaaggagggagtattacgtagaaacaattgtctaagaccttccaatgcctataaccagtctagatcctgtcttcctgaaatgattggctgacagctttgtgctcaataacattcttaaacagcggcataacatgcacacctcgggtccttgtgaatgctatgacatacaggcacatatatgctcgtggcaactaacaagaagagtgtacatcccttccaagcactactgtgtggcagccatgcctgggctttggagccacgatggtggaatgcattcctgggaagcagtagggaaaggggtggtggtcattaaacagcacctttcaactgaaagcctccaggaccagggtggtggtgatggggcagatgaacacctctctcatgtgagaaagcggtgggactttgtgaggcagggatctcacagtcaggacaggaccctaactgcaccccttcttgctccttctctagcagcaatacacactcttccttgcagctgacagcgcctgcattgggctttctcaccctctgcttcacctggaagaatatctgagcttaagtagcttgaaagtgttgttaaatagcaactttcttttgcagtgactttgctgacagacaggagaaacttgtaatcataaaaaagactgattgggctaattgcataaagtttatttcccctttctaacaaatatttaccatccaatgtttataactttatgtttggactttcttgaaatgctttattgaattaaaaacatcacattaccattggctaaaagaggagacagctgtatttgccaataacttttgcaacaaatgccagttgttgatgccaattttttttctagttcatatttccatagacagctttgagccttacaatactagcattctgcagacagacattcagtggtgatagtgtgggagcctccagagtcctaagaattaatatggactgtattttaatttttctcagttctccggtatgcaaatgtttgagaaaccagcaacctggttaatatttgaagcctagactgctcctaaagcaattgcagaaatgctcttccaaggttatttacccacacctttgagtagggaaatgatgtttaaattgattggtcttaaaacagctatgaattgcgagtggcagaagaacatacagagaggaccagtcagaaagaaggtccacatttaaaattccacccagcacctggtcattctgtgcttctggaggcacctgatggagccttctcagggtatgtggtgaatgcataattataaaatacataagataaccaagaaaacaattaaactggaagtgttttcaaaatataaaacattctaaatttgtaatatagtaatatatgcgtttgtcaacacataacaagatctggccctgggtctactaaccaccatcattttgaattggtgaagagtctaaacagtattttgagatgttggccacaatttacatggtataaaaatatctgtgattccgtggctgggcgtggtggctcacacctgtagtcccagcactttgggaggctgaggcgggtggatcacctgaggtcaggagtctgaccagcctggccaacatggcaaaaccctgtctctactaaaaatacaaaaattagccgggcgtggtggaaggcacctgtaatcccagcttcttgtgaggctgacgcaggagaatcgcttgaatctgggaggcggatatcgcagtgagccgagactgtgccactgctctccagcctgggtgacagagcaagactccatctcgaaaaaaaaaaaatctgtgattcctaatcacagtggcagtcacgggtatggctaagactcctgtggtttaccggcaacattcagtatggaagagaatactaacttccactagaacttgaagaaaatgaaaagtataatctctttcctatcctggttcaccaattctttgaaatctatccaaggacccgaggtgagcagtcctgctttggtacaataacacacgcgtgtcgatgagaaacgccacccccgagaccagggaggcctctccctcctgccagggaacagtgtgggctcatcttgaggcaggcaagctattttccttcagaagaggcagcagcaaaatgaaaactgcccatcactagtcatgatggtatttttctcaaaacataatctacccagtttcttttcttacttctctatatttcagaaaaataaaaagcaaatgttcaactcctcagcactggtgtggctcacagttttattcccttggcagtgtccagcctctgtcatatttcatcattttttgtctcataatatacttaaagttctagaaaattttaagataaaagatagacaaacatacacacacatcccccaaaactgctgccccattaatgctcaggtgcttttctaagctgccctcaggctctgcacacagcaacaccagtgaggggcttaccagttcttagcaacggtctttgggggagcctagggcttgggaacatgaatggtgttctcaattcctacatatgaatggggttaagagaacagagtcctccaaatttttagacttttaattgcttcacccctaaaactcctgactatgaatatttttctttcgttttacagcatctagcaagtagtagtatttttcatattaaagaaggccaacattggtttgaagaatactgctgagaattttgcatcaaagttccctctgcaataactgcaggcaccttaagatgtcacgacaccactggtgtgactgctaatgagaaaactggaccattagtactgtttttctggagatataggatggtcatggggcctgcctcacgaagacacacatctaaattgaacatgtcaagaaccctaatgtaatgagaattgtatatgtttattaatagaatggagtataaatggttaatatgcatttatgatccatcctggcatgatctgtttctaatgtgcttaatcacaggaataagcaatatatgaagacattttcttttctttcttggcatattagctaaaactctgttgttatttattggttgctttactaagttgacattctaatctttaacgcatcacattctgcctttatgtaagattattccaggccgggtacagtggctcacacctgtaatcccagcactttgggaggccaaggcagggggatcacttgaggtcaggagttcgtgaccagcctagccaacacggtggaaccccatctctactaaaaatacaaaaattagctgggtgtggtggcgcatgcctgtaatcacagctactcgggaggctgagacaggagaatcacttgaacctgggaggtggaggttgcactgagctgagatcgagctactgcactgcagcctgggcgacaagagtgaaactccatctccaaaaaaacaaaaattattccaccttgtatatagtataaaaaccgtataatagtatacagttatgtgttgcaggaagtcagggaccccaaatggagggaccggctgaagccatggcagaagaacgtggattgtgaagatttcatggacatttattagttccccaaattaatacttttataatttcttatgcctgtctttactgcaatctctaaacataaattgtgaagatttcatggacacttatcacctccccaatcaatacccttgtgatttcctatgcctgtgtttactttaatctcttaatcctgtcagctgaggaagatgtatgtcgtctcaggaccctgtgataattgtgttaactgcacaaattgtacagcatgtgtgtttgaacaaatatgaaatctgggcaccttgaaaaaagaacaggataacagcaattgttcagggaataagagagataaccttaaactctgactgccggtgagccaggcggaacagagccatatttctcttctttcaaaagcaaatgggagaagtatcgctgaattatttttcttagcaaggaacatccctgggaaagagaatacgtgcctgggggtataggtctatagatggcccccctgggtgtggttgtctcttatggtcgagactgcagaggtgaaatagaccccagtctcccatagcgctcccaggcttattaggaagaggaaattcccgcctaataaattttggtcagactggttgctctcaaaactctgtctcctgataagatgttatcaatgacagtggtgcccgaaacttcattagccattttaatttcaccccggtcctgtggtcctgtgatctcgccctgcctccacttgccttgtgatattctattaccttctgaagtacttgatgtctgtgacccacacctattcgcacactccctccccttttgaaaatccctaataaaaacttgctggttttgtggcttggggggcatcatggaacctaccgagatgtgatgtctcccctggacgcccagctttaaaaatttctctcttttgtactctgtccccttatttctcaaaccagctgatgcttaaggaaaatagaaaagaacctacgtgactatcagggcaaattccctgatagttatgcatcactcaacaatgggaatacgttctgagaaatccatcaggcagacctttcattgtgtaaacatcatagagtgcacaaacctagacggcataacctactacacacctaggctctgtggtgtagcctattgctcctaggccacaaacctgtatagcgtggtactgtactactactactacaccactgcctgctgtaggcaactgtaacacaatggtattttgtgtatctaaacatcgaaaaggtataaaaatacggtataaaaggttaaaaatggtacacctctatgaggcagttccatcataatctcacaggaccaccagcacatatgcagctgatactgactgaaacctcatgatgaggcgtatgactgtgcttccatttctccctttctggcctttgtacgaatgtcataccttttacttttatgtatgtgaaaaaccctaaactaatgtattagtttcctatggcaaatctgtattagtttcctattgctgctactacaaacttagtggcttaaaacaacacaattctcttatagttctggatgtcagaagtccaaaatcagtctcactgagctaaagccaaggtgtcaatagggctggttccttctgcgaggctgtgaggtttcctcgccttttccagcttctcatggctgttgcattccttggctcatagccccttccttgcatcactccgacttcatgcttctattgctacatctcttattactcaccctgatctcctgcctccttcttagtaaggactcttgagtacactgggccacccagataacccaagaaaatctccccatctcaagatacttagccacactggcaaagtcctttcaccatataaagtaacattcataggtgctgaggataggacataaagatctaccacaattatattcttactgtttttcataaaacacagttgtttaaatgatcaatgatcttttgaagactttgagtgtatctaaatctatcatatatttgcccacgaaattactacttccagggctcttcatttctttgtgtagatccatatttccacctagtatcattttctgcagaagatttcctttaatatttcttataatgtgggcctcttggtgatacatttttttcagttttcagaaaaactgcatttcacatgtaattttgaaagatatttttgctgggtatagaattgtaggctgacagcctttttttttttagtactttacaatgtttctctgttgtcctttcacttacactgcttctaatgagaggtgtactgtcagttttacctttatctgtatataacttatctgtttttcctctggctccttgaagattttctctttttcactactttcaaacaatttcattatattgagtatttttctagatttcttcatgtttcttgtgaattaggagatgtggatgctgcacaggtgggcaggggagggtaccagattgtcatcttaaagagggtagtcagggtaggcctcattgagaagcttatattaaaaaaaaaaaaacagaactcaaaaaaggtgacggaattagtcatgtggataactgggagaagagtggcagggaggaggaaacagccagcatgaagcaactgtgtccctggtggggtccgagaagaaaaggaaaaccagtacagctggaatagagtaagtgcaggggagcatagggcaggatgaggcccagaaggaagaaaggaggcggcacacgcctgcaccaggaaggctgcctagcagggaagaattgagggataacagcatatgtacgctctcctgccatacccaacatcaaccacaacacagtcctacaaaagcagggaaggcgcagactgttgatacagcagggcctggagccctgaagtgtggcactgtcttcacctggatttgactgatacatgtcccaggcctagggcagcatgccccaaatccttggttctcaaagggttcacagggaagcatctggtcttctgcattttcttccccaaaagagcgtgagtgtgttggatagagttcaaataatcagtatgtcagtatgttcagttctttgtcctccattttaaagtttaacttcctcgcagtttccataaacaaccttttccaccagttttaatcagtagttcacatctgttcccctggtcacctgctccgtcctgattcatcctggtcacctgctttgacctgagtcacccctggtcacctgctctgacctaagtcacctttagttccctgttcctcaccttttttcctgccaaactgctcaccacaccactctggcttataccctttctctctttgaaatagccaatcagaattagcttcgactgtgtggtccaatcctagccaaaaggggaataacacagcagtaggggctacctgagtcaggagtaagaaccccttcctctcccttgttcaggtgtgctctcaccattgctccatccatgagtcacacctcctatcttttgctgagaaaattctttcagtgctagttcttcttttcggcactgaggaataagcatttatttctaacaatcgtgacattttctccagtgtgcacagtcactgctaccccacagtcagattcctctaaagaaagtgtcactagccttgcaagcaggacaatcaccactgaccagctgaggctggtggccatgaaggggactgtcattccatcactcccctaagaaatcctttctgctagttattggagaggaaaaaacacatttattttattgctggtgaaactctcgaggcaaaagcaaacaggaaaacatattttgcagttccttgggagcccaggaataaatgttcagcttcaatgtaaaaggcacgtgggaagatctcacttgatatgcatttggattttgagcttctagggagaaaggagtcacaaagctgagggaatcattgcttgttgccctctaactgaattcctctcatgaaaatatgattctgaaggaaaataaaataccacatcccctgcctcctctctttggggtctatctttgaatgacagtagctttcctttcctccctcagtaacagatacccctgggctcgctttccagcccacccctttccagctgggtgagcctggcttgttttctaatctctcttagcttctatattctcatctgttaaaatggggttaaaagcccttgcctttggggttgcagtcagggttgtgtgtgacagtgcaaggacaaagtccagcctgggagactgtgagtccccagtacaagtgccttcctccctctgtccctcctcatccaaccgggatgcaagtgcttggctcctagaagggaaaatagctccggctctcatggagcaggcagtctctgcccagcctccaccacacttaatcctgccctgtagggccagctcagcctggcccgccacatctcactggccctgcggaggactccacagtgggcagagtgaccactctgtcccttggctcagctgggcactacccacttccccagccccagtgtctggggcccttttctctgcctgacatcctccctggtatcccaaccacacaatctcatgctgtctccacatcaagggactccctgaaacctgctctttactggcatctcggtgccatccgtgcactgcagggactgaggaggcagacagaatgcctcttggcaggcactgtgcgtgtgcataagccttaacactcaagccacacagtggctgatggtgagtttgggcaccgctgcaggatgctggggacgatcacatcctagggctcatcacatctccccatggaggtgtccttcaaccctgctgctgggggcaggaggtacaggcatccagtgggaggctgacatgggtgacagcttcccactggtctctggaggggaccctcgcaggcgtgctccccaggggaatggcagggcagaagcagcactacagtgtggataaacgtcctttggggaaacagccagtaggagacaacagcctggttttaaggagctgccctttttagcaaccccaaaggtggcaggcaatgctccaactgcaggttgtgtcccaatttcctaaactaacttatactcagacaggaagcactcaagaggcagcatctgtctccaggagtctgggctaatgggcattgggaccgcattctggaggcagcctgcatgtgcctgtgtgctttggtgctgctcccgagtgcttgctccaggaacctgcccagccatccacacatcctccttgggaccaggtgtgcttctgagtgccagtgctggaatagccctccctcaggctgaccacctgctgcctggctgctgagttccacatacccctggctggttcccctacttctgccctccttctccacaggatggtgcaggttctgctcccctagccccgtcactgccagggccaggtggaccacaggctcctggccttcccctgtggccagggccttccctgtctgctacacagatggccacaggcatggagactgccctgccctgggtacccacatgcccctcttggcacccctcacccataaaaccagccaagtcacagaccttgctgtttgcatcatggtgaaaacgtgtgcaatcaggggtgaatgagacttgagttcaaatcctcgctctactacctactaacaaagcctttttcaatgtttgcttactttgacttggtgttgtcatctgtaaaccagggacaggatctcgggagccatggtgaagactaattgggatcacacatgttggaagcgttagtaccaaacacttaggcattgctcaacaagcggtaactgtttaatggggttattatcatataatcaatttattacttgttaaattttcccaatttgatacgctcaaatgtttaatagttttaaccctcttgttgatccatgcagtgtttgaagtcaggcgacagtgtcctgcgtctctagtgtcctcaggtttccatattaaaatgttaggctaccagagtcagtagtaaccctgaaggattcccctgcaaaagtgcccgtgtgggggactgtgtgtagatgtgtgcctgcaactgcatgtgtaggtgtgtatgtgtgtatggctatatggggtacacatgtgcaaatgcctgtgagagtgtgtttatgcatgtctctgtatgcaaacgtgtgtgtgcatatacatgtatacctgtgcttgtgtgtgtatgtgcctgtgctgagtgtgaatgcccatgtcctccagcagaagccagacctgctgtgggagggctggatccatgctctgtcccgagccagccctcccacggctgcttacctccatgtttctgcagaaggtggcattcatgccaaacaggatctggcactgctcgttggcactgtagtgcatgcccggcagcttgtgcgggaggcgtactgtgtgctggcttctggggtccgtgactagcaagcaggtgctgacttttgacctgaaacagccgagaggcaagttgacttgcaaatgtactgcctaggtttttttgttttctttttctttttttttttgagttttcagtcactgagaagagggcacctccacgttccttatggaaaaaggacgcaggcactggacacacagactgcgcttttttgctgtgcattcctctttttctacatggccaaatgtgaatcttcgctctgaaggtagtaagaacctggagactcgggaggggcataggaacgacatccacaaggctgatggacttttactggggagtctgaaagctttctttgatgaaaatgattttggaagagattatcgtattttcttagactatggctttgagcaaaaactatcatgaataaagaacaagtacaagttagacttgctttactttaaataaaatcaaagtgcttatttccaactcttcaggttcttttcgagtgcttgtgggacctcggtgtctcacttgaccacgctatccctgaaagccactggcaacactcgccgaggacttcaggatttcaactggggtgggagcattcattcacagtgagaggcgcgtctctaaaagagtgaactgggggccgggctcgggggctcacaccagtaatcccagcactttgggaggctgaggtgggtggatcacttgaggtcaggagttcaagaccagtctggccaacatggggaaactcctgtctctactaaaaacacacaaattagccaggcatggttgtagtcccacctgtagtcccagctaattggaaggctgaagcaggagaattacttgaactcaggaggctgaggttgcagtgagccaagatagcgccactgcactccagcctgggtgagagagtgagactctgactcataaataactaaatgaataagtgaactggggattgcgaggctctggctctaaaggaggttacttactacaatgcttttatttctcaatttctaaaggcagatggtttaaggcagaaaacccagtcacttgccaagattcttaaggaaagagttgcatgaacacaagacacagactgatcctggtttacttctgggctcacacacactacttgtcaccagtgctgtgtacatgagcaaataaaaacacctgatcttggccgggcgcggtagctcacacctgtaatcccagcactttgggaggccgaggcaggcagatcacctcggatcaggagttcgaggccagcctggccaacatggcgaaaccccatctctactaaaaatacaaaaattatccgggtgtggtggcacgtgccggtaatcccagctactggggaggctgaggcaggagaattgcttgaacctgggagacagaggttgtggtgagccaagatcgcaccactgcactccagcctgggagacagagtgagactccatctcaagaaacaaacaaacaaacccaacccatctcgtggccatgacccttctgggtgaagtgaaataacatcaaggggcttacagcatttcctaagatctgtggtatcaaatactcagtgggaagtagactacattaaaagtaatgagtgcattgttaagctggtttaccactgaacaatttccccatgaacaaggaacgtcatgaaaaaagacccaggatggcacctttgccactacatcctgaattcgtcgggtacttgaatgtgctactggactgagaagctccatctgcaggtgagactcgccgactcactgctgtctcccagggtgcatgaattcacacggctaagtagctcagtgaccagggcctgcacagtcactctgtaaacccaaccctgaggtcttgacactaagggacagggaccggcaccgtccacaggtacagactgtgacaaaggtctgaaatcagatggcagattcttccacagaaatctgagaatggaagggtgcagacaccttctgggaagaaagtagcagtgagataaacacagccctcccctccccagaggtgaggaagctgagcaaacccacccctcatcccccagcaaattcactccctctctaggcaagcggccttcatctccacaccaggaaatgctccattccgcagcggcccaggggcgccccaaggtgaccacacggtcacaacactgcagaggaatgaaatgggtttcttttcaagacagggtgactatgttgacatttgagtcgatcggcaattacgtaatgatcacccactgtgcgcccatcgctggagcagatgcgcatgtgggagatgtccttgccattataggacactctgcgctgaccgcctcctgaggctagatgcaaatcccaaaagagagtcatttctccacttcacacttgctgagactccaatacttttgtcttttggaagtacttttgattgcattcatcctatagaataattccaggacttacttgaggaagttttcaaggtcatctcggctgcaggaggaccaagagaggtcacttgggttccggcctttcacccactctcctgacatgatgtgggacctgccagcgcaagatgagtggtcatcgtcgtggttcatgcccaagctgtccaagaaggaggagagagggatgcttatgctacaagcttctcatttccagttcctggtgctagcggaccatgctaaggtaaatcaagtcttaaaaacaaaaacggacgtaacgtgaaagtggttctcacacagcagacccacagtcatgtgttttcacagaaatagagggtgaggatttgcttagtgaatgaagataaattgagcaaatgacagacactaatagcattcactaaataacaataaatcaacaaagtatattaactctgataattaactgtgacatgataattcttaaactttaagcttctgatggctagacttgttttcttacattaaatattccaatgttcatggttttggtgtttctgttccttagagataatcactgtgctaacgggaatcactgggtaccatcctagaccttgacttacagaatgatctgaatctaagccttccaactcattacagagtatggcttttctatctttcacatctaacaagatcacacctgtcaccttccctattcagctatacctgagacataccaggatgcctgtctaggcctggagggctcatcacactgtgagctgaacagtgatcttagcttatacacttgccctcactggggtgagccaagacatgcagcacgcaagatccagttgcccagtttgctgacccagagttcttatgccccaacgtgtataaggatgaccatctttcaacaatctcagtggaacaacgacaacaaaaaagaacatgtactttcattcattcaaaaatattagacactttccaagtgccaggtaacggaccacaaggaaaagacctcaaatcactgccagcttgggagaagagatgaacactgacacagataatgataaaagaggtttctaaactctgctctagagccatgttttcctagtttgctcatagatatctgaccatcttccgtcagcaaccctgcttgttgcctaatggtggtgtctccccaaaagaaacccatcctgtcttctctgcatgcctgcaggccacccccacacccttttgcctacagagatgctcccttggccaactcccacgtggagttggatcagctaaagtcacccatgtcctttggaggatccgctgcctggcgctcatgtgttctggaactttgggctagcggggccctctctgatcacccacatgtgacttcccccgtcagtggagggggggcatccttaccaatcttccattgtatttattcttaaacctactgatgtcagtgacacttgttatttcaattcatacatgtggctacatgttgggttaaccaacgaaatatggggacaaacaccaagttgttgttctcatgaaaacagatttagccagtagctaagatagactgctgtccaactgggtgtgggcaagacaactgtgaaagatgaataaatcataaaaatctgctccaaggctgcttcacaagtcttttacaatcctttttatgtgtatacaaacacacacacacacatgcacatataaaagaaactagattcaaactcttattataggcatgctttgtgtgaggaaagtgtattagtccattttcacactgctataaagtgtttcacacttgaaactgggcaatttttaaaggaaagaggtttaactgactcacagttctgccagggagacctcaggaaacttacaatcatggcagaaggtgaaggggaagcaaagacctacttcaaatggtggcaggggagagaagcacaagcaaggaaaatgccagatgcttacaaacccatcagatcttgtgagaactctctcactgtcacaagaacaggacagaggaaaccaccctcatgatccaatcacctcccagcgggtccctccctcgacacattggattacaattcaaaatgagatttgggtggggacacagccaaaccatatcagaaggtgacatggaagtccaattggcagacacccgtcctcaaagaagaggctttccctctccattacaaaattgttgaaaaaaactaatgtttttatagcttaagttaaaacaaaatgtctaaggcacttacatataatgtcttgttatttctccacttgaatcaattttttgcttaattgctcaagtgaccaactagagtcatttctgaaaagggagtgtctgcatcgccacctaggtatagatggccatattttcgcgtggtctggactgctatcaacctcagaccctcctgactggaggcccacaggctcttccaactcaccctattttctcagggcagcagaaactggtgcaaagcgagcatttggtaaaaatatttattgaacgaattatctgtttaatagcaaagaaagtgccaaaaaaataccggacaactcatatccatgacaagtgtgttgatctggcgtggtggcagactgcttggcagaatggcaaaagtcacctctcgttagattcagtctcgtcctcatgcctcagtgtcaggtatctatccaattagggttaaaggaagactgaagaaattatcagacaaatatggccagtgagaacagtttagctatattctttttttttttttttcctgagatggagtcttgctcagtcacccaggctggagtgcagtggcagaatctcggatcactgcaacctctgcctcccgcgttcaagctattctcctgcctcagcctcccgaatagctgggactagaggcacgcgccagcacgcctggctaatttttgtatttttagtagagacagggtttcaccatgttggccaggatggtctcaacctcttgaccttgtgatccgcccgcctcggcctcccaaagtgctgggattacaggcgtcagccactgcttaatggtcactttgttgaataaagtgagttctattttttcaatgcaattactcagctttttactttacttttgggtgagcaacagaaaatgtttacttatacacaagtgcatgagaaagcaatctccattcagctttaaaaaaatcctgttacaaataaaaaagattttaaaaatatattcatccttggcaccaaaaaaattctttttactttcactctcagtatgaattctttttttgaggttcattttctttaactgtatttcacagtggtaaaaacacttcacatgagagctgccctctgaagtttttaagcttacaatacagtattgcggactacaattgcaatgctgttcagcagctctcctgagctccactgaaactcgatgcttactgacgagcagctcccccttcctcctccctccagcccctggcaatacaagcccactctttgattctatgaatttgactatcttagatgccttatgtaagtggaatcctgcagtatttttccttctgcaactagcttatttcatttagcataaagtaacggattaagttttaaaatatatatgaagctcctacaactcaatagcaaaaaaactaacaacccagttaaaaatgggctaaagacttgagaagacgtttctctaaagaagacatacaaatggccagcaggcacgtgaaaagatgcccaacgtcactaatcatcagagaaacacaaatcaaaaccctgatgagataccaccttacacctctcatgatgtttactatgaaaatacaaaacatgacaaatgtctgtgagaatgcagagaaattaaaacccctgcatggcgttggtaagaatgcaaaatggtatagatgctatgaaaaaaacagtatggaggttcctcaaaaaattaaaaataaaactactgcatgatccaacaattctatttcaaaatatttacgcaaaaaaattgaaaccagaatctccaagagacatcactcccacgttcagttacagcattattcacaatagccaagatatgaacccaacctaaacagccactgatagatggatcaataaaatgtagtctatacatacaatgaaatattattcagtcttaaaaaaagaaattctgcgatatgcaacaacatgggtgaaccttaaggactttatgttaggtgaaatcagctttttattttcttctacctggtagctttttctttctctatttcatgttaactgttaaaggaactgactggtttttcaagtatgcttagcaaaggacattaaaagtcaactatcttaaatttgacttagggtttgattttctttctttaaataaaactggtgagagagtttttaaatgagcaggtcttctgaaagttttgatggatttcaatgaactccgccaaatgtacagaggttatagaaataaaatgtctcatgaaaaaagtggctccagctgccacctcatggtgtaaccattgcatgtggaccaggtcaaattgctatctccagccttggcaggcatggtcttaatcagcattaacaatgtctcttcataagggtcacaactcacagaccctggagtcctagtctgagtcacagactagagtctctacttggaacatgatcttgcacttggaagcaacgaggcaaatgcaaggccttcattgtatcaacgatgtgaaacattcaggaatgtaagcctaagagaaaggaacgttttgcctctttaagaacatgcatagtttcaggaagccacagggtctggaaccatgagctgcgttctggggaaaatcatctgggaacttacacagaggttgcacttgcctgggtcactgcccctcaaataccccactcagaaaacccgtttctcctggaatggccccccagtaaagagggtctcatcagctgcagtgtcaaacgttacaaaatttgcacattcaccaaatggatacagcattatcttactttgagaaatattcaagtcccttaagaaaacaactctccctgtaggcattctctaaaacctctttccctaccttggccaggatcagaggcatctcccacctcaggtaatgagaacttttcaaacctggggcacaagtcgatggaggatcaacacatgaattaagtattctaaccgtgcacttggacaagctgctcccattctccctggctgggatctcctgggcagctaccagaagggtttttcaaacatggatgttgcttggaaaaccacaatgggaggagactcaagccctgggaggatggtctcctcatttatggaagaaaatttcatgagctttctcagtagacaacttggttatcaaatgaaaggggctccttcttcccacagggcctcttctcctggccagagaacctggtgattgaggagacacacaggatggttacaaaagcgcttggaaaagatggctgtgctgttggcaactccatattcctcacagggatgtggccaaccgaagcacaccacgtccagtgagcgtttcactctgccggccgagaggacttccccaaggaatgttccagtcagcaaaatcagccgagtgggattcttgggtttctggagtttgtctctaatatagatcacgcttgatctcctttaaaatgtttacatgccaagcggctcatcactttacagtttgattaaccagcattagaccgggaggagccttgatacttgaggctgacatcaactactgtctaggctatttttagtttaaattaaagattactttgactgagaaactcatattagtttaagtttatgtcccagggcatttattatttctggcaacattatatttaacgaaaacgtgtggcattaagtatgcccagtaattttaactttcagtgactgtggggctgagggcacagatgggccttgtgtctcacgtggcccagctttatcagacacagtcataacttcatggccttgacttgattttatcttaaaataacatgctgctctgtatttgttttgggagacacaaagcacaccgtgcggcgagttctgagaggattcccacagcactcgacccctcctggcttccgaatctcgcaggacatgagtaggtgttctagacggaacctctgccactctggaagcttcagctttacctggctctgaccgtacctgtctctcagaagctttgggattttgatgtcaggtgtaggcgtcaggtccggcctcacctcaaagtagtcttggctgagtctgtggaatgaatccccggagtgggatgaagagcttgggctcccgtgaacacagcctctccatggaaggctgactccagccctactttcatagccctgtggggatactgcctggcaattcctattcaatagatgcttattgactttgcagtaactggaatggcccatggcagtttctaagaaatagtgggcagatgtgtatttgttattgctaatcaacataacaataattaacaggccagctctgcaccagaggggaaattctccagtcagtacttcttgccaaggaccagattgtgcccccagtcttgagctactcagaaatgctacctacaagattaaatgccactaggggataacaggctgcactcatttacaggtagaagaacagggtcaatttccatgatcatcaataaccccctttacggagaacaaaacaaataggcagcaatagcatcaaaagcctctcactgcggagaaggtatttgtttgtgttttgtacagaaaaatgagcccaccagctttcagggattcagcaataaggcgaaccccagagtagactgggggtcgccatagatttagctgtacttcaaatgcacatagtaccatgtcagtaagaatcatcctaaaacagtacaaacttcggaatcaccaatggataaataatgaccaatatagtgttggtgttcagtgtatttttctagaatagacaacatcatagcaggtaaatatggataacactcatacaatacacacagcctctctaagctaaccagaggactgaagtgacaagcaagtactcaattcttgaatctatatacatgggattttgatgtaaggtgcatgagtcaggtacagccttcagtcaaagtagccttgcctgggtttgtgtagacatatatacgtacatgtaagtgtaggtatatacctgtcctatatacctatatataactatatagttatatatatgttatatatataactatctatatgtgtatatatgtgtatatataactatatagttatatatacacatatagttatatatatgcacatatacacattatatgtgtatatatatgcacatatacacattatatgtgtatatatatgcacatatacacattatatgtgtatatatatgcacatatacacattatatgtgtatatatatgcacatatacacattatatgtgtatatatatgcacatatacacattatatgtgtatatatatgcacatatacacattatatgtgtatatatatgcacatatacacattatatgtgtatatatatgcacatatacacattatatgtgtatatatatgcacatatacacattatatataggcacatatacacatatatatacatatgcacatatacacagtatatatgcacacatacacattatatatatgtgtataactatatatagttatatatctgtgtatatatataactatatgtatatatatgtgtatatagaactatatatgtatatgtgtatatatataactatatatgtatatatttgtgtatatatataactatatatgtatatatatgtgtatatataactatatatgtatatatgtgtatatataactatatatgtatatatatgtgtatatataactatatatgtatatatatgtgtatacatataactatatagttctatatagttctctataggtatataggacaggtatatacctacacttacacgtacgtacatatatacacacatacatctccatacatttacaagattcacatcaagtaggcttttaacttttaccaaaaattcaacttattgagacagataaagagagacagagagaatgaagcacgggagattctgtcccctattccagtcagcaagcgtgtgtttgcttgtgcacactgacaccctgagagtgtgtgagataaagccatgtatccacccttctcttggggtttcttgctgcaagcaccaccccatgctgagggtgactctggtgcttcatgatccacatttttttttatacaacatgggcaggaggtgtggagtcttaatatttgaaatctaaattttataattttaattaatagacagggtctcactctatcacccaagctggagtgcagtggcatgatcacagttcactgcagcctcaaactcctggcctcaagtgatcctcctgtctcagcttcccaagtagctgggattacaggtgcacgccaccacgcttggctagtgaagtttaaattctatctgatgctctaagaaatggctgctgtttccaacagtggcaggaaatctgggtatgaaggatgtagacagacacagttgaatatggtagctcctaggaagttttcaaagatcatttggaccattctattttcacctttcacccttactttagactctcgctctgtcaaggtgcagtgcactgggccactaccactttgtctgagcatttcacttattttaccagtgtgtcttcacagcctccagatgtaacagggatagaagcggccatcatctcccctattcttgctgagcacctttgaaggctgtaagagtagagtgatttgctcaagtcatgcagaagagcagaatctgcactcctagctggccttctttctctgaaaccatctttcccagacaagttaacagtatcaggcaccaggcgctagctgcttagtctcccgtattcagcacaccctcctccacccctgcactccagggacacgtgcatacacagtggccagctcaaagtcccagccagcctccaatgtcctgatggctttgatgagaaggtgtcagcagccagggaggatgatacaaagtactccttcccatctagaagcatccctggctttgcagtcagaccaacctagaagaaaatgtcagctctgcctcttgagaaagaaacatacctctgagccttagtttcctcatctatgactaaacagggataataatactgaatgtcattcattcattcattcaacaagtatttgttgaacgccttctgcatgccagatcctgttctaggcactgagaatacagagtttacattctctaagggaataggggtcagggtcacatgcgaaaacagccaccaaagtgcctggcagtagtaggcacagtggagaagaatggccttgcttctgctaagcacacacattcgcttgagcaaagcaagttgcagcccctcgagctgaaaactcaggtgctctcagagagctgtggcctaaggagggaagtcatactataaggcaggtggactggcggggaaaggaaaagttcccaccccacttcaacgcctttattcccgttctttctctgcaatgagctaagagaacaacacgtctgttctagcagatgtggtttagggactgtggtaagactcctggagtaaagcttaagtcttagaggcccactgttcttggtaagtggctacccccatccaggactgcagatgccctcaggacacctctgaaggacaatcactaatgaccactcatctataccatgtgttgctctccataggaaggggatgaagatggtggcctagggcacagcctcccattctttttggctcccaacagtagatctaggtttgaatgcggcaggtcacactcctccttgcttcagagtgtatgcagtagcctggacttggtaaaagctcaagggacattggactatagggctgaagctcctgccatctctgtgaaatgctgttttctggtcctaatagattccatgggctcaccagctcctgccactctgatcttgctcccacttgacaaagacagtccttagggagtgagctggtctcacctttctccactccatcagctctcagagcacagctggacacaggactgggatcaatcaatggcttgacatgaaagcagcatatgagcacctaggtctatgtaatgcaccatcagcacataggacagaggatacccacagcgtgcctccccccaatgcctcctgggcatgccatggcttcatgataggatggtcccaatatgaacacgcaatgacacaggctcccaaatgagtggcacctgcttgggaggctcccattctccttcccacaatgtcctcactgcttagagcatccaaaaatgcatctagagccaatgcaggcaaacggccttatgacttgaatagactctgagttaaagatttgaaatatttcacagaaaagaaacccatgaagttatgttagtttctgacctgagaaaccattctactgtgaggggctgtgctaaagctgattccagttagaaattgtgaagatgtttagaatgatgccataatgatggaataagaatatagcctccccaggtgatatgagggaacaaagccagttcaggtgaaaaggctgtaggatgttaagaagaacctctgccccccctcaggacaaatagagggagtagaagcaatgaaccaattctttttcctttctctcttttttgtttttttttccagaatggccttgggtattttgagaattttattcttccctatgattttagcttgtcaaattctataaaaagtcattctaatttgagattgcactgaatacactgattactttggggagaaatcacatcattagaagtttgagtcttgccatcttaggacatagggcacctcttcattttgccaggctttttttgaatgaccttggcaaatgtttttagtttgcatcatgacggtcttacatttcctattagcatcattcttgggtatttcatatctttggttgaaaccgtgaataagatctgctttttattctattgtaatgattgcttgtacttaggaaaactacagattgctgcatgttggtcttatgatacaataccatgatgaacatctactgcttccaatggcttttcagatgattcttttacaatatacaggcaattctcattttgcttcatccttttctatattccttatttcttgccttatgaaattgaacaggacttctaaaataatattaaatatcagttacaacatgggcacctttgccctgttcccatatcgactggaaatgctactaatgtttgcacactgaatacatttgctccagattactcataggtaggtaaccctgatgaggttaaggaaggtttcttgtaaataatcatttgtaaagccttccttgctgctacagtgcaatagtccaaggagaaagagatcatggttaaagacctgacaataattattatggggatgttaagcaaggttcctaaactcctgggcttgttttcctagctgagagatgaggggcatgaaccaggtggctattcaaaggtttccaatctagaagggaataacttcatgattcttgatctagaaggctgggcacaatttaaggcgtagttgttcttcattctttcaagagtagattttgcaccatcttgcaccaggcattttgcagagcaccaggcccatagcagtgagtgacacacagcctctgcaggaagcccatggcctggtggggatcacagagaaatcagcaggctattggtatgtagcctaggccagtgctgttcaataaaactttctgcgatgacgggaaagtctctatgtgggctgcctgatattgtggccactggccacgtgtggctactaagagtttgaaatgtgctagtgtgaccgaggaactaatttttaattaagagaaatttaaataggcacaagtgactaactgctagcacccagaccacacaagcctaagtgagaacctgattggctaacttgaggtgggagccctggatatcacctcattggatatcatcatagcatatctttgcccacaaattactcacagatacttggagaaataacccaatctcataacacagctggagaacaattagtggccaggtgtagacatcaggagctgaaagcgtgggcattcagaaaagggagccctttgcctgttatcacgtactgactcttcacgtgatcttaatttacacccagtttaccctcccagatggtcgtgcggatgccgtcatccgtgaaaaccctcccaattccagggctgctgtggatttcttagacttgaagagtcagaaccaaaagctctttgcatccaagtgaaggagaaaccaccgggctgcactgtgtgctgtggacagtgacaggatgctggagagcaaatgtgacctcaagcaggaagggggacccccgaggcaccttcctatggatggcatgcagtgtaattaaacctgggatcttctcagtttctaatgaatttagtcaaagaatgtgctttcatctgctacaaaagcgcgtatggcgaaattcaatgcggcagagcaagggagataattatgggaaaaggtcttgtgaggctctccttaggtttttagaggacgataatttatgcagaaaacctaatttttacttaggaagacaaatttatgaaagcactgagctcttttgaaactacccatgcacgtgatgaatgtcacagggcccgagctgctctcccttctggggcctgctctggcccaggacacagaaatgctcctggcaaaaaaacccagatgacctgccagaaagtggcgaagccgtgtaaacctcccactctaaacaccgcaggacgaacaaggcgggtacgtgttggctttctgggactcctgttcccccttcaagtctgcggcgggccttcctcaggccccactgtatctgttagaggcaggtgtgcagacagggagggctccgaggatgcagctcatggctccattcacctctcctggtctgccaagggtgcactgcgaatgacgggaggaaccacctcctggattttggtttcagggtggctctatcagaagaccacgtgcacggcttattaagcaagaacacagcagagctgaagagtacaaagtgcttctctttagagaaatgtactcccaaggctctgccaaggaaagactgctggagcagagcgctgtcagttatcatggaactttgttgaaggaaacagggcgatttggtgagaataagaatatgctttctgcttctgagcctagagagtaattcatctaatggtgctgcagacacagggctgggacagggcaggaaatggaaagatggctaaaagctcctgaagatgaaaaccccaggctaacagtcaaccctccaggtgtcgaggaggaacttgctgctaacagtgcgtagcaaaaatcatgtgtacgtggagagcaattcctcagttttagggaagtctacagccactccaagtcttcagtatctgtttcttgcggagtgctacaaggcaagcacatcagaaggtcaaggcaaatctccccactcaatgcatcctctggggtctgcaaccccaagctctgcgggttgggggatgtgattctttcccttcccatccccagccccgcaacaatgtcctgcacccaggctgtctgctcctaccctcccgttgatgtccctgattcagaggaccctccccttgccccccaggtgctttgtattttaacatcatctgccttagcacattccccggaggggcgactataatggcagatgtgttgggcatcgtggtggccagcgcggtggtggtgggggcaggcacggtaaaactgacggtgtatcaccactgtgggctgtgttcatcatattcccttagaggtggggattcatacactcctggtctgtgaaggttgctactcattcaggtcagagcctcgggaagcccaaggcattcagagaacctgaacagataccctaaatttcttccattcatgctcttatccatccaccagcacagcttccactgcccaacacatgccaggtatgacgctaagcacttgtgtgtgcacatggaacatgcccctgaggtacaggcaaaggtggagccacccctcaacacagatgctaaatgggatgctgagagtgggaacaatattgacagagcagagaaaggaaaatactctacaaggggcactcatgcccaccaagtggggagtacctgggaaagagaactgttttcaatgtgaaaatcactactcattacatatatcatctcatgaattattattattccacttcacagatgagggaactgaggccaggagaagttgggaagcttgcctgaggtaactggccaagcacagcttgagcccgggcagcccatgcattgaacctccatacacggtgcagtcactgaggatgcaattgcccccacactcaatcgagagcaaagaaccggcacctgctaagctgtgcggaagtggccacgtggaggctgggagccctcaggtactgtgaactgcatgctcgaaaccagcaggaaaatccctcttggggttagaggtggaaagccgggggcatctggtcacggggcactgggactcgcctgcaacacagcgtggatgtggctttggggagaacaggtgttgagaagcagctaaaatcttggaccagcttgaagcaatgacacctctgttctccggggccactcccgggggcactcagtgttccagggcattcaggaggcggggttcagggttggttcccttcttcccggacacctcctagtctcttatcataagtacaggtccgagacattacctgtgcctaccctctgactttcccacatacacccgaggctagaagaggaagcgtgatgtgactggcaccatgagatgttacgtgggcaccaagtccacatgggcttgggaacgatggcggggggcatggggtgggggtagagaactttgaattctttgtgacattcatccgtcctccccttttagttaccttaaacttttgtacattaaaaacatattgccaggagactgctgcagaatggtaactcctttcacagttgagatacaggccttaaagagctgcagggtttgagacttaaagggaccttgtagctccctcatctgaacctatgtggaaactgaagtccagagagaagcaacctgcccacggcctcacagccagccgcggaaagtccctcagcacgcagggactcctaaatgctgggctgaaatcagccttctggcctacctcaaagtttctacctttgcataatccagccacagaaacttgaaaagatacatcaaattgggaaccattgaaagtcccttcgcggatttcaagatgaaatttggtttgttctggtaaacctcacagtcagctctcaaaacaacatcttttaaaagtgtttattcagaggaaatgctctaggtcaattggttttctatcagcctgtttttctcccacaaagaaacaaaagaacagcaagtacttttgtttcccttttaaactgcttatatccctgcactagacaagatttttccaattccacctacacttagcaacttggattccttggaagctgagattgaataagctttctactgacaattttgactggcagatttctcagggagggtttacctcagccaatagcaggagaaggcctggctggtggcacccgttactttattgagtcactaaaataagtacatggtagaaattcaaaggctatcaagggttgtgagatgaaaattgagcccatcccccacaccagcttcctaggtgcctgctgccccccttaggggcagcctctgtcactggttctcctaggggaagccattttaatgggcagtaggaaccagcccccagcacttcctatacccttcaaaggccagttggaggaggggattagcccacctgcaggaggggctgcagttgagagagcctgctgcctccaaagttcaaagacctcccagggatgtccgatgggacagatgctctgggcagcagacagtgcaaggacagactgcttcctgctcctaatggccttacccccttccttccttccttctttaagacccaaatgccatgaggggctttatggcctcattatttggacggctgcctttccaccctgcccaggaggctggggtgggagcaggggcaggagtgcatcctcctccatcccacctcgcagggctatgaaatgcatgtcacaggttaggggggcctgagggagctgtcactcaagtgacacaaaccctgacccctgcacgctcccacaacatccctgtaccccagtgcctttgctcatgcctttgcccccatctggatgccactgtcctctggcgggcccagcttgcaggtcccatccttcctgcagcagccccagtcctcgccagcagacagcatccctccagctgagctcctgagcaccccagtggcctttcaaggtctttggagaacccccaaaagcaggactggtcatgtttctctacacctcaatggcccagaacctcccggcagcctggctcagtgctcaccacatggaaggggctggtaaatgttcataaatgaatggaaccaacggacccaacaaaataaaaacagcttctctgctgctaagaacttcttttaaaaggtcttaaccccgtggaactatggcctctctgcctgtgttacttaagtggctgggagtgcctgagagcacccagtcagcacagaatccccttatcatccctctctgaaaagcacataagaaatcagaggcaagcagacccacttcccccagcaacaatgtagacactaatcccttccaggctctcagaccattcatgttctgcctgaggtaacttaacactagggagacaggacagaatttcagaggcaaagtctagaaccttaataccaggaaggatccagctcaatttccgcaaagcattggttcccaagtgtggctgcacagtggaatcccctggagaatactagaaaacactggtgcctggctccctcaatcacaggctctgatttcattgggatgaggcatgacctgggcatgtggatttttttagaggttccaggtgattctcatgtctattgttggatgcagtgaattctaaatttttcttcaaagaatcagtacgttaatatgttcagttctttgtcctccattttaaagtttaacttcctcatagtttcagtaaacaaaattttccaccagttttaatcagtagttcacatctgttcccctggtcacctgccccatcctgactcatcctggtcacctgctccatcctgactcacctctggtcacctcctctgtcctgattcatcccagtcacctgctctgacctaagtcacctttagttacctgttcctaaccatccttcccaccaaactattcaccccaccactctggcttagacccctgctctctttaaaatagccaatcggaattagcttagactgtgcggtcccaccctagccaatacgggaacaacacagcagtaggggctacctgcattaggaataagatcccgcacccctcccttgttctggtgtgctctcaccattgttccaactgcgaggagcaccctttctgcagacagtaaatttgccttgctgagaaaactttttgtctgaatgctaatttttccttgaggtaccgaggaacaagtatttctaacaaaggaacaagcattctgtttccaacatctatcaaagtttgagagccattgctgcagtgtagaagagtgcttctcaaacttctgtgcacattagaatctcctggaaggcttgggaaaactaagcccaagcggtctaaggggtggggtggggagatggatgaggattttcacacttctatttagttccaagtgacgctgatgctgctggtccacaactggtgaggaactcttgcactattttaacccagtactccatttttctaagatagtttaattattttttttcttttcttttctctttcctcttttcccccactccctacttagctttttagaaatgcaattacagtcttttacctcctcttcaccagacactccctacagggcaagttcatctatgtgcttagaagctccagagcagaactctcatccaccaggaggttgccttgagagagaacagtcgatttacaacccaaagtatgcctgctagagtttctggacaccctcacaaactatttctgcccatgaggaccccaagtcaaccacctggtagacaaggcaccaagatagcttgccaacccccacctgctcacttacctcctctcctgccttttaaaagtgctcactttctgctccaaaagggaagcaatacccttaaggcaggaagcctgtccttcctccactaagctgaactttggaataaaaagtcgctttctttatgccagacctctctcttattcactggactctgcaagtggcaagctactgagcctatgtctcgattacactgtaagcatcccactgtggctattactgctggctgcatgtgagcatcacttgggaaacttttaacacaccaatatctgcggcccacctcagaccaaacaccaatatcaggggcccacctcagaccaagtaaaccaggctctttggagtacaggccaggcatctgaattttacagggactcccaggtgagtctagtgtaccactgaggccaaacatcaccactagaaacaggctgtctgtgaatagctcaggcaggaccagagccgcagctttctcctactctgagctgagatccaccttcacacatcttccaggcacagtcccctacctgccttactggaaaacacagatcaagccccctctttacaatgtgacagagctcttggtcccatttaagcttctctcctttttcccacaaagtccagggagaagccgagttgataaccaatggcaacaattcacagacttcttagctaggcaacacaacattcaggataatcatttcttggttaaagtcaacattctcactgttatttctgctcagattcccaattttgggtgagacagaggagggcaatagtgttggcagattctggacacaactaaaatacaaggccccaatgtttcatctagatagtctgccctgacagggaatattctaaggaacaaagttcaggaactgtaatcacactgctgctaggttactaaaccctagtttgtgcgactctgtaccaagtatcctgggtattgtacagattcactgtttttctaacaccaagggctcgtttttgaaatttccatgcagtttcatctttgggagtattgttactagtatttcgtttactttttaaatatacttttgaggctcttctaaagcaatacttttttaccttaaacaaatattcacttctcctagtataaattatagcttcttgcagtaatcactgctgctcaaccggcattcatttcacaggataaaaatatattcttttggctgtcttaatgactgtgtacacaacttgtcctcaaaccctctctggattttggctcaaagcaacgttcatgttaggaggatggaatgtggtttcaagcaaggcactgaaaggattgcatgaacgacagtagatatttttactagcagcaactttgtagttgataatgggtcgttaagacaggaaaaggggctctttccacaaaatctcatctgaaatgtaaaaggaaaaggtgttccatacaaaaaagcctcccagtgtcaataaagggtggtaccagcaggttccatgcctcccagaatatgcagccctgggcagaaagcatcagggaaaagaagaagcacccaccttccagcatctcccagtcctgcccgccaactcaccctcccctcgcagcctactgcaacccagctttgaagggattcgatctcacatttggagtgaaacaagaatcagaaaaagcaagggtactcagctgttccagttcctatgcctttttaaaaaagtaactctgatattgccttttatttaaatgtctgctttcaacttgtgtttatggaagaaattagtgccaaatttggcaaccaacagagcagagactaattggtctggaacagcagctgtccaaggaacagccttctgtccttatccttggtcacccggcatggcctaaggattttccttctgcttcaggtaggaggtcggcatgatttcaccggactgaggcagtagagcgctcatgcatctacaaacgtcgtatgccccccagtcccatgttaaggccttcaagagaatcctaattctttaggaaaagaaaaccaacatttcaactcttaatgcataaagggagcctgaacagcagctgacttctaggtgaaggaatgcaccccagggcgtgatggagactctgacctcagaggtgaatttatgtggcttggtcatctgtactctttctggtccccttttgtctcttggttctcagtcctaggagaccaccagctcgttctcagccttcctcaaatctcacccttcctcaaatctcaccagtgtcaactccagcttgtggtgacctcattgtctgtgtgaacggtgcccccgagagtgcaacggagcctgcctgcttgttgcttggcaagattccacgtctttcctctcttccacaccctccagtcccaaggcagattcatcattctcaatgtcacaggcatgtaaacatttatttttggcagccaagtcttttctttttaggacataagaaataatgaaattatgaaacttggcagccgaaacaagataggggaccaacccctagaccatggcctgccccgtgatctgtcttccaggccctgctgcccaggccacaggcgcaaactccctcatgaggtggatggtaaaagaatgaggaaggtctgcatttctatgctttcagaaccaccggtcagtggccaaccactctccaatgggaaaggaggcctaacgacagcagtgaagaaagaagagtggttattactgacggtgagatgggatgatgaatgcatggtgcttcaaacagtacatggcacagaggaagggctctatcagtgctgctttaacgaggaggaggaagatgacatttatgacaactgctcacattaaggagcacaggttctcaaactaggctacgtgttggagtcgcctaaggagttaaaaaaaaatacagatgcctaaatcccacctgcagaaatcatgacttaattggtacgaagtgtgacccggacatctggattttttaaagatgctcaaggcattttatcttttctctgtatagctatggaaaggaaaaacacaggtaggttgcatgcacccttcccccagcctcccacaatggtaacattttggataactacagtatatcaaaatcaggattctgacattgggtacgatccacaaaacttgttctgattaaaccacttatacatgcgttcattcatatgtgtagagctctatgcaattatatcacgtgtgtatctttgtgtaaccaccacaatcaagaaacttaactgtatcatcaccacaagactacccttttatgaccataaccaccgtcctccctatccttcaaaccctggccaccactagtctgctctccatctcaataactgttatttcacaaatgttatataaatggaaccatgcattatgtatgcttttgaaactagctttttaaaatttggtgtaatttccttgaggttcatccacattgctgtgtgtgcccataattcattcatttttattgctaggtggtattgcatgatatgactgtaccacagattaactgctcacccattggagcacatttaggtagtttcaagttttgagctattaagaagaatagagttgttatgaatattcatgtgcaagtttttgcatgaaaatgactttccaattctctgggataaatgcacaacagtgcaattgctgggccatacgttaagttttaaaaggaacttttccagagcggctgtaccattttacgcgtgcctttctaatttcttgaagtaggaacttagcaattattcattcgcaatctttcgtcttttctaatgtaagcacttaacagctatacattccctctcagcactgctctagctatatcccacaaattttgataaaatgggttttcattttcattccgttctatgtattttttatttccaatgaagtttcttctcttatggtttatccagaaatgtgttatttaattttcaagtgttcggagattttcctgttgtctttttgttattgattttcagtttgattccattataaggtcagagaatataccttacacgatctcaattcttttaaacttgttacagtttgctttgtgcctcaggatatagtctataatgctgaatgttccatgacagcttgaaaagaatgtgtattttgctgttgttggatgaagtgttctataaatgtccgtcggatcctgttggttgatgtttggttctatatccttgctaattttctgtctaatatttttatcaattgctgagagggaggttttgaaaatagccttttaaaattgtggattcatctagctataattgtggattcatctactttttctctcaggttagtttttgtttcatgtattttgaatctctttattttggtacatatacgttaaaggttgttgtatcttttctggtgggttgacctttttatcattatacaatgtccctctttgccccagtcatcaatcttctttcctctgaagtctactttttctgatattaatatagcgattcctgtttttttcccacaatgaatgttttcatgatgtattttttcaatttttaaaattttacattcaatctacctatgtcattatgtttgaaatgagtttctttcagggagcagatagttaggtcacatttttaaatccattctgccagtgtttgtcttttagctgaagtatttttttagatcattgaaagcaattactgacatgttagggattaagtgtgccattttattatttgttttgtttcttttgtttcttttttctagacatcctgtgggttacttgaacatcaattagagtttgattttgatttattcatgattttaaaaatatcactctgtatagttctcttagtggttcttctaggtattgccatatacacacatcacagccaactggtgttgacatttcaccactctgagttaagcagagaaatgtgacatttatttagatcctcataccctccccataatgcactgccttaagtgttctgtctacatacatgaaatgttataacttatgcttcaaagctagaatatgacttaaaaagtttacgaagttaagaatactctataatatgtagttgtacttttacccattctgttgttcttttactattgttctgttgttcttttacccattctgttgttttttactattgttctgttgttcttttacccattctgttttgaaggatccatattcttctcctaccattttctttggagagcttatttcagccattctttaagggtccgtttactagcaacaaattctattagatttcctttttctgagaatgtattttttcttcattcctgaaggatagttttatttgatataggattgaaaattgagaattatttcaacacttaaaaaaaattttgtgccacttcattctggcctctatgatttcagatgagaaacctatcgtcatccaaattgctgttcctttagaggcaatacattgttcccaatttttttttcctaatttctgtgggtacatagtagctgtatgtatttatggggtgcatgagatattttgatacagacatacaatgtctaataattatatcagggcaaacggggtatcatcatctccaacaatccaagtatacttttttagttatttaaaaatgtacatttaaattataactatagccctgttgtggaaccaaatactaggtcttattcattccttctaactagtttttgtacccattaactatcttcacttccctgccagcctcctattacccgtcttagcctctggtaaccatcattctactctctatgagttcaattgttttaatttttagctccaacaaataagtagaacatgtgaagttcgtatttctgtgcctggcttattatgacctccagttccatccacgttgttgcaagtgacaggatctcattctttctactccattgtggtaagtaccatatttttttaatccattcctctgttgatgaacactttggttgcttccaaatcttggctattgtgactagtgctacaataaacatgcgagtgcagatatctctttgatatactgacttcctttcttttgggtatatacctagcagagagattgctggatcacaaaaatagttctatttttagtttattgaggaacctccaaactgttctccatagtggtggtactaatttacattcccaccagtgtatgagggttgccttttttccacaaccttgccagcatttgttattgcctgtcttttggataaaagcctttataactggggtgagatgatatctcatggtagttttgatctgcatttctctgatgatcaatgatgaacactttttcatttgtatgtcttcttttgaaaaatgtctattcagatcttttgcgcgtttttaaatcagattataagattttttcctaagagttgtttgagctccttatgtattctggttattaatctcttgtcagatgggtagtttgtaaatattttctcccattctgtggggtgtctcttcactttgctggttgttttctttgttgtgcagaagcttcttaacttgatgtgatcccatttgtccaattttcctttggctgcctgttcctgtggggtatcactcaagaaatctttgcccagaccactgtcctggagtgtctccccactgttttatcagtttcatagtttgaggtcttagatttaagtctttaatctattttggtttttgtacatcgcaagagaaagggatctagtttcagttttctgcatatggatatctagttttcccagccccacttattgaggagactgtcctttccccaacgtatgttcttggcaccttcgtcaaaaatgagttcactgtagatgtatgaatttgtttctgggttctccattctgttccattgctctgtgtatctgttttaaatgccaatacccatgccattttggttactatagctctacagtataatctgaagtcaggtaatgtgattcctccagtttcgttctttttgctcaggatagcttttgctattttgggtcttttatggttccatataaattttaggattttttttctatctctgtgaagaatgtcattgatattttgatagggattgcactgaatctgtagattgctttgggtagtatggatgttttaacagtatttattcttacaattcatgaacgctgaatatctttccattttttttgagtccccttcaatagcttgcatcagtgttttataattttcattacagagatcttttacttctttggttaagttaattcttaggtattttatttgtagctattataaatgggattacccaaggcctgctgtaaccactacctagatactgcctatgttctctcaaagtcccagggtgctacaatcagcaggtggcagagccagcaaggcttgtccttcccttcagggcggcaagttcccctaggccccaggtggatccagagacactgtccaagagccaggcactggagtcaaaaccttagaaatctacctggtggtctattctactgcagctaagctgacactcaaactagagacaaagtcctgccctctcctccctcctctttcacaggcagaggagcctcttcctgtggccaccgccaccacacaaggcccatggggagtactgccaggctaccacaaggttcacttaaggctcaagcactcttcagtttgtggtgaatgctgccagacatcggactcaccatttagggcagtggactcccctctggcccagaacagtccagaaatgctgtccagagcaaaggcctggaactggggaccccaagagcccacttggtgctccaccccactgtggccaagctggtacctaaggtgcaagacaaagtcccttttacttttccctctgcttttctcaagcagaaggagtctcttaccatagccaccacagatggaaaagtgctgggtctcacctgaagccaccacatctcagagtctaagccaaggcccatggcatactacctgggtatacctctgattattcagggctgactaggggctctttagccagcaagttatgaatgatgccaggactgggtgcttcccttcaaggcaatgggtttccttctggctaagtgtgtgtctagaattgtcatctgggagatatggcctagaacgggggccttatgaacctggctggtgccctatcttcctgtggctgagctggtattcaagatgcaagacaatgttctctttacgcttccctcttctctcctgaaggaggaggaaggagttatttttgttgctgcaagcagcatagcctggggttgggagaggggtggcacaagcactcccttagccacctcagctagtgtctaattaagttgcatgccccccaagtccactggctccaagtccaacacagcactaggacttaactagcagtttcagtccttgtggcccaaactgcctttcacgtttatttagaaccccagagcactttagcccacgaaggcgaggcctgccaaaactcaagttccaaccactgggatgggtgattcctcttctagctaggacatccatgggtgtcagctgagctcagcccggttttgctttccactgtgcattaggccatttttcacactgctacaaagaaatacccgagtctgggtaatttataaaggaaagagatttaacatgtggactcacagttgcacatggctggggagacctcaggaaacttacaatcatggccaaaggcaaaggggaagcaaggacctttttcacatggtggcaagagagagaagagcgaaggcggacgagccccttataaaatgatcagatctggtgagcactcactatcgcaagaacagcatggggaaaccacccaccaggttcctccctcaagacttggggattacgcgattacaatttgaaatgagatttgggtggggacacagatccaaaccatatcacactgtgatagggcagcattgagttaaatgcaaagtctcacactcgttgtgctatccctccgccaagcacagagattacctctctgtgctacactgtggctgctgttgaagggtgggggaagaggttgcactggcaattcaagactgtctttcctaccgacttcaatgcctccttcagtgatatgaagttaaaactaggtactgtgagtgctcacttgatttttgattcttatgaaggcacttttggtgtagatagctgttaaatttggtgttactgtggggtggtggcagggggtgacaactgatggaggcttctgttttatttggccatcttgctcctccctctggtctctggttgttttgaagagttttttctttaaggaatttagttttgatgtgccttagtgtgaatttcttagagcttatcctatttgggattcactcagcttcttgaatctgcaggcatatgtctttcacttaattgggatgttttcggactttatttcttcaaatattttttccagtgccacaatctttatcctttgcttctgggattctttttctttttctttttttttgagacagagtctcgcactgtcacccaggctggagtgcggtggcacgatctcagctcactgcaacttccacctcctgggttcaagtgattctccagcctcagcctcctgagtagctgggattacaggcatgcaccacaaaacctgactaagttttgtatttttagtaaagacggggttcttctatgttgaccaggttggtctggaagtcctgacctcaagtaatctgcctgccttggcctcccccaaagtgctgggattacaggtgtgaaccaccatgcttctgggattcctgatacaagcttatatcttccacagatccctaaggcccagctcattttttttccagtgtattttctctgttcagattgagtgaattatattcatctaagttcacggattttattccgtcatctccactctatctaaattccatccaatgagaattttgttgttgttcctatattttttcagttctataattttcattgatttatttctgtaaaatttcaatttctttgatgaaattttgtttttgtttcaagaaaatttataattaatttttggaagcattattatgatttataatcgtcgttagacaattccaacatttgtcactggtgccagctgactgatttttctcaaattgtggcttgcctagtcttagtatgactagtgattttcaactacatcctgaatactttggttattatattaggagtctcttgatcctgtttaaatatgctattgcagcaagccatcacactgtttaggtttgccaggtaggtctggcttacttttgtgggctttaattccaatgacagtttagttttcagaggccctgcaatgttatcccaatctgctttgtttttatggtatcgttgaggctcctcttcagtcgctgctggtgatatctgtgggggtgaaaggcacttccctgtgttactgggtgtcgctgagccacctcctataggggggtcagggagagagaagcttctgggtacagagacagcagggagacaaggggtttcattgctgctgctgctgctgctgggagcagatcgagctgcccaccagtgtcctggttgtggagcacaagttgagtaggcctggggtttgctgctgctgcaggtagagtagccagctcactatgtcctgtttatgaagcaggtctcaggctccccatgtggtctctgttgggctttgtctccccagtccattggccagggagagcagactgttcttgggttttatgtctaagactgtggaaagctccagactgtggaaagctccaggctgcaggcctccaggtgccccaatcggtgtatgtggggagaggaaaagaaaatccagagaattcaccatgttgtcgttctcaagccctggggcccctggccagtgagccttcttctttccatctttcattatcattttattgttgttgttgaataatctctaggatatctggttacatttagagaaggttacctttacgtttttctgaggctgtcagtgtccccattatacagacgaggacactggggcacatggagggtaaatgatgtgtggcaaagctaccttcaggaatttttctttggggaccagaccctggctacacattttggcagaacctctgagatccagaggcccagcgtaggttgtctctcctctgtgcctcctgaccaatgctgccacctgggaactccgctcctgtgtctggtctgtcaccaccttccctccgtccatcatgctgctgtggccatcaccagatcagacttcccgtagccccctgtcacagcccctctcttctgggggcccttccagagctctgggatctgtatgtggcaggtatgatagggtcctgtcccactgtggcctgggctcgccacctctcctcctcccggccccatggcttttgttaatcactcctctattacatcaggctgatgtctactcctctgtctccaaattcagacatgctcctcagtgaccattctattttcctgggccaagagcgcctgcctcctccctgaggatgcctaacatggacagtgcaatgaaagcaatctgaaagcgctacagtctgtggcagaggctatggacatagtggtcagcagtgtggacactgagaccttacttcaaatcctgattccatcacttacaagctctgggaccatggcaagttgcttaagttccctgtgcctcagtttccctacctgtagaatggagagaacgacaggaattaccccatggagtagctgggatgaattaacagacataaagccctgagaacaagctcgtagaagaaacctgtgagatctaccactgctcaacagggtacacatgtgttttaagttttgtcttactacacctgtgaacccacagtgtgcactgctcagatcctggtctcttttgccccccatgttgaccccatgtcacagaatcaagaacatgagggtctaaagtgagatcagagatcaattcaaacctcttcaaactccaaaaatctccacttcaacccctaagccagaaggcagcatctttgtgcaaactcgccagtgtgagaaaatcaacacttcccattgcttctaaagaactctaatgttaagaaccctcttccactaagttgcaacctcttttcctgtaacttgcagcacaccagttcagctctgctgtcgggggctgcgcagagatccctcatgccctggcatcctccaaagtatcccctgcacacctcgtccacataaagacactcagtccttccagccgtttccttcatcatccccttcccttgcctatgaacgtgcttctggctcctgaagtccttcttaaaacagacttcccacgctgaacacaagcctcctggtgccacttaacccctgaagggcttggcaggactaacaccgccttcttcatttccgaagatgaggctggtgttaatacagctcaagaacacactggtcgtgtgagtgcagccgacaattactccacacctacgggacggtcagtttgtttcatctcttatgccagccctaatctactggcagtggccgcctagagttgggaaggcctgtgagttgcgattcagtggagaagggaaggtcctgggatcaatgagtaacatcaatgaagtatgtgaaggaagtagggacagatatactcgctggcagtgatactgtcattaagctgcatttcctccatcctgtacattagttgatctgagacttagccgatgttaaatgccatctggaaagctgtaaggcacatggcgagtgcatggacttcaacattgacaaagggcttgaagcctggctctgccatttaccagtggagtgtcctgggcctcatcttcctctctataaaatgcaaatactactactattataggatggggtgaaaatgaaatgcaatcacgcattgctgcatttggccacttttcaaggtgaccaacaacttcatggactctgaattgccgcatacccttttccctcccatcttggcgccatctcaatgtctgatgagcatactacctatctccacagccaggtcatgactacagcagtcaaacaagcagtgattccagcgcccggggcaggcaggaagcaactctctcaggtagacattcctctactaataagcatccattgagtaaggttatccaactgttacaaactcctttaactgcagcagtatccagctcacagttctccatatttccccatcaggagggctgagagttttgcagaaacctgagcaaaattttccatcccctatctctgcacgatccttggctgacttctaggattgtcgcttttatttctgagagctcacaaattatgtttgatgagccattctggaatgtttcctataagcaatattaatatcgtaagttgaaatgtatgccatttgtctcatttcccttttgcaagatggcatctgcctatttttagtctttggcattccttcccttccttcattgctcttccacaattatcaatgtggtctgccactcccatttgcaaataagttcttttcatctggaccgagagagccagactcatgtgaagcaactattgacctctcctcacctcctccatcacccaggacctcagctcccaccggtacaaggtgcactgcacatccctggtgtgtaaggtgagacttgctgggccattgagacggagataagcatgcccagtgataacgttagagcaggcagtatctgtcagcgtgcccactgtgttcaaatgggggcatctttacaaccctttgcaaatccctaaggttgaaaacatgattgctttagggtgctcttcgactttctttccctttggtaaccagccctcttggctttccttcctgagccacctttcacaaggaaatgaactttacagtcactttgtaggagttgctataaacacaaggaccactgaagactaatgccaggcaggtaccaggctcaacccgcaagaggtgaaccagcttctctggacatatgattcatgttgcagcaagaagtgatctggttcctggactttatggtttactctgaacccccagattccagaagtttccacccagcatttgaacgttgctctggtcttccaggccatgggtaataatataacaaatgtggaaacagaaaatgatgcttttcatacctgactcaagacaccccaacaggctgacctgccaactccctatttcaccaaaagggcagccacgggaccagctcttcacacatggtccctggcagtgagggtgggaagaagacaccctctaggaaaagcacagtcgctcacatctcggcttctgcccccaaactgaaaataaaaactgaatgggagaccaaaaaaaggcaagagagcaaagtcagcatttcacagacagggacccatagtctgccttttttggcaagtcaaagagcagcaataaccaggcgggatggtgtgcgactgtagtccaagcaacgtaggaggctaaggtgggaggggcacttgagtccaggggtttgaggctgcaatgagttgcgatcacaccactgcattccagcctgggtgacagagcgaggtcctcttttttttttgtttgaggtggagtttcactcttgttgcccaggctggaatgcaatggcgtgatttcggctcactgtaacctccacctcccgggtttaagggattctcctgcctcagcctcccaagtagctggaattacaggcatgcaccaccatgcccagctaattttgtattttttagtagagacggggtttctccatgttggtcaggctggtctcaaactcctgacctcaggtgatctgcccgcctcagcctcccgaaatgctgggattttaggcatgagctaccacgcccggccacgaagccctgtctcttaaaaaaaaaaaaacaagaacacacacacaaaaccaggtgctttgggaatttttagggagagtctgacattcttcttcagtgtttctgacagttttgcggcttccttccatattctacgtggaaaacccccatttcacgggaaaccccaattcaagttgaccagcatgtttccatacaagtttgtaaatatccaagagtttgatgtgctcaagtttagccaaaaatgtaccaggttttataatgtgtcaagtcacatgtctggactagagtgaggtctctttgacaggtaggatcagtggtggctgtaccaagcacacctgctaagaaacctgtctccaggtgatagaggaggctgaacggaaacctagcgtcaaattccaaagccagctgacaatccctgaaagccttctagcactgcacaggcagcaaacaaagcatggccaaagagcagggaccagagaagagattccaaagccagggtatgaaagctatcccgaaaacacccccgcagaaacaagatggaaaaaaaagtcttttgctttaacccaccaagttatatatacctgcagctgcaacactgagcatcggactgaggaatgagttaaaccaaaaggtccaccccttggatgtccttagctatagttgtctcaaactatcatgttctacacgagtcccctggcaggcctgagccctgcatttccaaccaacagtctccagggtgatgcagacgctgctggtccaagactacactgtgaagtgcaaggcacgagttgaagtcctagggtgcctctccactgtgtgcagcaccaaatgtggggcttcttccctctgccagattctgaactaggcatgggatgtaggagttttaggtgaaaattgttaaatcagaaaggacagctcaactgggggacggtatatggagcggggctttgcgagcttgttctgctgagtaagccgagtgtggaccaagcagctggcaggaagttggctgcctttttctttataactctcctcctgctgctgggagcagtttctgacatccctgggtcatcacagagcatgtgccacaaagcttcacaggccctttattaattcaggtgctccccagatgcagagccaccaacacagccaaccacagactcactaggtgtcatttaccaaagcagcacatgcctctgtatggaaggaataacaggaacatgtgctcctgctgaaggctcccctgaccagaaaccaacccatgcatgcctttgggtcgtcagcaggcgtcttgtcacttgtcttcagtgtctgaagctgcctcacggcaggcgtcctcctggatctgctatgtccttggtatggcgatagtattaccaagtttgacttctaaaaactaccactgtggatgccctgtctttctctttagcaatccacccgaatgcaatctgggaaagccgtggccaaggtgtgggcacaagttcaggccctgacatgatacacccagcaccacagggcccagcttctcccagtggttgcctgcctcagttgcctgcatcagcatcaccggggccttggaaaccctaagactcttccccagctcagttcaacgctgaccagcctgccttcctctcattggctgctgataccaatcacaagtgaggtgtgagtcactgaggcttacttagcagaggccctctcaacactgcagaagtgaggctctgcttaacaagaggatgccctactcatgcttccagcgactcgctaagaaaatgataacctccctcattctacatccatctactgatgtatatttttttccaagaaaggccattcccagatcctcatgctggctcctggaaaccaccatctgtgctctgctctgatgtcaggaacaaagtgcatgattccgtggctctcccagaccccccagcccttctgctggccctctctgtctgccactgccatttggcaaaactaccaccttcgcacaaagtgagagcaagccatctgtgacctcaaacagatggagatgagaagcgccctttcccagaacgtgccattgagtgggctggtggcaaggtccccaaaggcattcaggtttcttccagaggccacaggttgggttttccagaggccacaggttgggcctgtccactacaggagaggtcatttccagaatgagaagagaatggttgaccggagcaagggcacagggacagcaggaggaaccccaagaggggcaggtctggagaagtcaggtacttggtttcaagttgtccactggcagtgggcagtaggtgcacaagggtttcaggcaggaaaccaaacacctggaagaatggggacactccttctgcagagaaagctgcatcagatcacacccctgccacctgagcacgaaggaaaccctagctgtgtaagccaaaggtgtcttttcaagtaaaggtgaagtgagtccagttaccaagagagccacctggacagggctcagcgctggccctggttctgttcacgtgtggaaagagcactgtgctgtggcctgagcttctggtccgagtctccactgggccacatagcgccgtgggaagggaggtggctcaccgtctgcaaaatgtcgactctggacatcccttccagctccaagaaccactcagttgaggctgccagaagctctgacacaagaaaactacatctcagctaactgctggaagagtctggaagttctgaggggatttcagaatctggttatttagccaaactcaacttccctcctgcctcctcaaacaccaccttggatgacattattttaggcaagggaatctacctgataattaaatgcaaaggattcctggggcagagacaaacatcagcacagcgtgtgtaacctgccttattcagtaacgaaactctgggggcagaggaagcctctccacggctggacttcctaccgtgacgctgagctccagccaacagctgtttggacatgctgctcagaatacaggtaggactgcatgtgcctgcttgctgacaggcttttaatggctttctgtttgagtttccctccctccaagccaggcatcaggcctggcctggtgggatttgggaaggctgtggctgagatcctctttggaacagaggctctgggttttccagacaactggaagaaatgtcgtcgcctcgcatgagactccacatcaatgatgagactccaaggaagagcaatgcagtttctctgcaacccgtgaatgcaggactgtgagaattgctgcagacagcagtagggccatttagacagagcccacagtcacaaatgctccttgctgctctggtcactgcgggggcacctcccatccaagattctctgctggggaggggccagaaggaaattctgcttttatttgtgtgagagaaagggagaggggaggaagcaagaaatcaggcaatgctgagtggggcagagcaacagctgccccgtgggtcctccacagtcgcaagctcattctatcacagccaaggcaccaggaggtttgtggcttgtcaaggtgaagaaccctgcaagtctcaccagcaaaacaccctgatgtgacttacgcattgcatgcctgtatcaaagtatctcatgtaacctataaatatatatacctactatatacccataaaaattaaaaataaatataaatacataaataaaaggaaataaggcctgcacgttttgaacaactctggaatttgggtaagactgccgtgcccagtggacgctcacacacggactttgatgcaggggccaagtgcagaggaaacgtattcaggaatcactccaagctccgctgagggaaacgtgagaacccttcaatgcttcaagcaccaccaaccaattacccttcagtagagaagggaagactgcctgaggccatgattgctaagcaggaactggggatgaggcccaggcaggaacctgctgggaaacctgtctggagcctgtccaaggctccatcccttcctggggggaggcacccccttttctgttcctccaggaaggccaacccctatgtgaacacaactgccctaatcccagctagaacaaaagaatgctccctctccctccaggatttctaaacagttatgacattctcagaaattctctctctgcataccttcctttcaatgccggcccatctgatgtctgtgctgtgcctactaggtggagcactcaggccaaacatttgaggcaagagcagccaccacccatgactgtctgctggtgggttgcctgcttgcctagatctgtcctgggtccattccgtgtccccacagcactgtgccggctggctcgttcttaatacaaatcacagacaagcatttccatgcttcacacatctggataatggcttgctttccttcctgttctgggactgagacaatttcttttcatttgaaccatgtcaactccagttatgggaacatttcccccacatggctctcccccaaccttccctcctccccatcactcccccagacatgtgtccacccactgcccatgggccacactttgcagggatcagattccttcacgttctgagctgcaggccaggcaagcacgtgcctagtcaatgtggcatccttcccgacgtccactgtcccaaactcaccttggcacagcatcacatctggctggaagcatccaatgtaatgaaaattagagaagactgagcttcacctgcacctggtggcagccccacctgccctctggccttgcagggctccacctgtccctctgctgctcgctctcctgcctcttctgggtccaggcttctgcccggcccattattccagtggctccaccacaggtcactttacgctttgcgccatgtcctccttgaggtctcccgggagctgacggagtagagagaggactaagcctgtctatgctagcaacattcagaatagctgggtcctgagcgctcactcagaagtggtgaggtgcatggaactcagggtgaccgagagagaggtgaagtgggtgggttattttcagcacagccgggctcagcactgggggagacccagtgttggctccccagcactggggccttggaggcatggcggaaagagatggtggcaggaatgtgggcaaggccagaaagagcaacaacgagacacctccaatgttgcgtcttccgcggttctccacctgggatgtgcggaatctcctggagagctttcctgagcttcctccccgagagtgagcgcatcggtcaacagtgggtgacgctgggccactgcatttctaaacgcccagtgctcctgctgcgcgtcactgccaggcaccatctacgccaagctcccagcttgtgtcaagacagtgttttccagaggccacgggctgagcctccccactacaggagaggtcaactccagaatggaaagagaatggttttttgaccgaagcaagggtgcagggacggcaggggaaacccgaggaggggcaggtctggagaagctccttcccgaggagaggctgcaggaggctgagcacgtgcgtggcgctggtgccacttgggctggagacctcccgtggtttgggccggctcccagggccaggcatttcttgaaccctggtctggctcaggcttatctaacagacactcctcactccaacaaaggcagaggtttattttctgcaatgagaaacctttttatttctctgtataaagatatatcctcttcgtttttctgagtgggtggcggatagttcacaaagcagactccctcccttccactgtcaccccacctagaaggtcctgtctctagacatctcccaggagtttgctgccttacctgattgagacacaggtgggcacagggtcctgggtttccctaggcccagaacgactagtggacacttggttctgtgccctcctgccagcagctgcactaggaccagctcctcctaccaggcacctcccctggacctagctgcagcataccagacacacttccctcgaaacacaaggcactcagcagccttcacagagctatgcactttcttttataccggagcttccaaatcacagccaacaatagatgctacaatccaaacagctgcattacacccaccttaaagtcacactaaagttactgccaactgcctccttgatctgggttttatttttgctttttctcacgggcagtcagcatagagctgagcttctactcatcatcaggggtcagtccttcctaggaccaaccagagttgagcctgaaaagcaggggcctatctgagagaaacaaatgcttacttctggattttcctctttctctttaaaaccaaattgtgatcggcatgttggatgctgacatccaggacaaggcacgctgtcctggtttcttgaaggagaaaaccctggggcgtgtcatcccagctgggcagtttctctcaaggaactgccccccattccatggttcctgtcttagcaaggatcagcgggtaaaagatgcctgttgtagccatcttcccatgtgcaggggctgctgctttctaacggccaccgcaggatggagaaaggcaaaaggagaccccggctaaaaacactcactttacggtgcatttctcaagctaccgctatggaaagggacacagctgccttcctcacactcaacgctgccaacatttctaattactagctgaacccaaaggtagcacatggctgcccatcagaatagcctttcacgggcaagaagacaaccaagggcacgggtgtacatttaggagcctccaggctgttgttagcgtgaccgctgctcagcagctgactctgcctccaggcagcagcaagggtggcccctctgcagcttctcacacagcacctgcaccaggacttgccatcccccagctcgtgtccgcagcagggctgggaagtcttctgcagcctgctcctttgtcagggcacagaatcagaaagctgttaatcgaatgaatccacagcttcagctcagtggttacacgggagttaatgatgatataggagaggcaggatctgtgagaaggccccgggcaagaagcttttaaaatctcagattcatttatgtattaatatgtaaatggagcctgttccatgtttccgtaagaccacagaactattgatcattttcacattttcacattttcaccggcatcactttcatcctaatagtctcagacttacattaattaaatgactggcccattgtttggtctcaaaaaaaaaaaaaaaaaaaaaaagaagctgtcaatctcatctcaaaaaaaaaaatctgtcaatctcacccacagtactcgagtgtcctagggaacccctctccatgatacggtcattgtccttggtcagccagcagcagctatacacatggacatttacttcccttaaactgaaagtaccttggtttttgactctacaagttctcttattatttatttcatgtaatttgtatccttattttaatgggcctattgcagcatgtataatcatataagtgatcccaaatcatattaagtagtaactataaatttttaaaaaagcaatactagtttcctaacctgtaaagtaaaacctatataatgcctacctcataggactgactcaatggcgtgataaacacacagcatctcacacagtaccctgcacatagtaggtgttcaataaacaagagctctgacctgagttaaacatcactagtatgttattaattcatggctgaagcagcagtattgacattaccatggcaagaactttaagtttaattacaacttaggacctatttgactgcaaattggattagagccagtttattgtaccaaataaattatgtttgatttaaaataaagccatgcatacaaagagacactagaaagagaagagggaggaaagtataattccaggatgtagatgagttaattgctgaaaataagccctaaatctagctttgtgttttctgacagccaatgcagcaacaaaatcatgtgaatctgtgcaactcattgtttgataagtggaacgtacagctcacacagaagtggaatttttttcctgacaatcagattttagggtagctgcttacaccaatcgccctacgacgcacattaggtaacgaacaggagagccacacctttgcgtgctgtgtgcaaaggcacacacgcacataccttccctccagaaatgtttcactttgtcagcattccatggtaagggaccggtgggtgagccacctggagactttcttcacataagctaaggaatatggagttaaatggctccactgtattccaaaatagggatcagctttccggtttcgtgtctgtgaaacagcctggccggtggctttgctgagagtgcaggttggtcttggccttttccagcagcccatatagcctgcaaccacagcccagcaaccagaggggcctgctgacggggaggacatagcttcatcctcagggatctgcttcccaacacttgcgactaatcaaagacttccctgggaaacctgtaattacccaaagagggggagggccaaatgctagcaagatttattggctttgattaacaataaggtgtttgtttttgtcggtaattggagttcaatagcaagctataaagagtcctccaagaaattctacacagtctatagctaaagggtactaaagtgtgtttgaatctaaccattcatctttgcagacctccgctgcagggaggccagtgtttgatccggcacactcgaacaggtcatcagggagaaaatggccctctgtatttttaatgtctgatgagaaaagacctccatgcggcatgtgtgcgcccacacgtatgtgcaaatggcacttagcatgtgccatgctgctggatgctggcgtgggacattgcagttcatgtaactatagctcaacccaccttatttaaattgactattcaaaggcccatagcaactcgggtgttggtaagtactctgacatcctgcattctcataatcattaggtaattgattcttaggtactacggcatgctggttgggtcccttgatggtgggaagatgtttgccaaacccattctgatttatgctttttttccccagcaaatcactcttggatacaggattttaagaactcagaggtattaatacaaatgcaattgaacttcatttaaaaaacagttctgtgcaaagaattgtcgccagtatttttaaaaatagtgttgagatgagataactgtgcactcagagacaacttctcatcttgcttcaccaggtcctgggtcagtatcatgggatttcctccctaccccaggaattgcacataacatcatttccactctctgtacctactcacatcatgacatacaataggtacggaaaggccaactaccaaacccctctacaggaatggaagaaattaaaatggcgctagataaaccaaaacaacaacaaaaacatgcagccataaaaatggatgagttcatgtcctttgcagggacatggatgaagctggaaaccatcatcctcagcaaactaacccaggaacagaaaaccaaacaccgcatgttctcactcataagtgggagttgaacaatgagaacacatggacacagggagggaataccacacaccagggcctgttaggggatggaggactaggggaaggacagcattaggagaaatacctaatgtaggcgacaggttgatgggtgcagcaaaccaccatggcacgtatatacctatgtaacaaacctgcacattctgcacatgtatcccagaacttagagtagaattaaaaacaaaaaacagcaaaaacaaaacaaaaaggtcataaaatcaattcagtggatatggaccagcattttaaaaagtgaattaatagaatataaactcattaaaaggcatcactcataaaaaaacaaacaaacaaaaagtaaagccacagatatggcaaatgcttgagaaaaacaattgcttttatactccttcttaaacactgactttactctcgtaaaaactagagttaacacttgagattccaggcatcttactgtgtaggtcattaggaaacctttacaataatttttcccccaagaactagatttccatttacttatgttctattcaatccaatataaacctttccactgtttggcatgctctggcctcctcaatttaattttcttttaagctcttaagcagtcatatcacaatctttccttcagagaaacataaaacagacacctactctaggaaaaagaacaaccctcaggccacagtttgagcgtcgtctggctttctgccgcttgaggcttcctacagatggtcacaacctggggccagccactcaacaacccctctgacgctctgtttcctcatctgaacaaccaggaggttgcctcggactctccttaaggcaagctctaaggttctatggttatttcatcctaaagagaagaatcgctgtgtgcaaagactctcatccacagctgttaattcttcaaaactaagacactaaattctacaatcagaaagttggactttagaattggcagaaaaagacatggaaagtcaacagtataaagatgcatcccattatgtgaataatagacttagagtgaatcaaagatcatgctcgtcccggaaaggaagtacaattaaataaggacatcctgagaggaacctcttctttctagtctgttggctttaagaatagatgtgcacatcaaattaacatttcaactctccaagccaatcggtgcagtcatctcgtggggtctctgagggtttggaccctagtgtactgacctgggtcctttattgcagatgcagcaaaggcatagagcagcactgttttagaacttacagaattcaagtgaaaaatctgcactcaaaaaggactgaaagaaaacaggacgacacagagtctgatacttacttgtggcccagctcatgggcgatggtaaaggccaaattgagaccattgtcttcggcaagcacacacttcctcttagcactgcacacacctcctaagtaagcaattcctgcagcagagacacaaaacacatcctcttcagaacgtgggaggccctggtctcaccgggcaagtccgcacggtcaacgtcatgcacaatcaaggcaggcacacggcaacaatggtgactatgagcctcagcccacctgggaagggtttgtgtatgatgcttttgtgttcacccaataaaacaataaccaccgcaagcatccatcaggcatctaatacgcgtcgggggtgtgctgagtagagtacccatagcacctaacttaatccccgtgacccaggatgagggaaactgaggtttggaaaggaaaggtaactctcccaaggtcacctggatgggcactccatgctgcgatcctacgccagatctgtctaacttcagcgcctagggctgggaccaggtgagccagccaggtaagacaccgagggtgcaaggtttaagaggccctgactcccctcaggcgatgcccctgcacccgcacaccctgagagggagcgcctcctcacaatgcgcatcccgggcgtgagccggggtctgtgctgggtctcgtggacagcacgccccggaaggctgcacagaatgttctgaaaaatgcttcaggagcccttgagagaggaagacccagaggaagcggagccagcgctgggagagccagggtcttgaagtcctcagtgagcaccagcccacaagccaaacgtgtgtctccacacacacatgctcgcacctaaggatctcaccctaacacaggaaacctgaaccacacacaccaggagaaacgcaatgcagggcagtggaggccgcatcccaaggatgggtggtgttggtgggacggcaggccagccactgcaggaggggcaggtgttttccaggggaagaatgtggctttggcagagggacgcataggatgacatggagcccttgggtgccggcccctctggggaatgctgggagggcagccacagcaggggtggggagggcgagcccatgccggccgcacttctgggggctgactctccagggctccccaccacagtactccccgcacccaggaaagacatgtctcgccccgcagggaccacagggcttatctcaacagggctcgctaggaaacctgacatccgccctcccgtgggcgtttaaccccgaaggcagttcctcgatatgcccctgtgtgacacgcaagcggatggtggcatggggtggctataggagctcagtgctcccctggctgtgcagtcacattgggggttggtgggcagtggctctgctggcatagcgccatggggcggatgacggctaaatacagctggactctgcccgtcaactccatgccctggatgggctgtggccaccaggaaggagcacttgctctcccccatgggctgtccctctgtcgagctgcacctgctctcccccatgggctgtccctctgtcgaactgcacctgctctccatgggctgtccctctgtcgagctgcacctgctctcccccatggctgtccctctgtcgagctgcacattgctcctttccaagggctccttccatgaacttgcctgaggtgtctcaggagggaaggagttggcagagggcaggagagaatgggacaggggaaccatttcattaaaaatgacccctccttcctgcccccaaagagctaaaccaacatcctctttgctgatgtccaaatcaaactggtgcagagttcagccatacacagggtggtccctctgatgtggtgtggctctgtgtccccacccaaatctcatctcaaattgtaatccccatgtgtcagggagggaccgggtgggaagtgattggatcatgggaacagtttcccccacgccgttcttgggacagtgagttagttctcatgagagctgatggttttaggagtgtttggtagttcttcccctcccccctctctcctgctgcactgtgaagaaggtgtctgcttccctttccccttcagccatgattataagtttcctgaggcctccccagccatgcagaactgagagtcaattaaacctctttcctttataaactacccagtctcaggtagtatctttatagcagcatgaaaacagactaatacatcctccttcctcatccgctccaaaaggcgcagaggaagctcacatggcctggctccgcagaggtgcggctccagggctcatgtttcacacactgggcccaggtacctcattgtgggtctatttttatttggaaacatgcaatgtgcttagttaaaaataaataaagaacaaattaaatgttattttgcctcaagatggttttgtggccacgtggatgtcacaacccagcaatgcagactattaaaaaaaacaacacgacaaccagaaaggatgtgatgtggtttctcggtgccttcaaggtcattattctgggttttgtttaaaaatgttttgtgggttgcttttacaagtctaccagtgagtagatggaatactgctacacagccctgatggtatgtgcacgcggcccacgtgggtgcacgcacacgctcagacacacacccagcagtgcccgcccagccctggctgcagcccctctgggtcaatgaatcaattagaaacaatcagatctgcacgccctggagaagttgcctggtgagggggaagggagacataataaggccagatgtgctgagcttcctgtcctgagtgtgcccaccacgggctctgatgcagaaccggcagacctcaaatgccacacaaacacatcccccctggcctcagccacactcagcactcggagaaggcagccctgactttccactctaattaggtaacgtgcaatgctagtggaacagtgaagcaaggagccttccaataattgcattttaatttttccaaggtgcagatgatttttttttaactagaaaacaaagaatcagtttatttacaagaaatgctcttgcacaaaggtggatcaaggtcgagtgcttttaatgatttattccagtcgtgaccagcctggtcataaaactgagcaaggaaaaacacataaaagaaacagctcctgataacagagcacaagacctgtgtgtttatgagagatgaggtggaaatgcttagaatgcacaaaacaaagtctggagaaaatcccaggttgttgtaaaataagagctgtggggggagtaaacagtaattaagccatccagcttcgcagaaaacaaagcccaccactattccatgtttctaaaaagaaactgcagtctagggaagacagagccctggagactcagagatacccccaccgtctcaggctgcagaaggcaccaagctgggaaaacccgccaaatccccatatgctggtgcttgtcaagaaatgaggaaaaaccagttttctctgtattgatttattaaaaactgaggtctgtgacaaagctctgctaatttcagtgctgacactgtggaaccttctgagttaactggaattgccttatgctggggagaggcttttagaccctgcagtggtgctttcacatccagccttctatgatttaaaattctccacagatcacagaacttatttaaaaatttttaaaaacatcaattccacatgtttgcatagtttctcgtaacaaaacggaggcagaaaggcaactggaatttattagtcgtgcctctaatgggcttgactgctctgaacactcgaccctcccttgcttggcaggcatgactggtcccattttatagatggggaaacagaggctccactacacccctgacaacaagcgtgtgcttgtgtcctaaatggtggctcactccaactctactatacccctgacaacaaacacactcttgaaaaaatctgaaacacagagggtaaaaatgaaggggtgtgggccaggtgcggtggctcatgcctgtaatcccagcactttgggaggctgagctgggaggatcgcctgaggtcaggagttcaagaccagcctggccaacatggtgaaaccctgtctctactaaaaatacaaaattggttgggtgtggtggcccacgcctgtaatcccagcactttgggagaccgagcaggcggatcatgaggtcaggagatcgagaccatcctggctaacatggtgaaaccccatctctactaaaaatacaaaaaattagccgggtgtggtggcaggtgcctgtagtcccagctacttgggagactgaggcaggagaatggcatgaacctgggaggtggagcttgcagtgagccgagatcgcgccactgcactccagcctgagagacagagcaagactctttctcaaacaaaacaaaacaaaacaaaaacaaaacaaaaaaacacccaaattagccaggcatggtggcaggtccctatggtcccagctactctggaggctgaagcaggagaatcacttgaacgcgggaggtagaggttgcagtgagctgagatccatcactgcactgcagcctgggtgacagaccaagactctgtctcaaaaaaaaaaaaagaaggggtgtaatgaattcttctgacacctggagaagctcatttaatttatcgagagaagaggctcccatccactagctctgtgacccatcttcccatccatgccagcacaacacaggtgctcatttgtcttctttcctttccttttctcagtagaagcataattttgtagacaaaattgggtgaagagacttaattagttctttttcagtagaaaactacatgatagaagctcataactctttatctaggggctgaccactcgactctctctagacttaaggaataaacaacaaacaactgtataaactctggttgatgcagtaagttgttgcatataagccatctgcagctggtggccttgctgcccattagtccaaccttacagggtctgcctttgagagagatggctcagtttttcccaccaactgctcaactaccaaacaccgtcatagttatttctgggacatcaagctgtcagtcacaagagagcatgtggcatctgccatacaccaaccatagtcatggatattggattgcagattcaggctcattgacaagtccttgtgttcttgcaaacctaagtggatgtgggtgtgatctgaatggctgaacagcatttaggagcaaatgtcttagaggctaggatgtgacaaaggaaaactaactacaaaggaataaaaaagttggacccctacctcacaccacatttaaaatataagtcaaaatgaattgaagagataaatgtgagtgctaaaactataaaagtcttagaagaaaactaagatggaaatcttcctgaccttggtgtagacaaagccttcttagctataacatcaaaagcacaagtaggggtgggaaaatcctaacctcttacaacagaagagtagctgaggcggaaggggctgggagtgaggtaaggagtcaccttcatttccactgccagcccaagcaatgaatgtgctggcacattctctaaggaagccttccagactttccccttggcaattatggttttctgtggaccgggagtcatacagcagttatggccttgcaggctaattcagtttgttggtttgtgtgttgtaacgccatgtgagctgttgcttcatgatggggttctcagttatgggtcagagtcaggaaaggctacatattcttggccttgctccctagggttaatgagaccacagcttaggacacagatgtccttggcttcggtttcccaggtacctccaggatcctggacttcaggaggagatgctgtctctggtaagagaatcacacgagtccccacagatgactcgagggtccctgggctggagcagtcactcctacaagataacattttcatgtgttctgtgagttaagggtaagtggaggaataaattggccctgggatttacaagttagaagccacaagtttatgccaacagtttgctgctagaaaccaaaacatgccgggagaggggaaggaaagagaaacgaataagtggtgatgttcaaaaggccacagccaacttgagccaagtgcatggagatatcgtgcagattacccacctgccagagaagatgatgctcgtgtcagcaggacccatcacgtgggaggggttctccagggagcaatgtaacgtttgtcaaatcacagtgtgcctctcttcggagaaccccagagaggctcaggggcttctgaaacaggccctgatgcccaccagaaatggtcccaggcaggttcacctcaggacatcagaggagccttgaaaatctcttattttgacaaacactttgtcaagtgtttcctgactgcctgtatgtgacacaggccttgcgccgggcagagtctaagctgagcaggcacacgcctaggggaagcagcctccaggccatttcagcaaagagacaaaggcggtagaaaggtgagcagggatgttccaagccaagcctcagggcctgaagggtgggcgccgcggtctctgaaagacagctgtgccagggaccgagcccaggtctggcccctccagagggcaaacaagtggagactggagaggaagctccacactgagccacgcacccactgatccctgctcctccctctgggtcacctgtcacagctgagggcccctcagtgagccacaccctcattctgaccgctctctcggcaaactttcccagaccatgggtggctccctgtgtggggagcaacggcgggcggcaccgtgaatgcagcaggtgatgagtgccttggagttccctttcaggagacctctgggcctctgcatgtactccctggctaccagagaaaagccctgtcttctagcatttggcattcaggaaacaccatgccctgaccagcctgccggatggctgcacctcagcagcactgcaccgtcacctgtgtgcaggctcctgtgtgtgcacttgagtgtacgtctgtagacatgggcatgcccaggacacccctccccttactggcagcatgagggtgatgcccacactcactcctacagcaatggaccctggtgaattttgaaaactgtaacacactcacattctctatcgactgcactgcttggcgcctatttcggtcaataattttaaaatgaacttgccttagtcccacttcagtgacagctttcagcctcctctatcttctctcactggaaatgtctcccctttgctggtgggttagaatgccctccctctccctggggaaagctggggttttaggtgggggtgaggctgagaagaagtgtggtatgttttggctaaaaataatctcctccatgtggggaacgggacaactaagtcttccatggggtcagatatccccaaagggaatctgggaatggatcgaatctcccttcagagattcaaatgcgacctggaaggaggggcacattcctgactcagccttcccaaggcagctgtctgaggtgtgtgcctagaatcctgatctttctcagcatttctgtttgaatcacagttattagagcagccacaggcagggccacgagcggaggctgctcaactgtgatgacagccggagccaggaagaaggcagagtaggggctggtaagagcaaatacgtgcattttaatcatgctcactgttatgggctaaactgtgtccccctgaaattcagaggttgaagccctaatctccaatgtcactgtatttggagacagggccttcagggaggtgatgaaggttaaatgaggtcagcaaggtggggccctgatccaacaggtctgggtccttataaaaagaagaagagacactagaggtatttctccctccctccctctttccctctctccaagtgagcacaagagggcaggtgaggacacagtgagaaggcagctgtcgacaagccaggaaagagattccttatcccaaaccagtcctactggcactgcggagttccagcttccagacccataaggaataactgtgtgctgtgtaagcctcccagtctgcagtattctataagaggagctctaaacaagctaatacacccagagtgcaccctgggtccccttgctcaaacatggctaacccacgagcatggcggccaccggaactcaccatgctcatttgccacacagcactgcagccacctaatgcgccatgggcttggccttgatgttcacgacatggtttaataacaaggaactgatctggaaagttgtaggagcatcaggttgaactagttacaaaaacgcttggtagagaagaataaaaaatatggtggagtgggggtgttctgtatttcaaatcatacaacaccttagccagctgcatctgtaggcagagaagtgccatccctcagtcgtttgacaatggggtacaccttgcaagttacagccagggatgtccatcaggagaaactaaggcaccagggagggaggtgagagaatcatgacaacatgccaaacgtggacccatcactcacgtcattggccatttctatttgcaggagactccctggaaatccccaggccctaggagatgttctaaaaacactcaaacacagccttggagggaggagtcagttttaaaagactcttataaaagtaatatactgctagctctgaagaatcggaggctaaaatcatctcttcaagtccccagggaatcccaaagaactccaggggaaggtgggatgggccagagagctctggaagcttccaggtctgttgcaagcctcacctggtacacagtaggctcttccaggtctgtcaggaacccaggagcctcccctagcacacagtaggctcacaaaaagggagcactgctgctggttctgcttagcgaatctcaatgaaaaccgagcggcaacaggcattccgggtgtgcagaaccaaatgcagcaagccagaaacatgtgctgcttgttctttttaccttgactcattcaaaaatcacaaatgcataaggccagaagacagaaggtgctcatcactacaaaagccaaggaagtgggtacctgtgcagagggaaggggctgtggctgggacggggcccacctgcagggctgatagactctactgtttgaccaggatgctggtcacaaggatgtttgccttataataattcatttagagatcaaaaagtcaggtcagtgttaccccagagggactagtgaccagaaggggcatgaagaggccctgcccgggggctgatattgtcttgtttctagatccaggtcatcattcatcattacacaaagctcatgagtttacaaatattcactgaatagtacacttagatacactatctatatgtaaattatgcctcaattataatttaaaagataacaaagggatacacacatgcatgtgaaatagaaggagaagaggccttggtttaagaatctgggaagagtcaaggtcactggacaatttagataagggtatgtctttggtatatccaagggtcatgagttgatgaagctatagtgatgtgtattagtcaaagtctgctttcacctgcaacaccaggctttacctgtatcactcgtatttctcggaccatatgagccatttctaatttacctttactgccttccaagggctcttccaatggtacgttcttgagacttgcctgaaacaaccttgaaaaacagcttcactccctcttatagccgtatttctaaaggatgaatacaatgcaaggccatgcatggaaatatttgccaagttagcaaaaaaaaaaaaaaaaaaaaggaagaaagaaagaaaaggattctcaaaacaagtaaccgcatttcttgctaaatgcttagcccagcaaagcccattctttgggggatgaaatgtggacttttagtgaaacctcgggacaagggtaagctctttcaatctacacgttgttctagacacctctcggggccctgctcttgggctgcgcacaaaggtcagcccaggcctcagagcagctctgggcaccagctcctgaacgccagctcctgagttcaagtccataaatcactccctggcagggcatcacggcccctccactaaagaagtaacccaaacatgggaagccagccatcatttgggtgttgactcaacagtcatgaactaaagtcaaactaccatgacaagccctcccttctgatggcccaggggaagccctaggacaatctccgcctttgctgacaggatataaaaatgacggcattacattttattaaaaaaaaaaaaagcctcttagaaaagaatgttgatgagagccacaccacgaagtcaagtgggcactaagattacaaagaggaaacaggtgactcgtggcagaatcagtggcagacaaggaagatggccagcctcagaatcatcgccagcgtggcagaaagtggatggtaccaagtctcaggtcccatcttcagggtgaaggtatgtccctgttccatgcttatggaggcagctcattaccagtgggttacaatgggtttcagaatcatcccagactatggaaatagcatgcatgtcaatgtctgtctttaaaatgtcaaaggtcaagaaaaacaaatgttcttcacctttcaagcaatttcatacatttccaggttgcctctatgcctctgtggtggtccgcgggcagatcatgaggtcaggagatcaagaccatcctggctaacacggtgaaaccccgtctctactaaaagtacaaaaaattagccgggcatagtgggcgcctgttgtcccagccactcaggaggctgaggcaggagaatggcgtgaacctgggaggaggagcttgcagtgagccgagatcgtgccactgcactccagcctgggagacaaagcgagactccatctcaaaaaaaaaaaaaaaaaaaaaaaaaaaaagaagtgagctggaacagggaggggtaagtaatgaggcagcggctgctgatcaacactaacatttgtcagacacttactatgtgtgtaccaggtcctgcactaaagagtcccatgcgggatctcattttatccacaccaccacttggtgaggtacatattgttattatccttgcagtactactgatgaggaaattaagactctgagaagtcaacaactcatccgaggtcaaacagcaaatgaggggtggagctgggattcaatctcaggtcttcagggccacaggtcctgtcctaaagcactacatcagagaccgcaagctggcagccacagaaggatttcaactgcaggaatgttttatttggcccatttaggattgaaatgaaaattctaatcagtcaccaacaattgaaaattagaagagctagtcaggcgcagtggctcacgcctgtaatcccagcaccatgggaggccaaggtgggtggatcacttgaggtcaggagtttgaggccagcccagccagcatggctgaaaccccgtctctactaaaaatacaaaaattggccgggcgcggtggctcacgcctgtaatcccagcactttgggcagcagagatgggcggatcacgaggtcaggagatcgagaccatcctggctaacatggtgaaacctcgactctactaaaaatacaaaaaattagctgggcgtggtggcaggcacctgtagtcccagctactcgggggctgaggcaggagaatggcgtgaatctgggaggtggagcttgcagtgagccgagattgcgccactgcactccagcctgggtgatagagcgagactcagtctcaaataaataaataaataaataaataaataaataaataaataaaaatacaaaaattagcagggcatggtggcctgtgcctgtaatcccagctacttgggaagctgaagaaacggttgcacctgggaggtggaggttgcagtgagttgagactgtgccacttcactccagcccgggcaatagagcaagacaacttcatctcaaaaaaaaaaaaaaaaaaaaaagttagaagagcttacataaaatgcaaattgcctgacttttaaaaatattgaataactggaaaatgatagactgttcaataaatggcactgggaccacaggtgtccacagggagatgaatgaattaaactctcaacctcatgccagacacagaaacaaactcaaaatggatgaaatacacaagaatggaaacaacttcgaatctgtcagaggaaaatgtagtggaggtctttatgttcctagagtagcaaagaatttttaaaacaagaaacaggaagcaaagatcataaaaaagattgggctatctagctaaatccatactgaaaacttctatgtcataaaaggtaccataaacaaaggtaaagacgaagaaaagacataatgaagacattttcaattcctaaaaccaaagatttaaaaagatatacaacctaccttgtcaccagagaaatgagaaataaaatcacaagaagatatcaattcacacccagcatgttgacaaaacaaaaaattctgacaataaccggcaaggttatcacaattaaagactcccagatgttattaaagagaatataaattggtatattggccattttaggaagtaatttgacccactgagaaaggctgaaaggtgtgtagaagtcaggaagtggttatatcctgggaagtggcaggtcaccatccaggctgcatttccatgctgttgtgcccacccacctgtccctgctgacaggaatctcggtagcctcttatgtgtatgcacacatatgtacacatgcatgtgcacgtaccaccaccccacgaagggatactattatcatcctcattcacacatggggaaactgaggcaccaagagggtaagcaaatcccccaggctcatgctgcaaccaagtaggagaattcactgaacccagccagtctggctgcagatcccctgtaaccgcagcaaaggtagagaggactctgcccccagggaatgtacagcaagcctgggagacagactcacagtcaggcccgtgcataacgcattccagggaagacaggagaagcctgccaactacgattcaaagtccagggagtttccttttaaaacacaaactaacaaggctcacgtacagatgtctttaacccttgagactgcaaaagctaatatgcatgtgtgtatttcttgcaagaagctttatagctttcatctaatttccaaagggatccataacctcagaaaggttaaaaacactaaacacaggaatcccagaatgtaatcaaagacattccctaggaaaaaaaaaaccctctctgatgagccaagtcagaccaaaagatcctgggaaaattatcctccagcccttaggggttacccaagcattcctcagaaggtgataaccaaaaatgctttgtagaatgtgcttttcgttgccagatctcaactaaccgacacatagaaaacatgaggaaaggtctcacattattcaccaacaatgtcacttgtaaaagagcagccaaattgactctttattatgcctggggcgggggtggggtggagtggagtgggaatcagccaaggtaatgcatagggtgacgcgtacctttttgtcaatcaggtgcacgcatttaatttagaaagcaccctgagttaagcatccaatttaaattagcctgtaattgtaaataatataaaaaaagaagaaaaacagctgagggatatgcacatatccgtagtttaacatatatatgatttacaaaggtataatcttgagtgtgtatatataaaatacaaattttatatataccactctattctgtttggacaaggccaatacctgttccctggtcccaactgcagggcctttattgtatcttggtatgtttaactgaattgaacatgaattgaacatccatggagatggacttggcacagcagagtatatgcttacaaatgtaacaagctctctctgttttctgaaaattagtatttctaaaaactggatttgttttgggttgataagaggaaaaacatgatataaaagccatttgttgatggtgttctccatttgatggatactgacaaatcaccatgattgctcagaaaatcgatgtcaacatccactctgtcagggtctaagaccaaagaagcatttacggcttcctccccgtccacagcacacacaccacacacaccccgggaacatcccatgccagtgcccgtcagcatgggaacagaaaagagctgtgttattttcctaaatcactctctctcggtctaacataaacaactcaccaaacaaaacttgaagacaaggcaggagaatcattttaaaatgggatccaagacctgagacgcaaagcaaaagcctgcctagatccttctattcatcctatcccttccaaggctgatccatgccaacataacctttgagtatcaaacatcagaaggtctgtgtgcctcagccctgtcaaggggcaggtttctcctttgccctctcctgcacctgggagcacacgcactaccagtagagaagggccatctggccccgtcccagccgggacccctgagggtcagatagaggtgctgagcccctatgtcaaagttattaaatgtttttgttttgttccatggtagctctttttttctcctttctgatgaatttacaaaagaaagcaagctgctgagaaggccctgaaagtgaggaggggcaagaaagatgactagttacggagagtgagggttgtttttgttttttgtttgtttgttttgccaaaaaagcctggatagagttatctcagttatctggcgccctcctgaatggaaccccggagtagctcccatgtggaagagtccctggattttccccaaccccaccgtctcccccttcagccatgtcgacagggaagataggaacttagaacccatttctcactggagaggaaaacttgtcatctggctttgtgaagaaggttctaccttatgctcatcgcacattatctttgctatgtgctaagatatcatatttaaaaggccaaaaaaagggacaaaagaaatgtaaaatacttgaatgagcttgtattataacattaatattattgggagtatctgctttccaggctgaagtgattcattcattattctagtcttgctgtagtcctttgtaatttgtagtaattatgtaattgtggtaattatgtttttttaattaaaaaagtataataataaaaaacttgaaaaggcaaaataaattttttaaaggaataaaatgggatccatccttcaagactatcttctggaggagcatgggattgcatacgcacttttattggccacttcttaatggtactgctgacctggccatgctctattcttccgggcactggaaatcacagaatgttctaggttcacttgctcggcccaccatccacgcaggaggctgaaatcatttcttaatggtatctgtattagttccttagctagtcatcccaattccaaatacgcacaagcgacacggcacacttcctgagacggtcctcgattatcactatgagcacaacgacaccatgaaagagtaaagctttgctgttgcactgtcccgtgacaagttcattactgccctgcagagacaactctcttttaggaggaaacaactgcccattctgctctattgtcccatagatcttttacacctccatttggtatcatgaaataaagactaattccaaccctctcaatacagaatctcccatccaaaaacataacaacccaagaatgtggactgctgtttcctgacccctgcactgtgcctggcaggttccggctacagccagaggcagccctcatgcctgcgtttggaacgcagtagcaatactaaatcagacagactggcgaggccagcaattaaaccagaagttggtgaagcaaacttcccaaagtgaagcaagatgttgatgtggaagatcagctgcttgtgagatgagctgacgattttcctggactctttgttagatttcatgtctggatctcgtctggaacatctaccagatggattagggcccgaatgtctggcgttcttctgatagctccagccttgtaactgtcccattgtcatggcagaaggaacctcactgctagccttgatttcagtatgaccgattctccttcattatctgagcttgtgcactatagacaactccacgtggagtctttgcatggccaacagagaagttgacagcccctaagatacctgccctggtcactgctgcccttgggtaacaagttggccttctggctgatagtcagggaagtctagggctggcctggcctaagtgactcagtcagcagaccctggagtgcccttcttggtccctccccaggtgtaaggatgatgcacaaggcccctgggctgctctgtaggtaagggcaaatgggcctctgcaaagggagctgctagtgtatttcccttctcccgctcgaagacacaagtatcaaaacatcctgctgctggcaggatggccagcgacctccaagacaccatttgcctgaggatgaataactcaaactcagagtttaggtgtcgctgactctccccaggagaaccaagactgtgcttacaagagcagagctgactcgggagtccctgttcctaacatatcctcagctcccttggccattcttgggaatgtaagccacagggagatttctctttgtgccagcagagtctgagcggggtgagaagggcaggctctggactggggtctgcatttgagtctccctctgccacttcccacctgggtgactatggcaattgtttcatctccccaagccttgtgcccccttttgtaagatgagatgaacacctacctcgtggaattgaggattaaatgaataatgagagaagaagcaatgttcagagtaaaccctgaacaaatattatctaacactgcaattagtttgaccaagtccaaattttttcttaaagtttaacagaaagtatttctcaagccaaaactctgtgccaaaaggcacaggacaatttcacaatgatcggcagtttagttgccagcgtagaggctgtgaacctctaaatgcttttatcaacatgacatttggaaagctgaagaacagcaaagagctggggactgggaaaacaccaccttcaccggcatcagaggccactctctttatctgcgctgggggccaggacaaggttggccacgacaagataccagcgtattacaacgtctggaaccgcactgtgcctccttacctttgctctccttgcctgacctggattttgcgctgactgcctttaaagacaagctcacggaaccctttttcccgatgctgacacctatcctgacacagtctgctgtctaccaagctaccgggatgctttatccagaggcctatggcgcccaccttggttaggtcctgacgttccaggcccacctaacaattcacccctgctcatcaaggggaaagagaactcttcacaaaactttttcagattttgagataggtgaattcataataattaagtaacaatattttactaagattagattcgaaacacacattgaatgcacttcttggaaacatcacatgttcttctgttttgtgaggtcagggtgccttcctgctctagacttcccatgtatttaatcaaacacaagtctaaaaataataaaattagtttcctgaagctgaaaatgctgttttgaagaggaagagttgatattaaatttataactagacaacagggacatgagacatgggtttgtgtttcagcaacatctttctgataggaaaaataaacaggagacttcatgttccacaatataaaatacctgtgtttcccaccaaaatgtcatctcggacaaggcaggcaaggaacagtcttttcaattagtggtactaggacaactggatatccatatgcaagaaaatgaatttagacccctacttcgcatcatacacaaaaattaactcagaggggatcacagacctaaacgtaagactgaaaatataaaactcttagaagcagtttgggaggacaaggcaggcggaccacctgaggtccaggagttcaagaccagcctggccaacacgggaaaaccctgtctctactaaaaatacaaaaaattaggtgggcgtggtggtgggtgcctatattcccagctactcgggaggctgaggcaggagaatcgcttgaatccgggaggcggaggctgcagtgagccgagatcatgccattgcactccagcctggggcgtcagagcaagactcttctcaaaaacaaacaaaacaaaaaagtaaatatttgtgatcctgggttaggcaatgatttcataggtatgataccaaaagtacaagtgataaaaaatgactacatcaaagttgaaattttttatgcttcggaagataccatcaagaaagtgaaaaggttcccacagtgggaaatgatatttgccaatcatctatctggtaagtgacttttacccagaatacatgaagaatccttacaagtctgtacaccatatatttcaaaacagctaaaagaggaaggaaaaaaggaatgactgaatgattgactgattaacagggtctcactgtgaagtgctggactgcagtgctacaatcagtgctcactgccgccttgacctcccgggctcagggcatcctcccacctcagcctcccaagtggctgggactacaggtgcacaccaccatgcccagctaattttctgtagatacagggtttcaccatgttgcccaggctagtctcaaactcctgggctcaagtgatctgcccacctcagcctcccaaagggctgggactgcaggcgtgagccactgcactcggccaaacagacgattttaaattttctcaccacaaggaaattataaatatttgagatgacagatatgctaactagcctgatttgatcattccacaatgtaacatgtactgaaacatactgcaccccataaatacatacaattatggtttgtcatttaaaaataaaattcttgggaagaatccaacaccacctctcagcaaaaaaaattattccaactcaataaaaaccaaacacaatttttgaatgggcaaatgatctaaatagacatttttccaaagcagaaatatgtgtggtcaataagcatgggaaaatatgttcaacatcagccattagagaaaggcaaatcaaaaccacaataagatactacttcacacccaccagaatgactataatcaaaaagatgggtgttggcaagaatgcagagaaaacagaatcttcctacactgctgacaggaatgtaaaacggtgtagacactccccataggaaaagcgtttggcagtgtctcaaaatattcaacctagaattaccatctgattcaagcaattccattcctagtcacatatacgaaagaactgaaaacgtgtccccataaaaactcaaacatgaatatttatggaaacattgttcacaatatcaaaaaaatgggaagaactcaaatacgcatcactgaaagataagcaagtaaacacgcacacgtccacctgaacacgcaaacgtccacctgaacacgcacacgtccacctgaacatgcacacgtccatctacacatgcatatgtacctctaaacatgtatatgcaatggaatatgatttaacaaaaggagtgaagttctgacacatgctagaacaagtatgatgttctgatacaggttaaagcgtagatgacccctgaaaacattatgccaaaaatgaaaagagccaggcacaaaaggccacatattgtatgattctgtttagatgaaatgtccagaacaggcaaatccatggcagcttagtgggtgactagtgcttggggacaagagtgttgacaggaaatgtggaatgacttctaacgagtacagggtttatttctggggtgataaaaatgttcctaaatcaaattatggtgatggctgtgtaattctataaatatactaaaaaccactttagtacatagcttaggtaaactttatggtatgcaaattgtacttcaaaaaagcagttttaaagatgtcatccagcatgcaaggtcaaaattttcctaaaagcaatgttttttcctacttataagagtataacatggtagatattctcaagaacactgaagaacttaaaacaggaaaatcgccaccactcataaccccatccctatataatcagagagcgttatcgtcctcagatagggcttcttctatctcaaacccagtgtttgatcccagttcgaggcaaactgcctcctaacgcatccagagaccctggaatttcaccttctagttggctcactcaaagtcttcacatggacaaggagaatctatggcaacttcaaggagaaagcacaacagcaggaaagaataattctgactgttctgggtaaaagtaaaaggccccttcatctgacctgggaatgctagaaacctggaagcattcagaagtcccacatgctcccttcatgcaaaaagatacaaaccattcatccctctagttccttttcttcctttaatcctttctactttccactgagcattctttataacaagttttaaaataatatgtgccaaaaaccgcaataagcactttacatctgttaccccacaacaattttatgaggcgggtacaattttattattcccattttgcagagaaggaaaatgagacctcacatcctaggctcatgtctattcctaatgcatcgccatggtaccttctgatgcatgaagtctcatcaccaatccatccactcatttatttattgaacaaggagcatgaacctgaaagtctggccttagacactcctcataatggacagcagacatgtcgatgtcaggcgtccctaccagcacactccccagcaagggtcagactaaccctcgaaaagtgggaaacattcagtagcccgagatgtcaccagcgcctcctgtgtcttttttgttgaactgaaataaatccatcctaagtggggtggcagcggaagcatatgcttttcttgtctttgccacctttcttctttcccccgaacgcttcactgtgaaaatattcaaacacagaaaagtagaaataacagtaacatgatcagctctagtccctccacttagatgtaacaactgataatattttctcccatctgctctacctcgctatttttgtattaggatataattcacacaccattaagttcacccctttgaagtatatgcttcagtggttttagtactttctcaaagttgtgcagccatcatcatgacataattcgagaagattttcatcactcttatagctagggtgatgaaagatgtgagatcacagcccacttcctcctccccgagcccctggcacccactaatctactttgtctctgtgcactcgcctcttctggacacttcacctaatggaatcacacgatatgcggccttttgtgactggcttctttcatttagcataacgttgtcaagggtcatccatgtcacagcatgtaatgttagtacttcttattgccaaataacattccattgcatggatattccacaactgaggcatccattcatcaactgatggacacttgggtagtttctacattgggactatgacggataatgcgactgtgattattcacgtacaagtttctgcacggacctatgtttccaattctcttgggtacctacctaggagtgaaacagctgcctatacaataactctatgtttaatttcttgaggaactgggaacatgcttcctgatttccaatttaataccaccagtttgacgggcaaacgcttatgtgttttttttttaaacagtgacacctacaagatgctcacaaatcttctcaattaaataacacaattagcctcttgaaatacacaaaaatatgctggaaatgtttaatgcccactaaagctacgccaataaacttcactttttttttttttaacagtgacagaatttgtctcactgcctgtagactcttgagtcccgcatagcatatgtgtgtgtgttttaaggagagaaaaaattttgctacagtagtggacagctcatacactcatataaggtggtaatctgcactatttgtacaaactatatgtgaataaagttgttctgaatggtcagccgttgggaaattttatgctataatacctattgttcttttggagtaacaaactctgccctgagataacggaagttctaatatacttccacctccctttaattacaatacatgagtcttcccttgctctaaaatcagccatacgccaagtcagtcatgaccacttgctgaagccttggcacgtgtgcaaactcccacgtcattctcatgggtctcaagttcttcccgaaggctgtttctgtaaatggatgaagagtgcctctgggacaggtttgccgggtggtctgagagctggtgtgaaattatccagaattccatttacttccaagaacttctgctcctcttaacagggcctgaaataaggctgcttgttgacttctgcctgtgctcggggttggcccggccttgcacactccttctgctctcgggctgacacctctgccggaggccgcctggggtctctgagaagctgtgcaggcatcacctgagggcctcgaggccatcatcacacagaggcacacagtctgtgacccagtcaaccaggtggatttgtgcaaaccattttattaaacgaagtcacgccttagccttaagagtgctttcatggcagtctgatctcaccactgcaggagcgggatcagctgcaacccagcaatttgcaacgtgactatttccttgtagctacggaagactcatccacacagaacaaggtggactgtggtacagacaccaaaatagatcccagaaaggaagcagagtgccaggtaagcaccgaggaggtgccgcttcatgcagacagttctctgccttaagtcctggcatccggctgtggatggctcttaataccatgctggcgggcagaccagatgctcctgccagcccacgtagatgaaaggggccacagcacgtctgaacagaaagacatgattcaaataagcgtggctttgttctgccgcatcttctgaaaacccgggcagccctgcctggaatgaggcagatctgactggctcagtgctgcactgggagaacacagaacctgggcaacatgtgcacctgggtggcctccgtgtcccccctgaaccaagcacacagcttggggccaggtcctctggcccagtccatcctaggacacaaacatctaccatccaacatccctggagggctggacttctccaccggaaaagtctggaaatattgggggcaggagttgttacacgactgaggggtcatgcctggacagaggccaaaatggccaacgctctgcagtatggcagacactcctgcacaacaagaaactgttccgcccatgatgccaacgtggctgccattaagaaatggccttttcagagtaagagtgaccaactcgaatgctacggaccaggcaggaagcctaagggggaggcaggcacccttccaatggtcttttgaattgtgttcttctaacatggacacactttgctggcattcaaatcacaaaggggtgtttcctgggatttaattctacgaagaaagctaggctttcacatttcttcccttgaaacactcagcgctctcaccctattttccattttcccacttttgataaagatgcgggtgcaggaacatttcagttttctcttactgcaccacaaggaaagtcacagcacaatgtgaggacgagaggcacctgtcacttagcatcaggggagggagacaaaaggacatggtggggactaaggcaaactggaaactgtctaaaggggacagccacgccttagctccagctcactgctgccacgtggggatgtgcgcctggaggtgccagatttttccaaagccaccaaagagtcagttgtttcctttcttaggaaaaagcactgactcttttttttcagtattagaagactaataagaaaatattaaacaaaacatgtttgagaccagatgcagcctgagtaactagtttgctacttctgcatgaagtatataaccatgtttcaaagtgctctctctctctatactggccctgagctcatctcacgggggcagaagctggatattgccttcccaggaagccaggagcagggcaaagaaggcagggactcactctgagaagaggagatgaatgagaatcacagtgactcttgtcctggtggcccacatatgtgcgtgtattagggttttcttagagagatagaacttcacacacacacacccacagacacacacacatatatgtgtatatatacatgtatatatgtatatacatatagtgtatatatacacatgtatgtgtatatatatatacacacacacatatatatatcctgggtgtgtctgtgtgggtgtatatatatgtgtgtgtgtgtatatatgtgtgtatatatatggagtttattaagtattaacttatacattcacaaggtcccccaataggctgtctgcaagctgaggagcaaggagaagcagtccgagtcccgaagctgaagaacttggagtccagtgttcaatggcaggaagcatccagcatgggagaaagacgtaggctgggaggcttggcccatctctccttttcacgtttttcttattgctttatattcactggaagctgattagattgtgcccaccagattaagggtggatctgccttccccagccccctgacccaaatgttaatctcttttgccaacacccacacagacacacccaggattaatattctgtatccttcaatccagtcaagttgacactcggtattaaccatcatggtggggatgtccacactgcccaccgcctttggagtgtacttggcgattacagagcagagacagagcaaatgcaattgtctaagtgcagtgagtacaggagggtggggggtacagatataccagggagggagagggaacaggatggggaggctttggtgggcggtaacttcctcctttgcagccagccatttgtgatttttgcagcagatgtttacaagggtaaaagaattgagatacagacaaggttactacatcataaattactcagtcatcacaagatttcaaagagaaaacaaaaaaacctcaaaagggatttggtttgagagtgaaaacgcttgccattgtgcagaggcaaaatattctcctttattataaggtcctcgttcttcacccccagtgcaaaggcgaggaaaggtcactgcttccccagtactctctctgatctgctgtaaccttctcctaggattacatctcccaagcagccttacagagacacagaacactctttgtcctgcactgaccgcaccaggcattgacattctaggaaaggggaatccctccacttccagagagagcctccggggccaaccccaaggctctcaacagtcctactctttgtcaaaacagggccacccacaggttttaagggtagaagcagcaaaggaagctgcgaagcttgtcaggcaacttcaagaaccccacagacttaaccacctgcattccatctggacccatgagcacccagaagtaatgagcccctggatgtgtcatggatccacgaggctgccttgctcatcactgccttgctagaaccaagtcctccctgttactcaccaccaatttcacggccatggggaacctgcctttgtaggctgaattccacaagaaatatactttcctccagttgcagcaaaacatgcagctgctattgctccaagattggaaacatacttaaccatcttggtaaaagccttctgaggaacatagcaaagattttataaaagggctaaaagatcctttttaattctttttttaagagttggggaagaacatacaaatcattcctctgtcatgtcaaaaatgtatatggtttcgttaaaataactgagtgccagcacatggctcaaactaggacccaagaggggacaaaggggacttgggggagcttccccgatggttcagaaagaaaccccagcagcagccattcatgcagtccttaagcagtcacggcctctgtgcccattcatgcagtccttacagcagtcacggtctctgtgccattcagtccttacagcagtcacggcctctgtgccatgcagtccttatagcagtcacggtctctgtgccattcagtcctcacagcagtcacggtctctgtgccattcagtccttacagcagtcacggtctctgtgccattcagtccttacagcagtcacggtctctgtgcccattcagtccttacagcagtcacggtctctgtgcccattcagtccttagagcagtcatggtctctgtgccattcagtccttatagcagtcatagcctctgtcccattctgtccttacagcagtcacggcctctgtgcccactctgtccttacagcagtcacggtctctgtgccattcagtccttacagcagtcacggcctctgcgccattcagtccttacagcagtcacggtctctgtgccattcagtccttacagcagtcacggtctctgtgccattcagtccttatagcagtcatagcctctgtgccattcagtccttatagcagtcatagcctctgtgccattcagtccttatagcagtcacagcctctgtgcccattcagtccttacagcagtcacggtctctgtgcccattcagtccttacagcagtcacggtctctgtgccattcagtccttacagcagtcacggcctctgtgcccattcagtccttacagcagtcatggcctctgtgccattccgtcctcagagcagtcatggtctgtgttctgggtgctgctccagggtgatgtcagcccagccagagaggttccaagacagtggaggatctgggtccttggagttcccagggaggccacagactacccagcagtcatgacatgagttacgcctccaaagataagcaggagtcagccgggggaaaaggaggcttggcccttcaggcctgaaaccccaaatgtccaggcacataatcagatgtggttttgagggaccataatacaatcagaagcacaactgtataccatccacatccagaccacgaagtgaagagaggcttttccgtgaaactgaactcgtgatatggacacatgcagaggccaagactagacaccgagtggaaatgggattctggagaaatcctgtaactctctcactgcatttgcagatctgggcttgatatgcctggaaaggagagtgcaggggctttcagcaaacatgggtggagatggaccataaaagacctcagaggatgatctcggttggcattttaccttgtggatgcagagaaaccaatggtgagttttatacatgggagtgatgggattaaatttaaacagaaaataagtgagaattcattggttggtttgatctaatacagtatctggtacacagttggtaacaacagctattaggttgagtcctacacaattgctaataatcaactgttctgatctagaaaaatgacaatttcatgtgagtcagcctaatatttgtgatttgatgcaattaagtgacaaatatatgacgtccatcatttcaaaagagactaaaataaagatcctgggcagaataagaaaagcagtagctgttcccacctgggcctctcctggctctcctccctcccaccatgatgaaaccctacccacagcctcaggccccacctctgagcactgatgaaccccgagtgccccctcagccagatctcgctgttcaaatccagatctgtgtttcaaccatctcctgaacacttccacctggatttctcacaggctaaagtcaaacctctgactcaggcccagctccaaatcaaagtgggttcacctcaacccaaataaccactgtctgttctgctgggagcaaaactgagatcctctgtctttcccacccacatcagaaatcctcactaccccctccaatcctccccattccacctccaattcattactaagtcatgtcaatatggagatctcagatccacccacttttctttatctcccctaaatgactgtacacttggccgcaagtaatagaaaacaatggtttaatcagagacgagacaccattgctcaacacagaagtctggagaggcaggcggccctggattgatcaggcagcccagtgatggcacatcgctggatggacagatctgtggtcctcctggcctttccctcatggtcccaagacagctgcagaagccctaagcactgtcctcacacagtagcttcccagggtggaaaacctttctctgaggctgccagcaggcctttgcttagatttccctgggctacgtgggattgcacagccactgctgcaagggagaccaggtaagtgattatccaggaaaaggaatggactgtcgtgaccggcttcatcacctgagggtgggcacacagcccagcaatgtataagagaggggcatggctgctaagtccacaactagcaataccttccaaacccactgttatcttagagcaacggctttcattcctgaccttgctcccactgcagtaaacatggccacgtcatctgcccatagctctttgatgatgaatcccgacactcagataaaatccacgacgctttgtggagccctcaaggccctgcagatacagccctgccttatttctcactactgggcctccttcatgttcctcaaatgctccaaactctttcttgcttcaaggctttcagaaggggccatctcctcacctacacgctctttcccgaaatctttacatggctgactccttctcacagttcggatcctagccttgatgttaccatctccgaaaggcctcagaacagtctactttgacaccatccagcgcgtgacctctgcattcaagaaacctggcccagtttatcatcatatctatttgtatgacaagttcttttatgcctgtcactctgattagactgtaagtgttctgaaggcaggaatctcatctgctttgcacatcactataatactggtaccatacgcaaagcctgacaggtacagaggctcatgaacactgctgaattcattattgatcaattagtgcattaatgaactaactgaaagagggactggaccgaggagaaaaggaaaactcgagggtgagagtgagcaggtacatttagggcaggatgaggacacagacccagcccaagtggacatgtgagagaccacgagagagcgctgaacagacacaggcaggtgagggcatgaaacgtcaaatgccacacttggcatgctcttggagaactcctattctctacccctcgtgtttccatgcagagtgaggtctgccacagcaatgctctgcctggcaagggcaggtgacttgtctgtccaatggtctgggggaaggagctggcctgctcactagccccccaaccccagctctccctgcctacctgtgggaggatggggccctgtggtgggctcaccacccacagtgtcacctgcctctacgagggggccattgccctgcggtcctgtctgtgacagttgcagaagagaagttggatagtgcttccgttaaatttcagggagcaaattggatcattctaaggtgaaacattcagtgacatttgggcccccttctccaatcagcttccttggtagtaatgctcacagacactgtgactaccactggttccaagcctgggaggggaagatggttcttatggagtatccctgaagaccccaacagagtagctcaccactgacactgcaggtgctgaggagccagcacagctttaagtcctgcacaacccaacagcttgcaaataggacgcaaagatggtttcaggctatgaatcactctccctcctaggtagctctccccaccccctccccacattgacagaagtgaccattgactggactcccaggcctcttatctaatatcctgccctgcaactctgacgtgaaacatgagtgttgctgatgccttcccttgcaaattcctgccttacaaatctctgctgatgtcttggtccatgggacaatcactcttatttcagtggcttctgttctatgacgcacagtggttctgcctgttgacctggatgctcacttcacattcaggaagtcttctctctggactgagaaccacagcaaggctggtcccgctaaactaaaaaggacccagtctcctggctgcagtccaaaggatccaccctctgttgacctcaaagaatcatatgatgtcccagaggcaaccactcaaaggtcacatgatccgttgaagatgctgacacgcctcctcccacaacaaaacacccacagagcctcaggagaactaactgcaaagttccctctccctgaccaaatgcaaacatcttcctttgaagtgtagacagagaacgcaagggcaactctcttgcagtggtgaagtatggagctccagtgagcaggtggacacagagccaagatgaaaggccacagcaccttccctgaccagcaggaaattgccacacagtcacctgagatgatcagtgcagggaaagcctgcctgtgttggcctccctcacagctaaggaggatgcacccacagcacatcaactagctccaactcactctgcccccactgccaaccacccatcccatgctgaagtcctagaagtttcctggccaagctgcacgagcataaccaacaccgggcacttaaacataaccaggggcatattaactgagaagacaactcagaataagtggttttctcagttaaactttctccgcagtttgggcttgcagaagagcacaaacacgtcacgaatgacacccgcggtgcacgaaagccacacttgcagacccctatctttgtggtaccttcaaagagaactccacattctacagagcgtccagtgggtctccacatcagatgcgcatccagggctgagggcaggctagatagtaacagattcctgtgtataactctttccagatgctggctggtacagagttggaggagaagtcatccatgccatagacacacgagctaattccaaacctcacagcagggagggatctgaggccagcaatggtgcaaggagagcaaggggtggaggaaacggggttagactgggatggtctgcaaattgcaatggcatcatagccgaaaagttcctgaaaagtctaattgtcctgaggcatcttcataacagctatctcaggcctgaccactgggttgagatgggagtgactggcatttaacacttttttcgggtttgatcactcagcaaaagcttaggaagtattgcattttgaatgaaagcatttattgtttaaatgaaggcaccaatagtgggtaacgacaatgcttggaagaaacaaaattataaaaatgaatttaaacacacacacacctagcttcggaaacatgtccactgttgataccaaacacctcctgaaacaggtgttgggactgcctggggacccaattaggaagccatcactctgtctcccagcagccaggggacaagaacagcccacggggggaggagacagagggattagcaataaagcaaggtatgtcttggaaggcagccaccctttccacctggtgctgagaactctgttggcaccaaaaggaattgtgaagttggcaaccccatcagaacacagagagagcgcctgcacatcctgggaggaagataatccaaagcagtctttaaaataaatacttccatcagggaatttaagtactttgtatctagcaatggtgtgcctcattattttcaggaccgtgttatgttatggcctacgttgcttcaaattctgaactcatgccatttgtcaaagacaataaaataccaaaggcacaactacttatcagataatccagtggaaattttaattgaggcttcagtgttaattcctcttggcaatgacccctatgtctaactctctggctaattctcatttcattaaagacaattcccagtgtgcataagcttcttatttcataaaccagccactggaatccacaggggataactgccttcccacaggaacatcagcacctcccattcgctggcctgacagggaccatgaatgaggaagaaaagaatcctggccagttactgatggtgatctgtttccttctccactgaccgcctgtaatcaaatcctttttctaagtgttacagaagctgatcagacttgggataaaaaggccttctcccaagctgatgtcacacaatgtgtaatttcctggtgtgtccaagggttctcagggcaggagtgagtttggaatcacctacttggctggtcaggtgccggtttttcttgaactcactcagtcttgtccaaaagggtctcaatggtctgttgcctccttctgagctttgggtatgcattttctggcctcagattcgcccctgattgtattaggtcatcttaccgtcatcctcaggagaagcgaataatgtgtagtaattcctcatcctttttcttccttttgagcccaatttaggctgagcacagacatagaataaatcttggcatcgtccttagtctccacatctaattcctgaaccttcattttacttgtgaattatacttactctagaactcaacagagtaacaaaaatgaatcacggcgaccttgcccccacttgaattgtcttagtgtcaagacctgttttccctcagctgaagtaataaagaaattgacacttccaatgagataggcagaaaaattgggttgggttggggatacctggccagaggcagctctagatttcattacaaggctcagaatggagaactttcctcaccagaactaggctaaccctggcctagcagcggaagccaatccacccgggcaggacacctgcctgcagcatggagccagggtgggaggtgggcttccccctgccagcacctccccaactcctctccttcccctcaaggcagatgtgaggttcaagtcccgggtatcgacccatcatccctgggctctgaaagcctgatggagatgaaaatagtgccagacatggaatgaacacttggtgttcccagactcacatcaagtcatgcagagaggtgacacatcctcccagtaaacccaccttcttcttaacatgaaacacgctggtgggacgtagatgcccaatcggctattcccttcccctccttttgatggcaacgaaggtctcacgctgggcagccacaaagggctctggcggtaagtgcaggacaccaagtcaccagaactgaagtcttcctgtgtcagtggacaagttatgtgaccccaccaagcctgtttcctgaatagcaggagtgacttggccatttggcccatgcgggacaccctgcccaggccctcctctcactgcctcctcacagttcttcacactgacaccatggaatttgcgtcttcaggtctcggttggaggcggcgcagatcgattccactgcagcaggtctcacaggcagaggccatctcacactccaccccagaggagggacgccgtgaatctccaaggtccactgccccatgtcagtttttaaagggagagtattgaggtattcagtaaatatgggttgaatctgaggttcctctacctactgcacagataaaaaagggtgttaaatggtacagaagaggccaggcgcggtggctcacgcctataatcctagcactttgggaggctaaggatggtggatcacctgaggtcaggagctccagactagtctgtccaacatggtgaaatcccgtctctactaaaaagacaaaaaatgagtcgggcgtggggacggacgcctgtaaccccaggtactcaggatgctgaggcaggagaatcgcttgaacccaggaggcagaggttgcagtgagccaagattgcgctatggcactccagcctgggcaacaagagtgaaactccatctcaaaaaaaaaaaaaatacagaagattaactcactgaaaagtcatataagtcgccgttttttaagatggtcaacaggagtcacaaacggaactggaaattccctagcactgtgtcctgagtccttcatctctccaaataccattacagggcagatgggcaagttttattagctcgaaaaatatgtttaaatgttttgattagtgaaatcagttgtattaataaaactcattgcatctctcatgtgcagtcgatgggaacacagtgggggcgtgaagatgctgggtctgtgttcccatcacacaggcaaaggacagagaaacacgcaatgtccagcaataactgaaaactaaatggagaggccgcttctgtctctctgaggagatgctcttgaacagagacctaacggtgggaagagagcgagttatggagatgtcagggggagagtgtgccgggcccaggaagattatgggtgccaagctggagatggaggcgagcctggcaagggaaggaggaggctgaggcagaggtggcttcccgggagtgagcaccaggaagagaggttggcaggagaaccctgggccacatgtcctgggcgccctactgttctgtcagttctatcttaagtgtcttcagaagctgttagaagattctgagcagggaacccacaggatctggtttggggcttaaaagtaaccctctgcctgtcatgtaagaaaaaactgttgaagaggaagctccgtggcagggaggagacccagcaggcaagggcagcacaggcctggaccgtgggaggaatggccggtgtggttcaaagaggtctgatcgggaatatattttgaaggtggagtggacaggcattgcagatggattagaagtgtgtatcgggcaccttcagaaacaaagacagtacaacagccagtcgactactagaaagagctaataaaactcgcagccaccgttttccacgaggcagacaggcactgtgccaaatgctttacgttcgttccacatttgatccccaggacaccgcctggcatatggtagtccagtcctgatgctaccagtaaggaagatgaaggatacgggcccacagtcatgtactgggaaggagcagagccagctgcctcttcaagccccttcttgcactctgtgacctgtctcattggccccatccataatccctgcttttccaattccctccaactttcccacacagggtgcgcaaagctgggtttgggggaaaacgactccttggtccaacacgtgactgtcttattgcttcctcttctaggatgaaaacctcctggggtttccactttatctcaaaacatatgtttaccttggcattcgcagctctgtggcagaggaaacgctgcaaccagcccgtaaggcagccccagggactccccgaccactcctctgactgctgcctctccgggaaaccttccattccatcagcagctgagccagggtggaaaggaaggggccatcccagcttctcccaaggcgccccctccacagcctatgcacagctgttttgtcctgtttgattttgtaaccacggggtagaggagacaatagaaaatatctggaatattgtgcaaccaaacaagagaaaggcagtgggaacatgagggaagaggcatgaataagctgaattggcttaagaagaaaaacaaggtaattatgttcacggaataaaaccccagaatgccactggaagagggaaaatagtgctgggccatgactcctgcctcagcgattcgagaacaggaaggcagacgcgggcccacgatgagataggatgcaggaggtgctcggggagaaacggaagggagaaatggcctttatcagaagcctcttctgtcagcagtggtgtgaccaggattccatgtgctagaaaagccatgcgtcatgcttgttctaggaagaatgtcagtagggctggtggcaggcaagggcctgtgcagtgctggccccctggttacttacacagctgctgggcacctggctttcctgagcatgcaaagatcctccccacactgacctccccgaccaccccacaccatgcacacacatacggccagtagagttgagccctcccgtctctcaggtgtcatccatgccctcctgtctcaggtgctgcccaccaagactcagatcagtggttctcaaaattaagcgtgtgtcagaatctccggaaggcttgccacatcacagatgctcggcatcacctcagagattctgacccagaaggaccccgaggaagctgagaatgtgcattcctcataccttcccaggttttgctgatgctgtggtctgggatcaccctttgagaaccattcgcttcggggagctctcttcccaaacaccaccacggaggacttccagggccctctctgacatcaaaaggtgctgggggcactgaaacaagaacaacacagccaatgatgatggggcatttattatgagttctgggccctttacctcattctattaccttcaatccacagatcaggaaatggaaacatgaggacaagtaaattgcccaggctgtactcaaggtagcagagctgggatctgaaccaggcagaggccaggctcaaaaccacaactcctcctgcctctcttaaataccaacatcaagtttatggaaaatctgatgaggtggctgaacatttggggtaaattcgattccttgcatgacagtcaatatcctaatgatcacagacatccacagtcaccagtgactcaattaccatctctaatttgggtcagacgccagagtcgcacagactcagagcaagagaacacaggaagtaactcggaaatttccatcatcactgctttttgtaaaaaaagtaaatgtctacgatatttgcacaagtaatcatgaaatgacagtaaacattacattgagagaggtgccctatattcatgtcacccacgacattaaaaaaaaaaaaaaaaaccctaacaagagaagacccccagccacaataaggcagggcttctcagagtgtggtccccacaccagcaccaccagcatccatagccctgcccaggcccaccgaatgcaaacatctggggtgaggtccagccggctatgtttaaaggagtcctccatgtgatccagaggcatgtaaatctacagagccctcttactaacactgaacagctaacatggaccctctttaaatctttacaaaaaacaaacaaacaaacaaaaaaacggcagtagctcactcctgtaatcccagcagcttgggaggctgagacaggaggatcactagaggccaggaggttgagaccagcctgggaaacgctgtaagaccttgtttctacataaaataaaaacattagctgggcatagtggtgcgtgcctcttgtcccagctactcaggaggctgaagtgggaggattgcttgagcccaggaggtcgaggctgcagtgagctatgactgcaccactgcactccagtctgggcaacagagtgagactcctgactctaaagaaaaagaaagaaataccaactacttgttccatgctccctctcctctgcccccaaaacagagccaggaatgggtctgtcacaggagggaactctacggctgaatcccatggttcccagcttcaattctcctctcatctctgcacaacatgagatcagctcacttggagtagctcccacgatcctcagactccaatctgaagctgcaagccaaattcctcaggcccccacaaccctgcccctgcaacatcttaccctttcagcacaagcctaactggggtgtcgggccagccaggttcctcccagctccaccatcgtgtcactatgcagcccggtgaggagcccagcctcagcaccttcatctgtgaactggcgcctacaggaggcgactccatgtgagggccgaggtctgaggacggcaccaggcaagcaggaggctctccctcagtaagcctcaggcccctgggcttctgctctttgctttaactgcttttggggtctcacttccctgcctttacctacattaggactcacccctgggaagcctcagccctgccctggctgagcagctctgtcctggcaccctccctaggagatccacacgacgacaggaagagggtggctgggcatgatgtcctggggcaggctgagcagacacaaggacaagcttcacagagcaggcattgtgcaggagggactcgatgggcaagcctcacagcagtcccgtggggaagacactgctgtctcaatacacaagtagggaaaggaggaacgctgaggttttttgtttttgttttttttgagacagagtctcgctctgtcacccaggctggagtgcaatggtgcaatctcagctcagtgcaacctccgcctcccaggttcaagcaattctcctgtctccgcctcccaagtagctggaattataggcacatgccaccacgcctggccaatttttatatttttagtagagacagggtttcacgatgttggccaggctggtctcaaactcctgacctcaggtgatccacccacctcggtctcccaaagtgctgggattacaggtgtgagcccactgtgcccggccaacactaagtctcttaagtgacttgcccaaggtcaaggaaatggcagaagaaagactcaaatccaggtctgattaggagccctgcaaaaaagaagcaaagacggagtgggcccaagggtacccagcttgctcccactgtgggacagccactcaccctgctgtccatggtggggaccctgcctttgctcacagaaattaatagtgttggcataggcaacctcaacacttctaatggccctggcctgcaaacgggttgcacatgagtgtaatgtccaaatgtcaccttctcagcaaagcctttggccactccaggtaaaatttcaggtcccagcccctccacttcccacccttcttatctgctttccatgttccctttatcgccagcctccatccacactctagagtgtacttactgacttcacatgagttgcatcccctccagtaaaacatcaccccacaagagcaacggcctttgtttggtgccttgagtgtccccagggctggagccgggcctggcacacagtaggcactcaatagagttttactgagtatgaatgacggaaaagcagaatgtcggtgaggacaaagatccgtcctgaacacagaatctgtgatggacacagcaaaggagaaaacacagggtaaaagcaacgatgggaatttaatacctgccaagaacaaaatgaatgggcacaggtctggcagacaagaccagagttaagccctcaggctttgctgtgagatagtttgatcccagctctgtcactcgcgagtggcataatttcagacaagaaatgtattcttttagagcctcagtttccccatctgctcacaggaataatgacgcctcacttaaaatgctatcgaaaagcgagaaaggcagggcgtggtggctcacacctgtaattccagcactttgggaggcccaggagggcagaatacttgaggtcaggagttcaagaccagcctggccaacctgaaacaggtgaaaccctgtttctactaaaaatacaaaagttagccaggcgtagtggcgtgtgcctgtaaccccaggtactcgggagactgagatgggagaatcacttgaaccaggagatggagcttgcagtgagccgagatcacgccactgcactccagcctgggcaacagagcgagactccgtctcaaaaaagaaaacgaaatgtgagaaaggaaagactgtaacccaaccgcctggggtcagagcctagcttggctgcttacaagctgtgtgccttcgggcaagacatctccctctctgcacctcggttttcccacatgcagaatggagagaacagcagcagctcccgcacactgttgtgcagattaaatgacccaagaccatgacgttctcagcagatggtagctgttctcagtctcactttcatcactcctgcaagcacgggatgaggagcggcgctggttgtggtctttcctacctgtcaataatgactggtgcagggataccgcagtcgaccctgctgaaagcaacgctcttcagctctccaaggctaagggaaaagaaggtgcagatctcggcaccgctcccaggcctgtgagatgctggactgtgtggatgcccctgagcggggcagcagcaagaagaggctaccctttgtggaagcaatgagaagggggtctctctccagcgttgcaggaggaagtgttggagacgggctctggagccacagaggctgcctcctgccatgctttgacgtctaatgagccaccaggctcccctagctgcctggtgctactggagcacagtccagggcacttcagagagaagggacatggtgtggccaggaggaaggtggacatggacacatgccactcctatgcagttgatttgacgaagaagtcaggtgggaattccatcagggccttacaacccctggagtggagggatggtgagccctctggggaaagatgtgcgccacgccccaccttcaggatcaccctccaccctcagccagtgaaggaggaggtggtctccaggtgaaaacctttacctgatgtcctgctaccagatgtctgtctctcccccagtcacagcaaagccagaatgtgcccaaccccaacaatccaggctgtgcggcagatcagtgagcctgctccacgtgtaccgggatcagcatggggggatccaatcatcactgtactcattcctgtaaccagctgctgctcaggaggggccctgggccccacctcaagcctaaggctagctctgggcccttaatggagactgggaagctgctggtcagcacccagactgccaccagagaccagagctgcaggcacctttccaatccccaggcctaagtgactcctgttctcaaggagcagcaatctctctgctgcttcttcctcctcagccccagatgccttcagcaacgtcaggaatgtgttccaagaccatagcaaaggctggagggtagcaacatatgccactgtggccgaaggattattttgagctgaaagcaatggagaagaagcaggtacaagaaagctttgtcctcccactctctgccaaagagcaagacatgaatttgtaaaggtgctcccccctcactcctctaccaggaagaacagaagttaatcactggagagaaccccagaccctcatcagtccagagggcacccgaggaatctacatgacaaactcaagtaatgagccttcatcttccagcagttcccccacagctgaccttcccacaatctgccacccagaactcagtccttttctttcatcttgtcacttctaagaatgtattattctttgtcaagacgcggtataaggccaagttctaatcacccctctgtgttcctcattgctgagagctcccagcttatactcaacttctgtttgtttttctcttgttaatctggcttttcttttttgagacagagtctcgctctgttgcccaagctggagtgcagtgacaggatctcagctcactgcaacctccgcctcccgggttcaagcgattctcctgcctcaacctcctgagtagctgggattacaggtgcccgccaccaagcccacctattttttgtatttttagtagagatggtgtttcaccatgttggtcaggctggtctcgaactcctgaccttgtgatccatccacattggtctcccaaagtgctgggattacagaagtgagcccctacacctggcctatctggctttttttggtgttgctgtcagtcttattttcagggtcctggccaatgaatctaatatgggtggagtaaaaagttaaattttcttcccctacaactccaagactactttttaattcttcagtaaaaatcactcaagattctggctctacccctcattccaccacaccctggcaggtcacctgccaaagttgttctgtaagcctgaacgtagagatagggccactgtcctcttagtccccacagggatggaagtcttcaacgctttgagacctcgaagtatttcaagggcaggatcttgtagaaacacacactagcacttctgattgttgcggtaatttctttagcaaacaaagcctcaaatctcagtgtctcaacacactttacttctcactcatgtaacatccaatgtttcaggggccatggctgccagttctgtggacaacctcagccagtcggccaacggagaaagagcccctaggtgccattcatggatgctgggccaggcctagaaatagctcgtatcacttccaccccattccaccaggcagagggcagtcacttggccctcagccctttcctaaccttgactcagctcacctaaccatgactcagcctttcctaaccatgattcagttcttgtctaaccatgactcagcccttttctatatgtcaatcaagctccctctcagcacaacagcacttgtcaggaatttctaatccaagtcgtctatgctagtaactccgaaggttgcttaaactgaagtcctaaatagtagccaggcccagattcggtctctggtagagcagcccaaaagatcgccctgacataaccttccttcccgttcctgaagcacttacgctgcatatctgtagaaattgaggttaaaaactcagagccaacctgagatttcacaagggagggtttaaggttcttcaaattaacgaactcacaaagagcacaggagcctgggggactgcctgaaacacgcaagctacaaacaaacattctccctcaaattgcagttctgactccggagggtcactcgcatcctgcccttgtggttaattccaagtgctgcaatggcttcggcatgactgaccttgctctttacaccgtgagtccagcggccgagcagtcactgggaaaacgaactcttggctcaactctaaagcggtgattttaatgccagatgcaaatgaggactgtccgttgtccaaaaacatcagtggtaacttgagtaagtctcagtgcccacatggtccaatctggccctggagtttaagccaaagatgcatagcctagcaaccaaaaaagaaacttgcaaaggcaccctaatctctactggcatgtccttaagaacatttcaaagggctctaattcactccctggtgacacttcttaacatgccccctcctctctccatcctctcccacacactgcagcctctcccatcctaggcggtacctctcctccccgtcctgcacacaccaccctcaaaccctgcactatttgtgtctcatcactcctccctcacctcccaggggagaaggcaggaggagctcctttgctgggcattgtccttctcccatcctgatcatttttcttggacaaaatctcaaagaagtgctagaaaataaaattcacaacactgctccctctgtcatcttacttctttaaaaaaattatgtaaagtatacataacataaaatgtaccattttacctattttaagtgtacggttccgtggcattaagtaccttcacactgttgtacaaccatcaccaccgtccacctacagaacttttcatcttcctcaactaaaaaactctgcccattaaacacaaattccccatgaccgcgttcctcagctcctggcaactgccatcctgctttctgtctccatgaatctgaccactttaggtgcctcaagtgagtggcttcattcactattcatccttttgtgactggcttatttcattcggcataatgtcctcaaggttcatccatattatagcatgtgtcactatctccttccttttgaaggctgagtaatactccactgtgtggatagaccacatttttgtttatccactcacccctctatcaacacctgggatgtttccatatcctggctattgtaaatagtgctgctatgaagatggatgtacaaatatctgagtccctgctttcaattcttttgggagtgtatcaagaagtagagttcctgaatcatattttttaattttttgagaaactaccatactgttttccatagcagatgcaccattttgcattctcaccagcagtgcacaagggttcccatctctctacatcctcgccaacatttgttatttctggttttgaaagtggtcattctggctgggtgccatggctcacgccagtaatcctaatactttgggaggccaaggagggtggatcacctgaggtcaggagttccagaccagtgtggccaacacggtcaaacactatctctactaaaaatacaaaaattagccaggcgtaatggcgcatgcctgtaatcccagctacgtgggaggctgaggcaggagaactgctggaacccgggaggcagaggttgtagtgagcggagatcctgccactgcactccagcctgggtgacagagcaagactccatcttaaaaaaaaaaaaaagaaagaaaagaaaaagaaatgaaatgaaacaaaacaaaatgaaagtggtcatcctaatgagtgtgattagtcatccgctttaaccctcacaacaaccctagatactattatccccattttccagatgagaaaacagagcaggggatattaggtaagtgtatcagtctattctcacactgctaataaagacataccagagtctgggtataaaggaaaagaggtttaatggactcacagttccacatggctgaggaggcctcacagtcatggcggaaggcaaaggggagaaaagtcacatcttacatggtggcaggccagagagagcttctgcaggggaactcctctttatgaaactatcagatctcatgagacttattccctatcaccagaacagcacaggaaagacctgcccccataattcaattacctcccaccaggtccctcccatgacacgtgggaattattggagctagatgagatttgggtggggacacagccaaaccgtatcagtaagtcactcaacgacagtggtggacaagcaagattcgaatgcaggtttaactgcagagccaatcttgtccaccactgtccttgagtgacttactgatacagtttggctgtgtccccacccaaatctcatctagctccaataattatcacgtgtcatgggagggacctggtgggaggtaaatgaattatgggggcagttctttcctgtgctgttctggtgatagcgaataagtctcatgagatcggatggtttcataaagaagagtcatgcctgtccccgcttctcatgggtggcacctggtgatgggctcagccttcatcatggagaggaagggcccctgcaggtggtaaacaggaccttgagggccactgtacagggagcccttccctggctctcagcctgcgatttcctcggcttgttccaaccggagcaggacccttgtttcaatggcactggctacagatggtacctgctctccttgcctctcctgcaccgccgagtgcaggctgtttatgaacaggcagcacacagggtctaagagctcctcaggactcacagtgacagaggaagcatcacttcaaggcctagtttccatttatgattctactccccctcgtgttttcggggagggctttgttggtttgtttctaacaaacccaataaagggtcaggctgactccgaattgcatgactagagtaagagccgcactgtaaggcaatggagcatgcaactgcattccaagcttgccatgaggcgttccttggccatgaggaacagaaacaccgagagaacaagagacactccttctactcttgtcacactgaagctgtggaagaatgacagggcagtgggctttggactgacaccagtgtcaccaatatcttgtgcaggtttgcagctgccaacctggaagggaggtctgtttcagaatcccctcgcaggcaggggcctgggaaaatactcaccagccacctcaaggaaggacactcttacaggacacttactttcccagtcagaacaatgaagggggctctgggcctgcatttgaaaggtcacggctggaaaccctgcaaggggagctgctttgcttgctcagccctcttgctttccagcccaaaaggcattcatgcacagccctgtgttttgttggtctctgtctagttccaaagtaaatgttggttctacatctccaaagggctggtagaagcccatcccatgcaaaaacatacctacatattttcaccattttctaatgtatttcagccattatgtaaccttagacacaaccctggcaggaagaacaagaaaagttgaacttggtcccctggggcaactggtttcagtgtggacttccagccaagtctcaaacacaaacctcctgcagtgggatcttattttgttgttcccagggcagacagatcttcttggaaggatctaacaagcgctggtagagaacttacagattttgtaggcatagatggagcctcgccaggccttaaggtatgggaagcacacacactgcacacttccatgggtgtgcatgcaccccaggcatgcatgagcgtaaaggtgtgtgtgtacgtgtgtacatatgtgtctggtatttgtgtgtaggtaagacacatgcatcacttacatgtttattcaccccagtcactatctctaagtggtgcacagagcaagcacacagaggtcaaggcaggaatgttctcgggatcgccagtcctcgtcctcttctgttctcttaggcataacagctcctacacacagtctttcgcagacgctctccaacgatcagacacaacctaattggcattccggaggaaatactctacggatgcttaaagctaaacctgtgagaaagggaactagtttcctaaagcctccacttttttgttttccaggcaactcaatcagccgagaaatccaagctgaatttgtgggatacgaagccctaaaatgaatagcatgcgactttcctaagtcttttaagcagatggtctattttttaatactatgatgaaaatgaaccttgccaaaaatttcttcactcttgatggctagatgtaagcatacttgattcccaaaattgaaacctttcataaaacctctcaaaaagcaaagaacatggtcaaaagcataattataaataccaaggtagcctccgacaaacagatgaatttgctaaagactgcaagttgtctaatttggaacaacgaatatgtaattaagccttcccctttgtaaccttctcagagtagacaccaacgacatagtgtggataagcccagaacagggcccaaaagtgagatgggtcctaggtaaggacaaagccacttcagaacttactcatttgaaggagtcatttgccctcgtaggcaatgtctggagactacactttttttttattgtattttatccattccatagccatatttcatcatagctttaattttgcattttgctacaggctagtgatattattttttcataagtttatttgccatccatgtatatgtaaagtatctgttcaagtggtttgcccttttatttttatttatttatttatttatttatttattttttgagacaatgtctctctctgtcgcccaggctggagtgcaatggcacaatctcggctcactgcaacctccatctcccaggttcaagcgattctcctgcctcagccttccgagtagctgggattacagacacccaccaccacacccggataattttttgtattttttttgtagggacagggttttgccatgttggccgggctagtctcgaactcctgacctcaagtgatccacccacctcggcctcccaaagtgctgagattactggcatgaaccaccacacctggcctgaagactatacttctaacacacagtctggaagcacagttgaaatttgccttctgtcagcttacaaggaataacaatacagtggaacaaacagataggagagccccaagaagcaaagaaacccaagagctggtctagccagtaaaacttgatttgtatctttgtatctcaaacacgacttgccagcctcacccagcaaagaacacttttgacaccgctttttgacaacccaaaaccaccctcacagaatgaagacataccaacaccactgtaacacagaaaacgctggctcacttgtgacggaaattccccagagggctctacacaccaaccagtgaggacgccagggctgggataagtgaagagtcacagggtgaccaatgtggaagggacgaagcacagtcagacgggcccgttttcatatgtttgtgtttatgcataaaaagtggcatttctttcttacctaactgatgacatcacagggttcacagcttctcttcctctttgacacattcaattaataaaaactcaacaggtccagcacacaacaccgtccattacccacacccactccccctcacctcttgccagttccccagctcctcttggtttcatggcctcatggtgggctggcctgacacagatttccaaaaccgatgctttgttcccaaacaccaccgtcctggccagcaatatcccccacccgcacttcctccacccacacgctcttcctcacaccggaagggcagtgggcacgtctaccaagctcccctcaggccacccaaacctatcagagactgtggtatcagtgccaggggtgacgcaaggagggggtccttctccccaagttcagggaaagccatgggaccctcaagccacagccgctgggccccagcgcacagaccagactccaagctcctccacagcatcaacccggccttcagcctgcaacggtggaacatctccacttcctcctgtaggatcacccctctccctcactggacaacgaaaagggaggcccttccattaattaaaaaatagtaggagaccaagcaaagggcaaaaagaagactagcttgatttaggctggcacaaaaaccaccgtagctcaatttggaggcacgggtaggagaaaaccaatgctccacatccactgagcaacactcagacacctgcctagccagccaggcttggagagaagcggctgctgtcttcagccactgccagagagaggcccagagggtatgcatctggaagaggaacgcaaagggcaggcacgacctcacctctgccaagtccccatcttgtcacctccctcttctcacccaggacagcacctatgtcacaacagtggctggaaagcagacagctctggatgaagaattcaacagaggaaatgtgcacaccccacaaagaggtctgacatgtgcagagtgggggccactcagtgaggggatggtggcttgttccagatcctcctgccttacagtgacttcctccaacgtggagatcagaattcccaagggggtcatccttgctatccttcccattccagcgaagcctaagaagtccatatcggtgccaggagggaaggaggaagggtccttctggtgttaattttttttttttttttgagacagtctcactctgttgcccaggctggagtgcagtggtgcgatctcggctcactgcaacctccacttcccaggttctaatgattgtcctgtcgcagcctcctgagtagctggcattacaggtgcccgccaccacgcctggctaatttttgtatttttagtagagacagagtttcaccatgttgatcaggctggtctcaaattcttgacctcacgtgatccgcccacctcggcctcccaaagtgatgggattacaggcgtcagccaccacgcctggacctggtgtgactttttgaaagcatgcccattcatctgctcactcaaatccacccagtacagaggagtgtggtgaggcctctgcactgcagggctcaggagaatcagggccttggaaacgccaactttgcctacaccactagcacccctgtgaagcctagagatgcaagccttgtgtttcaatcttcacccgaaagatctgaagggtgcagtgggcattggtcatcttgggctgtctggcattcatcctcccgcctggctgaagcacagtgatcccctttgggaagctttaccctcaacatgcattcttcgtgggaggtgctgttgcctctcctatggaagcccaaaggccagaatctccctcactccagtgcaggtggggtggggaggggcagaccacaggaccctgggctgttggggggagatggaggtcactccccagccgtggtggcacatggaccagacaggccttgccactaacttctatgtgatgtcagtggcctccccacttccagagctcccccaggtgctgcctgtgttccaagccagtctcccagcctggcggcagcccccttccagtaggtgcccttggctcattcctcacaatcagaaatgcagactgggcagtggagacaaatgggctgatgcagaggagagtatttttacggaagccccaaacctcgcagcgcctcagagtttattccaatgcttcattcaaactgagatctgaaatctattttaaactattttaaaaacactcattaaaacacttaacaataacaggttaccctggggggactactgagggtgggggttaggccataaggaactggagggctgatcgccttcttcacctcaatctgagttatggtttcaagagtagagggatgggactgcacagctgtgtggaagtactggatgccactgaattgcacacttaaaaatgcttctggtggcaaatgttatgtgtattttaccacagtataaaaaagcacgatttaaaacagaactcaagatattgctttaaaatgatttcaataaataccagattgagccaaaaaagatgagtataagcataaattaaaaatccatcaagttttgccctctttacatatatgtgagctgcaccctaattaaaacaacaacaaaaaaacgctgttatataccaaattacacaacactggcaacccaaagctttcctagttatctcgaggtaccagacagctcctttcctacagaactcaagacacagcatctcacgctcgagctggatcctgaggtttcaaggcagctgttcaaaatctcttagcattggcaagcatgcatctacatgactcagattatttttccattctgcgcaatcaaaacaaaatttgaaaaataaactgatattgggatgagaaaatcataaagatggaatacagataaatgggtgccagtggttagggaaggggagggtggcagggagtggctctcaagaggcagtccgagggggcatctcagccgccgtggacttctgttcctgattgtcatggtggatggacaaagctgcccatgtaataagatgtcacagaactttatacaaaagcataccaacaaatgagtgcatgcagaaaccagtgaagcctgattaagagctgtagtctagttcactctatcgggtccgtccatttcctggttctgagagggtactgcagttatgtcagatgttaccactggacaaagctgggtgataggtacaacagacctctctgtactcttttggcaatgatcatgactgtataattactcaaaataaaaatattttaaagtccataaataaattggatgctgagatcaatatacgactgccataaccccagtttttatatttttctgttcatcgaatcatcccattgttctgactggcttaatcatttgtacaagcaaaatatgacacgttaagagaaacatatactaataaaacaccatatacgtttaatttttttaaaaaagaaaaaaaggcatcagctcccttggagaagctgaaaatcactgaggtattagaaagaacacgtactggggatcaggagataggctggttctgccctcagctaaccagctgtcacgtgaagaacagtgactccacccagtcccgaccattaaaagactttcttgttaaggaagtgagacgcatgcacctgggaggggatatgaggacataagatgctccctagtaacatgtgacaaagtatcaaatgagcggtgctatggattgacttgtgtccccacaaaattcttatgtagaaaccctaactcccaatgtgactataggtagagagaggaccttcaaaaagctaattaaggttggccgggcgcagtggctcatgcctgtaatcccagcactctgggaggccgaggcggatggatcatgagatcagcagatcgagaccatcctggctaacatggtgaaaacccatctctactaaaaatacaaaaaattagccaggcttggtggcaggcacctgtagtcccagctactcaggaggctgaggcaggagaatggcagaacccgggagccagaacccgggaggcagaggttgcagtgagcccagatcgtgccactgcactccagcctgggcgacagagcgagactctacctcaacaacaaaaaaagctaattaaggttatgtgaggtcacagagtaggggctctaggccagtatgactggcgtcctttataaggaggagagagaacaggcaggtgcgcacacagaggaaaggccacaagaggacacaggagaaggcagccagctacggccaagaggagaggccctcaggagaggcaaagtctgccgacacctggatctaggacttccagcctccggatctgtgagacaacacatttctgttgttaaagccactcagtttgtgtggcattttgttatggcgcccgagcaaaccaataaaaagtagtatgatgatgtggcttaggaaatgagatgatgcttgattcgaagtagctgcctgctcttcaccaggggcctgaacacaggatataatcacaattaatggcatattcccatcaaaagagaaagcttttatatattcaaaagaaacggaaagctagccataaatcctatggaagaaaaccacaccactggatacattgttttaatgaacactggcattggagtcccttcacctgcattcattcattcattcattcattcagttcttcatttaatcaaccaaccaacaggagtgaccaaacctctcaatccagtgccaggtgctgaaggacacacagcctggaggccagagctgggctctgttttgctcaggggctgccaggggagaagtacaggcaagcgccacacgattgagagattatgtctccacggggcaagccaggaagcaggaggagcacggagcagaggcgccccggacatgggtactgtggccaagcctgacccgtgaaccccaggaaagagcagccactcctagaaacagcacatgcctggcagccctgttgacagacagaggtcagccggtacaagtatccatggccccaacctgacctgggcctgggtcagccagcactccagggaagcatccttcacacggcctttgtctagcaattccctcatggagacagcccccaaataacaaagcaggaggagttggctggttgcttcttgacatctcgctctcagatctggttagaggaccgatgaagtgtaatatattaaaaatcattttgtaaactctaaaatgtgacatgaatggtagctatcattatattagattttgaagggtcttgtgagtcacctaacccaaagtgatcatttgatggattaagaaaccagagtggagacacatccaaggccacccagctggcacgtggcagagccagaacaaaggcttagggctactcactgctggggctcccccagaagctcaggttttcaacatgtgaatttcataacagtatatatttttcacacctatactgttttcttcgattttactacaattctaaacatacacgattcacaattttgattctggcaatgcaatactatatttcagcctcccgatgaacaaaggttcgcgttatggcagggaaaactggaaacacccttggcattgtgcctgtattaaccaaacactgtgtgcaaagaatggtttccatttgaaatccatgagaactcaagagcaaaccagacataactgaggacgggagagaaaggaaaatggcaggtgaaggggaaggtgagggaggggaaggtagagggggaggggaaggtagagggggaggggaaggtagagggggaggggaaggtagagggggaggggaaggtagagggggaggggaaggtagagggggaggggaaggtagagggggaggggaacgtagagggggaggggaaggtagaggggggaggggaagataagggaggggaagggaagatgagggagggaaagggagaggaggaggggacggtgaagaaggaaagggtgttttctcagcactgcatgccactttcagtgctgtctttagtcactaaaaagcaagtagcctggcaccaaggcaggtggaagagattgcatgtcttataatctacagtcacacttcaccccttagggtaaagctcaataaaggtcatgtgcatgcatgagaacaaactgctaagctttcatctcatgaccacaactgtgtaacttagcaggctgcctctcctgcctgggtgaccaaaatgctcagagccaaatgcacccccaactgcagaccccttggaacggcctggtggcttttccccttggtgtcactcttcatagcttccttaatgacccttcatctagatgccttctgccatcaataacttcaaatcatttcaggaaaataaaaaaaggaaagtcaaagaccaacttacaggaaggaaggcaacagaatgtgcagtgcttgtttgaggacagctcctccactgtgaccaggaagtctccagattctcccagggtgtatcagccccttagattattatttcaactctaaacttaccaacagtgtcacacggttcatccttgtgtacacagaaatctgtcctaaaaaataaaaaagccatcatcaggtatatgcagtatccccaagaatgggagaagaaaacactgtgaattaacctcaagtagtcatcctgcaatgttatttttccagtggacacaggccacagcgaatgataacaaacagcagcgtttggcaacagtaatccatccacatttcccggggtaggtccacttaccccacatgagaaccttcttttacagatgaactattctatacgtaacagttgctggaaggactcctttcagcagctgaaaatgttttggaagatgtttgccaagtcactgatccgagacaattctcagacaatagcatccaactgcagtggcctccccaagctactctacttccccaagctactctatttgggcagcaactggtttttgatgctgtaatgaccatgtattgctttcacaagaagacaacaaaaagtcatttctaaaaactgtattcctctactatgcagccataaaaaggaatgagatcatgttctttgcagggacatggatggagctggagcctattatcctcagaaaactaatgcagaaacagaaaagcaaacaccacatgtcctcacttgtaagtgggagctgaatgatgagaacacatggacacatggtggggaacaacacacaccagggccagccgggggaggcggggtgaaggagagggacagcatgaggaagaatagctaacggatgctgggcttaatacctaggtgacgggttgatctgtgctacaaaccaccatggcacatgtttacctatgtaatgaacctgcacatcctgcacatgtgccccagaacttaaaaggtgaaggaaaaaaaaaaactgtcttccttaaagctccccaggatcccctgggtgggtggtatctgtggaccagtgagacagcaaagatgcttgaaacctggtccagccctggttctgcaagtacaaggggttcatctggcctgctgtggggaaaccaggggtctaggctcttcttttctaatactggatcattcctatgcttctttataagtttccatggtcagggatcaaccacagagggttggctggggcaggactcagccggctgaggagccacaacctggcccagacacggcccctcccaggccccacacccatcttctctcagggcccaaagaacgcttgagatccacacttttcataacctcactccaaaaccaaggtaaccttcagggaaatggagaaggaatatcataaagagatgaaaaggcctagagacttgatttttccatcagactcccttttagaagatgaagcaataggcgatagaagcagcactggcagaggggaaagcaaataaaattagagccatgggtgtgctcactggccccatacctacctagccccagcccaacattcagcacccttcccaattctcgtgttttgagcaacacacacacacacacacacacacagctggcccaggaccttgctccagggtttctcagagttgtgaacaggacatatttaaagctttgccccatcatctaagctgggcaaagggagaaagggaccaaggcctcagtctgacagaagagaagtgaagccgcaggccaaggcaggcgccattttgcagagagccagccctgttggctgaggaggactccacctccctgcgttctcccatccaatggctgccctgaggggaaacagtcagtctcaaatgacagaccccgaggtaccacccactgcttcactggaggaagaggtgtgttcagctcagggagggagagccacactcagttagaggcctgtcttgaaaaggtcagccgaatctgaatctcgatccttcctgttcaaggtcctttctcagaagagaagcagcaagccacctgcctgcaggggctgctttatctccagggaacctggctctgttccattcattatcaggggcactcactttttaggtcatcccactgccaactcatgacaaacccccaggcagggactgtagggttcacttcaggaatgaaaagagggctagacttggctcccagcgcctacatccattgaaaccccaaggtgcgttcctcgaggctgacttggatctgcatgacagggctggctttgtgggtgtctgacccatgccctgggctaacactctgctgtcgcggggtccatattttcattttgcatggggcaccacaagttacacagctgatcctgtgcgtaactcacagccaggcatacagttgggacttaatacattcgtttattaattgactgacgtttccagaccctttcaaggggccctgcaagctacccagcagccatggcctcacgagcgtgggaagcctgggagcgtaacatcaagttccatggatacttgctgaggcttcaccacgcgcaaagcctggcaagagggtcccctggcagaaggtaaagggaagggtgccccgaggagttagatggtattatgctggaggggaaggtctggccagagggatcctggtggtgcagcttcgggccagctgtgtctgctatggtgtctcccaggcactctcacccagagcacaggcccaggctcgaggaggagttctcgacttcagggaggagttctctgcgttctcagctttctgggtcagatgtggaggccaaggtgaagcccccccaggtgctgaagccccctaagccctggcttctgtgtgggctccgtgtgaccccaggcccagtccactcaggggtccttccaagtcccagacacagctgcagaaaacccagcttcaaccgcttctggctcagcagctcctgctagacatgtcatgctcacgtcctccatggcagccacctagccacctgtttgtcagggaacgtcttggagaatacactgtccggcttgaccacagcctggaaggtgaaaaaagaaccttaaacgggaggaaattctcacgttggcccgtcctagctcaggacctggaagctggcccctgagcgcagccaggcccgtgcagcctcagctcgggttacggtgggaggaaaggacagtttctccagggcagaagctgcctctcacccaatctccctgtgaaaacatcagcccattattatcccaacctagggaattgcagctctctacctctagttattatacaaggcttcctggccaactcagcttcctgcccgactccactgcggcctcccccgtccttcaaggagatcttcaatttaacatctgcgaggacccagaagacgggacgtgcactgatctgttcagtccagcagctccacagcagcaggtgagagggactgtgattgctcatgtagcttcaaggcgtcagcccaaaatgcagaagaaagctcaggctcccgggctggcaacagctaatagctatgcaagacgccaaatgcatccttcatccagagcccagcagcctgtggctgacaaaaccttgttttctctgtacctggatgaggacattgcccatgcccccagcatcctcatccagaaccactcccatgcaattaggatccctctcctatgtgtttagttaaaacagaacatttttactactaatttttttattgtgctaatacatgaacataaaatttactatcttaaccattgagtgtaaagctcagtaatgttaactaaattcactgtcatgcaaccatcaccgctatccacctccaaaacctttccatcaccccacaccgaaactctgtacccatgaaataacaactccccattctcccttctccccagcctctgacaaccaccattctttatctctacgaatctgactactgtaggtacctcacataagtggaatcacgcagtatttgtccttgaggttcatccatgttgtagcgcgtgtcacaatctccttcctttttaaggctgagtaatattcccttgtacatatacagcatatctgtttacccattcatccatcaatggacatataggtcactcccacctcttggctgtcatgaataatgttgctgtgaacatgagtgttcaaatatcagagtctctgctttcaattatcttgaatttcagttcttctgggttcagaagtgggatcacgtggtaactctagttttgagtttttgaggtaccatcatctggttttctattgtggctgtaccattttacattcccatcgatggtgcacagaagagttcaaatttctccacagtcttccaacacttgttattttccattgttttgcgtattagtccattttcacaccactgataaagacatactcaagactgggaaatttacagaagaaagaggtttaatgcacttatagttccacatggctggggaggcctcacaatcatggtggaaggcgaaaggcacgtctcacatggcagcaggcaggggaagagagcttgtgcagggaaacacccccttatataatcagatcttgtgagacttcttcacgatcccgagaacagcacaagaaagacctgcccccacgattctattggtccctcccacaacatgtgggaattcaagatgagatttgggtggggacacagcaaaaccgtatcattttgttttacagtagccattgtaaaaagtttgaggtatagaaaagaagatttttacagaaaatatttcctttgtggtaagttaggagggtgaaaaatgaaaagaaagtctaactcatagcatctttgcattgagggtgcgtcatgactgctgatgtctccttgtaaaagggctaatacagacgtcctgtcaacagtcatcttggtgacatttattgcctctggaaaaaaaatgccattcatccccaaatgcagaccacttacaagtgctttctccactcaatgaaacagcaggaaagagagaaaactttttccaatgtagggaaaattaccataagccattaattatttcttagcaaaacaccagaaactatagattttccacagtatttatgaaaactcttctcaaagtagaaaccttgggagtttagctgcatattccacagatgacgttgtttagagttcctctctaggaaagtctttcagaccaaatataattaccatttggaaaatcagctccatttacttatgatcatgcacagacacggttcccaaggactcttgcttgctccctaaatcgaatccactctcaaatcatggtacccttaacctgaatgctgcggcacccagggtattctacagaaagcctcacagtcgccaaatgccattgcaaagtgccttgagcaacagcggcctctggccagtgagtgtgggcagccactgctcttggggagggcggtgcctgaaggctcccagtgctcactggagtgggcaagtccaggtcaaaagcatgggccaggtcatgttcatcccttggtccctggtgcctgctactacatcagccatgtcatagacgatcagaattattagacagactttttctaaaatgtctcttcaataactgattgtctatgatagagcttatatatggattatatatttaatcatatcctgtagaagcagcaagtgttctcctaagggattggcacgctacaaagcacactgtgaaatgtgtaacaaagcatactcagggctggcaatcgacgaaccatccacaagagtgagcaggcatccatttggcaatgggtggtggcattgtgtctattctaggattttggtttttgtttttcttttgagacagagtttcactcttgtcacccaggctggagtgcaatggcatgatctcagttcactgtaacctctgcctccccggttcaagcaattctcctgcctcagcctcccaagtagctgggattacaagtgtgcaccaccacgcccagctaatttttctatttttagtagagacggggtttcataatgttggccaagctggtctcgaactcctgacctcaggtgatccgcccgcctcagcctcccaaagtgctgggattacaggcatgagccatcgctcccggcttattctgggatttttgaaaggaacgaaagctgcactgtccggtgtctggggctggggtcacagaacttccccagatgactgagacgtcatggggctcagagtttgcagcacatggcctgagaaatgcaaccaaaagcctttcttgactcaaaaccaaatgttaagtgagatttaactctttgtggatggccaggcgtggtggctcacacctgtaatcctagcattttgggaggccaaggcgggcagattacctgaggtcaggggttccagaccagcctggccaatgtggtgaaaccccatctctactaaaaatacaaaaattagccaggtgtggtggcacacgcctgtaatcccagctactcaggaggctgaggcaggagaatcacttgaacccaggacgcagaggttgcagtgagccaggattgcgtcatactgcacttgagcctgggcaacagaggagactccatctcaaaaaaaaaaaaaccaaaaaacaaaaaacaaaacaaaacaaaaaacctttttgtggagaaacaaactgtccccaagctaaagatacgataaagttctcccttccacaactttacttccaaattcacagagttggaaaagcaagcacgcaatttgggaagtagtttctttaaattaaaaaaagtcattaaaattcaaagttgacatattcttagcaactctaataaaaagctggtatttttaatctaatgcattaagttatttaggaatatttctgtgtattttataaagggagagttttggtatgaacatgtaacacattttgtttaagttattaaagtaaagcaaccaaagaaaaatcagtgttctcaaagagggttgaaaacataagaaaaaaatgatatagccacatcgacatcaatgacatacaacagttgtatcccccaaaaaagaaatgtccaagtcctgaccctcagtacctgtgaatgtgaccctatgtggaaaaagggtcactgcaggtagaatcaaggtaagatgtggtcacactggagtaaggtgagcccaaatcccatgactgttatatttataggaagagggaagtctggacagagtcacaggcagggaaaatgccatgtgacaatggaggagggacaaagagggacacagctacatgcccaggcatcgtacctacctcagaggtggataccaccgttaacccccacttactaatgaggaaaccaaaacccagacaggtggcccaaggtctgatttccaagcctgagttcttaacaacatgcctatttcctctctgaagggaaacatcttttccctctcacatgtcagctacaggccaaatcccatcttacctggtcacaaacacggcagcatccaccaggggcgggtcgtccttcccgccgggaacctggttattgccgaggtatcgcgctcctccatactcctcgttctgccagtgacagaagctctccagggaccgctcaccatggtgcccaatggacaacttagcctaaaaaaagtcagaggacagttagagaaacaaacgcctgggaggccagagtttatttccagactatgacaaggacgttaaggtggaggcagtcactcactgagacatcatttgatgactcacggccctcgaagaaaagcctgatgctagtgggtacgtggcatagatccagagagaccatcaggggccttacatataggtgcaagtgaagactatgctgtttttaaaaaagcatcttcttttctgcaaacagaacagtatcccaaaccaagcgatgctccctcagtctcatggtggtggcttgacccggcaggtaacatcagcatgtgggaaggcgctccattgaaagaccagaaaatgatgctgccatgaacccaaactggggtcgaagctctaatgtagtttcagaaggggagccacaatgccagagaccttgccatcaagctttgcactatcctagagactccatccgagaccctccgggagaggtggatgtgtgtgggctcactgcttagggttccctgagattctcaacagccccccctcacaccatgcttccggtactgatgccggctttcctctcacgctggcaaagccacagagagtgacggagactggcaactccctggagccccgcttagcattcaacagcagttgagaagctccagcccagccacattttctgcttgcttgaaaggtgcctgtggggacttacgggacgttgtcgtagcaggacaagcttggtcacttgaatgttaattttaatccccaggctctggtgctgaaacatattgtatacctatcaagacagaaaaaagaaataaagatataaagataaaaaattttaaaaatacagtagtatcctagatgggaacttgggacacagaaaagagattatgtaaaaataaggaaatagaaataaagcgtagactttagtttataacactgtatcagtattggtgcattaattacaagaaacatgccattctaatatgagaggctcatgatggggaaactatgtatggcagctctctgtactaactgatcaacttttctgtacatctaaaattgttctaaaatacaaattccattcataacaaatttaaaaatcaatattaaaaatataggttgtactcttccagtactaaaaaaaaaaaaaaacaaaaaacctaaagaataattatgtgaaattcaaatgtcagtgtccatacatcaagtcttattggaacaaaaaatacatacgtgagaaacataacccagattttatttaaaaggttgtccaggaaagacaaaaatgtccttaaaaatggatttgccaaaagaaaaatgtatataagagaaacctctagaatcatacacacgtgtgcaaacatacatatacagtatgcttatgtatatagataaagctaagctggaaatagttggttaaaaaaaaccacgcatacgaaaggtggttttgaaaaaaagaaggggcagaaggttgaaaacttccattctgggctttcatgcttggggtttaaggcgaccttcatgaaggggctgggggagacagatgcctgctgctgaacgccagcctgtgtcattgctaacccttgccacaccccaccaaggctggcatctccactactctcagctgggaaacacagaaaccagttcatcgaggtaaagccacctgcatgagacccacagccagtcacaatggcttgattcaaactcagccctgtccagccaaaaggtccacattccttctttattccctcaagtcccattgtaaccaaagtttgtcactgaaataaattgcaataacagaaaaggacctatctttctcaattttgcatgtcttgttgcagaacttaattgtaaggacctcaacatcaagcagtcacagcaaagtgattcaagaggaagagaaggaaaacctggaataaggcgaaggagtcaaagttgacatggatggaaaaagcccactgcagctgacgagccccaggtcattatgactctgccgagttcctttgccataacgcagagaaaacaggattgcgagaggtacgcggagagcatagtaaaggtagtggcagatggaaggttggagggaacaagaatgagaatcttttaaatattctacttggtttttacctatagacataacccaggagggagaattttccagcaggaacattaaaactttctccagcaggtgctgtgttcacgctatcaatacatcagcatcagcagcaagcgttaagcacggtagacagcatcaccagggtcaactcaggccgagtggagccgctcaacacggctgcacccagcccacaagcgctagaagccaggcacgcagtgtttgagcatctccgtgacaaaggaatcagccgtgtcactgctcgaattttactctttgaaaaccattattacagttaaaaaaaacctatctttgtgtgacgtaatattctttcacacaaggaaaaatagaacacattcagttgttctgttctcacttctgcgatttccaaaatctcctttcctcaggaacaactagctgttgttttcttaatactggaccatccacaagccagttctgaagtcacatattcatgtcctatccccaagcctgggggaggaggggggaggcacccaacttgttcctgttttgatagttcgagaaccatccaatggctgtaattcaaattttccttaaaatattcagcatcagaattggatctaaactggtaaatttcagttcaaaacatgaaaattaggaagaatgaaaacttgaagttatgagggagaaaattcaagttgcacagtgttcactgagattgcacagcacaatctaaacactgcctgtcacgccaagcccagtcaaaaccagaaacattaaggaatactacagatttaaagaagtaacacgagaaagcaatcctcagtcatattctgatatgccacaaaaggaaagactgcaaggaacagtgcaagtttcaggaagaacaaaactgtaggaacaagctcccttgtcaaaatcacccattttctccttggctggctgatgacagttcagagccacatgcaccccatacaccattagcccaaagctcagtcgcctcccttggaacaaatgccactaaaaaggtgagagatggaagggggatgggaaagtttcgtgttccaggggctggggggaggcaaaaatgggaaggtgtttaatgggtacagagtttccgttttgcaagataaaaaagctgtagagattgattgcacagcaatgcgaacctaagaataccgaaccacacagttaaaaatggctaaggtggtaaatttcatgttaagtgtattttactacaattaaaagtacaaagttaacgaattaaaaaaataaagcttcatgctctaaataatgttctctagcaagccttgtaagaagaaatttccccttgacatgtaactagggcactgacgtccaagagagcaggtaccaaggcctgaacacagctcaagcactttgtcacctgccaggtgccgaccacaggctctgacaaggctcagagcacagggcaaggcgcacgttcagaatcaactgaggtcccgtgccaagccaggcgagccaggtgacaatccgacgacagccacaaaacacaaggcacaagcctcaaagacatgtaacaaagtctcgtcttcttttttttcccatggaaactcatgctcaggagaagtcttggaggcaacggctatatgtttagggagacacctggttggggagggaacagcgcagccaagcgtctggaaattccgtctccggcgtccagctctggcggcatcccagcaagtgttcagtcctggctgcgtttgtcacatttccttggcagcctaggggcctagcagggtggacctgccgcctgcagcacactacggcttctctggctaggcaatgtagggacacagcaagggaggggcagacaggtaccagagaaggagccgtggttggaggcacaaggagtggagctgctcaccacgccaggctgggcttcacaagggcaccacctacctgtgtgacccaaggcctccccccagagccacacagggacctgtgggtgacactctcaggttgcatacactgctattaagacccccaaacaggagaaagctatgctctgtagcacagtgtctgagtggggtccccaaagcagcagcaccaacatgacctgggcacttgttggaaatgcacattctggagtccaccccagcccccactgaatcagagaccctgggtgtgggcaggtcatctgtgttgaacagtgctccttccccaccctgctccacacccaccggagtgtgggaaccagccagtgctctagcactatgctagtcttgctggtcaccagagagaggcttgtctcttccacatggtaactgagtaaaattcatgtcattttccctccaaacagaacttgcctggaacagctcaggtttttcattccactccacggtcgttaaggaagctaagaacaaccaaagctctgttaaactgccccattttccaatttggctgcccacacccacggtttctggtatcagcaccacctgcttccgtctgcaatttgttctttaaaatattcctgctcccgtgtcaccgccaccccaaccaaaggagaatcacatgatgtacacacaaaaccagcacagcacatctggaaaacccacaactgcagggccagagtgctgctgggcgcctggcccgatggagccttcgccctctacatgtacctgcacaggtgagcggtttgccagggacacagagccaggagccgaactccattcccccaggtaagggcaggcagaagcatattttaaaacactaactggagcccatccctcttctgcttaagcccgtgcagcagcttcccactgcctggaatgaggctgctctccacaccctggcctccccgcctgcaaggtcggcctgcccgcttctcactgtgcccccatcaccctccccatcacccacaagcaaccagctatttctgtgcttctccaatgccagcctgaccaccactggctggttgcttatgttggcttaacaccttcccctctaaggccacctcactcctctcagagaggtggccctgatacctgtcactgctgtcccctggttctctgcagggcacttaccacgctctggttttccttctcactgatttgcatgttgaatgctgtctgtcgttcctactgcatgagctccggaggatgagacctccggtggtccctactctatcccagcagaggatgcaagggtccctagcacacactaagtacccagtaaatcaatctgagtagaatcagtcaattgtttttgtatttctggtgaaacaaacagaacataaaatttaccatctcacccactagtgcacaaccgtgtacttacctgtagtgttaattacgttcacgttattgtacaattaacctccaggactcttttcatcctccaataccgaagctctatactcatgaaacactaactcccactgccccccacccaacccccattctactttgtttctatgacttggacactgcagttacctcatgtaagcagagtcatttagcacttgtgtttttgtgtcacttggcatactgtcctcaaagttcatccatgctgtggcgtgtgtgggaatttccttcctttttaaggctggataatattccattgtatggacaccccacgttttgtttatctgcccatctgccaatggacaccttggctgtttttgccatcgttcggccattgtgagtaatgctgctgtgaacacgggtgtacagatacctcttccaggctctgcttttaattcatttctttttttattttcgtggtaagtctaaatgaatatatatttataatgtcaacatttactttagattcaggggtatgtgtgcaggttggttacgtgagtatattgcgtgatgctgaagtttgggatacgaatcaccccatcacccaggtactgagcatagtacccagaggtagttcctcagcccttgcccccctccctgtctcccttctctagtagtccgcagtgtctgctgccaccttttaaaaaattttatttctaatctttgtgggttcatagtaggtgtatacatttatggggtacatgaaatattttgatacaggcatacaatgcataattatcacatcagggtaaacagagtacctatcaccttaagcatttatcctttgtcttacagacaatacatttacacttttagttattttaaaatatacaattactgactatagtcaccctgttgtgctatcaaatactgtaacttatccatttttgtaactattttattgttgccatctttatatccacatgtacccagtgtttagctcccacttatgagtgagaatatgcagcatttggttttctgatcccgcattaattcacttaggataatggcctttagctgtatccatgttgctgcaaaggacgtgagttgttcttttttacagctgtgtagtattctatggtgtatatgtaccacattttcttttatctagtttaccactgatgggcatctaggttgattccatgtctttgctattgtgaacggtgctgtaatgaacatatgcatgcatgtgtttttatggcagaatgatctatacgcctttgggtgtatactcagtaatgggattgctgggtcaaagggtagttctgtcttgagttctctgagaaatctccaaactgccctgcacagtgactgaactaatttaccttcccaccaacagcgtatgagcatttttctctgcaccttgccagcatctgttatttttctgactttttaataatgaccattctcactggtgtgagatggtatcttgtggtattgatttgcgttgctctgatgattgctgatgtggagcatcttttcacatgtttgttggccgtgtgtatgtcttcttttgagaagtgtcagttcatgttttttgcacactttttaatggggttgcttttgcactgtttaaattccttatagattctggatgttagacctttgtcagatagtttgcaaatattttctcccatcctgtagcttgtattcttattaaactaccaacatcattttcacagaattagaaaaaactattctaaacttcatatagaaccaaaaaaggggcagaacagccaaagcaatcctaagcaaaaataataaagccagaagtatcacattacctgacttcaaactatactagaaggttacagtaaccaaaaaacatagcacttatacaaaaacaagacacacagaccaatggaacagaaacaggaacccagaaataatgccacatcatacctacaaccatctaatctttgacaaagttaacaaaaataagcaatagggaaaagactccccactcaataaatggtgctgggatagctagctatatgcagaagaatgaaactggacccctatttttcaccatatacaaaaatgaactcaagatggattaaagattaaatgcgagtcctcaaactataaaaaccttaaaagaaaacatcggaaatacctttctggacagcagccttggtaaaggattcatgactaagtcctaaaagcaattgtaacaaaaacaaaaattgacaagtgagatctattaaactaaagagcttctgtacagcaaaagaaactatcagttcatttctttatgtacccaggagtagaggtgttgggtcatatgtcatatgaataagcttcttttatactctagcctctgtggtaactagacacattgctgggattttgattgattgactgatctttaatttttacttttttaggggccaaacagcatctattgctgtattcattgaggaaaactgctcccaggaggtgagctctagagaatggcaaggaccttcttcccaccattgaaacctcagtggatagagactcactctgcccgccctcgcagccccagagcagtcctgttccctggattcccttcggggctctgattcctggaggagggacagtagacagtcaggagatgttcttgggacagagaagcggcagcaggaatccagcctgagaggtcaagcctgcatgaccagccctcactcctcacctgaccttagccttcatctctcctgcttcctggcctcccaagttccctccaaactttccccaaactctgagcttggagactcggtcttcattttgattctggatgcctccctctatacctccaaaactgggattccttttctacttcagccagcccagatccagcccctgttgcttgtaatcaaaatccccaaccaatacaagaagggccaaatgcattgctctagggtttacaagactcctttcttccttgttcaaaaatgagaccactttgcatgacgccagttttctctgggacctcttccaggcttcataagctcttaaaaacggccaaggtggatctgctctgactgcagccatttcttctgtgactctggagccatttcttctgtgactctggagccatttcttctgtggctctggagccatttcttctgtgactctggagccatttcttcaatagggtgtggatgagaagccatttgtagccgccaggcattctttcttggtgcagtttttctttttaaccatgcttgttttatcttctccatcttgtaccaccctcggtaaaagacaagacctagaggagatggcccatagttcagcagcctacctcaggggctgtgtaggaagtataagtgtattattatatttatgcataaacactttcaaacagagtttaatacaccatatccgtgggatgtgcttagaatacaaaaggctctccagaagcaaatttgcctaggaattaaaaaagtaaagccagtgtttgtttctgtgacttcagcactgaatccttcgcaaaggatgctggtatatggcatcagtcattcatttatgcattcactgactacacaaatatttctggatcatctcctgcatgcgtaccaggcactgacaaaatgttgatggtgtagacataggcctaccttgatgagcttatggatactgcaaaggcaggtgatatgtaggatgtttttaaaaattgtggtaaaatatgcataacataaaattttaccattttaaacatttttaagcttacaattaagtgacattaaatatattcacactgttatacactaacactactacctatccccaaaactttcttcatcttgtaaagctgaaactctgtacccattagacaactcttcattccctcctccctctcagccatctggccagcgctattcgactttccgtctctgtgaattcactaccctacgtaagtggaatcacagtatttgttctttggtgactggctcatttcacgtagcataatgtcttcacagctcatctatgttacagcatgtgtcagaattgttttcctttttaaggctgaataatattccattatacctatacgctatatttatttacctacgcatccatctgtggacactttgggttgcttccaccatttagttatggtgaataatcctgctatgaacattggtgtataaatatctgttcttgtccctgctttgggataaacatttttgggtgtttactcaaaagtgaaattgctagatcatatggtaattctgtttcattgaggaatcataccattttctatatattcccactaataatgtacaaaatttcccatttttccgcatcactgtcaacacttctgttttgttttggtgttttatttttttgttttataatagccatgggaatggatgtgaagtggtactttattatagttttaatttccatttccctgatgattgatgccaagtatctttccatgtacttattggctatttgtacatcttcttcgtaaaaatgtctacctaagtcctttcccattttttaaattgaattgtttttttttttccttcctgggttttagaagctttctatatattctggatattataaaatatttgatttgcaagtatttcctcctattccgtgggttgccattttactttgttgatagtatcctttgaggcacaagagtttttaattttgatgaattccaatttgtctatttttccttttgctgcctgtgcttttggtgttgtatccaagaaatcactgccaaatcaaatctcacaaaacttttccgttttttcttctaagagttttacctcttctgtttaggactttgatccattttgagttaatttttgtatgttaggtaaggatccaactttgttcttttgcatacagatacccagctttcccagcaccagttcttgaaaagactgtcacttctctattgaaggtctcggcatccttaccaaaaattatttgaccatatatatgtgttaattgctgagctctacttcattttactgatctttgggtttgtctttatgtcagtaaagtgttttgattattacagcttttgagtaaattttgaaatgaggaagtgtgagtcttactgtgttcttttgttcaagatggttttggttattcaatgtcctttgagatttcatattaattttagaatggatttctctatctctgcaaaaaagtcattgggattttgatagaaattgcattgaatctgtaaactgctttggataacattgatatcttaacaataagtcttccactccatgaacatgatggctttccatttatgtcttctttaatttccttcattgatgttttacagctttccatgtaaaactctatcccttatttggttaattcctaagtattttattctttttgatgctgctgaagacagaactgttttcttaattttcttttcagattattgttagcatatagaaatgcaactgatttttgtggttggtttagtacgtggctactttgcaaagaatttattagcattctctctgtctctctctctgtgtgtgtaagatttagggttttctacatgtaataaatatgtcatctgtgaacagagatcattttactacttcttttcttatttggaggccttcaatttctttttcttgcctaactgctctagctagaacttccagtgttatgttgaacagaagtagcaaaagcaggcactcttgccttgttccagattttaaagaaaaagctttcagtctttcaccacggagtgtattattagctgtgagtttttcatatatgacctttataatgttgaggtagtttccttctattcctagtctattgagtgcttttatcatgaaaggctgctcaattttatcaaattcttttcctgtataaattgggatgatcattttctcttttcattttgttaatcaagtatatcactttttttattgatttgcctatgttgagccatccttgcattccaggaataaagcccacttgatcatgatgtataatcattttaatatgctattgaatttggtttcctagtattttattgaggacttttacgtcaatgaatatttgaactattgttttcttatttataagggactgtagttttgtttcttttctttggctttgttatcagggaatgccagtctcacagaatgagttaggaagtgttctctcctcttcagcttttttggaagaatttgaggaggactagtgttagctctcctttaaatgtttggtatagtttaccaatgaagtcataatgtccagggctattctttattaggaggtttttgattactgattcagttaccttactaattatgactcttcaaattttctatttctttgtgattaagtgttggtagattttgtgtgtctaggaatttgtccacttcatctaggttatccatttgttaacatgcaatggtccatagtactctcttataatcctttttatttctgtagaatgggtcgtaatgtccctgttttcatttgtgttattagtaatttgaggcttttttatcagtcgatctagctaaggtttgtcaattttcttaatctttccaaagaactaactcttggtttcattggctctattgtttttctgtccttttctctctgctttaatccatagcaatccaaagctaaattcaaagctagcagaaggaataaaatagcttgttcttcttctagttccttaagttgtaaagtcagattgtttgagatttttctttttaagtgtttaccgctatacatgctatacatttccccctaagcagtgctttgtccttgtcccataagttttgacatgtgtttttgttttcatttatctctaagtattttccaatgtcacttgtgatttcttctttgactctttggttatttaatagtatgtggtttaatttctacaaatttgtgaattttccagttttccttctgttactgatttctaacttcaccccattgttgtcagtgatggtactttgtataatatcaaccttttcaatctgttgagacttaatttgtgacctaacacatggtctatcctgcagaatgtcccatgttcccttgaggaaaaaaaagtcttccattgttgttgggtagagtgttctgtgtatgtctgctagatccagttgacttattgtgttaagtcttctatttccttttcttctgtctggttgttctatctactaatgagagtggggattgaaatctccaactattattgtacaactgtgtatttctctcagttctatcaattttatttcatatattttgatgatctgttatcagatgtgtaaatatttataactgttatatcttcttatatattggaacttttattaatatataacatcccctttgcctcttggaagctttttgatttaaagtgtctgttgtgtgatgttagtatagctactcctgctctcttttggttacaattagcatggaatttctttttctatcctttcactttcaacctctgtgtctgatctacagtaagtctcttatagaccgcatatagttggatctatgatttaaaaaacaaattcattctgccatcaatttctgtctttgattgaagtttaattaatttacacttcaagtaattactgataaggagggacttacttttccattttgttatttgtttcctatatggcttgtaatagctttggttcctcatttcctgcattactgacttcttttgtgtttagctgatttgattttcttttatatgtatacatatatttttttttggtagtgaaacttttaattcccttttcatttgcttttgtatgtattctctagttattttctttggggttactgtggggattatatttaattaggattaaagttataacactctaatctgactttacaccagcttaacttcagtggcattaaaaacctcagcagaatggttttttgaaagcaaataaatatggaattgtaaattcagatgaggactacccaggaaagagcaggcttttatgttgaggaaaacagggtgggcctcatcagagggatcagcaaagagggaccctctgaggggacatttgcacagagtcctaaaaggcagaggaactcgttccacaaggcacgtaagcagagcattcctgacaaagacagtaagtcaagttcgggctgcctagtgaaagtcagtgttgatggcaaaaagaatggaaaagcagatgggtcctggccacacaggctggagggccacatgaaaggcagggggtggggggccttccccatccaatgcaaggggaagccacagaggagcccaatgctgcctagtgacaaagttccaattctgcaggaagaggatcttgctggttattctgtagcaaggattcaagggggaagaaaatggaagtgagaagcctggcaaagaagctccagcagctgtcaaggccagaaataatggcagtcagtccagggtggagacagaaagaaaggatgggttccagacatgcctgtcaccttcaacaaggtgacatggggtccctcagtcccggactggagtccttgccctactgtgtactcacaggctctgcaccctggctgtgtcacgtccccaagcctccatttccttctctgtaaaatgggaatgacgaaatccaccaggtatgagaaggcagtaaggtggaagcactttgccatctgggacagctggtgcatcataagcagtcacatcttcccttggggccagtggctgacgctaatctaatacatcaaaaccatgagatgctatgaaacccggagcaaacgcttgatgccaaattctcccagctttggccatgctatcagctctctgaggcactgttaggccccagtctgccctggggacagggtactgtctgggttatgccttggcaggcaggtcagcacacatgggcgggccaggcctctgaccacagagacctaagtgggagggtgggagggagtaggtgcctggtgggagggagtgggtgcctggtgggagggtgggagggagggagtgggtgcctggtgggagggtaggagggagggagtgggtgcctggtgggagggtaggagggagggagtgggtgcctggtgggagggtaggagggagggagtgggtgcctggtgggagggtgggagggagtgggtgcctggtgggagggtgggagggagtgggtgcctggtgggaaggtgggagggtgtgggtacctggtgggagggtgggagggagtgggtgcctggtgggagggtggaagggagtgggtgcctggtgggagggtgggagggtgtgggtgcctggtgggagggagtgggtgcctggtgggagagtgggagggagtgggtgcctggtgggagggtgggagggtgtgggtgcctggtgggagggtgggagggggtgggtgcctggtgggagggagtgggtgcctggtgggagggtgggagggagtgggtgcctggtgggagggtgggagggagtgggtgcctggccatcagcacgaatcatgctatttcccacaactcggagagaaatgtgttggaatgaaggtggcaaccaactctagcagatttccttccaaatctggagggcttaaggagacagagccactcccatcccacagccccacagaaaacatgctctggagggaaacagatgggctcgctggcatcacgttctgctctatgttccagggggcttgtctaatgacagcccagccacaatcctttcccgtcctcccggcttaaaggttatctcacttgctaacggaaagcccttttctaaaacagccgcaggcaggaaagaactctttggatttcctaaactaggatttgagggattgagaaaggggggtgctggtggaggtggtcttgtttaaacaaggtgtcatctctgaacggaacttgtttttcaatttacttaatggtggtccagggctagagcggcaagaaagggctgctgcggtgtgagcccccctgtgcaagggggctgacgactctgcttccattcgccttctggcttggatcaaaaggccccggaaaccccaagtatagacgacagaagggctcagagtcatcgcacccagcccttctcacagtgggatcacccttattaggcaggcctcctcaggaaacatctcaatccaaacttcacgtgttagccccgggtctgccctcagccccgggctcttgagccaccagtgtcttagtacaagcagctgaagaggggtgcagggtgtttaatcaaaggcaaaaaacagagcccttcagtctttacggcccatgaggggtgcagggtgggagtgtctgtctccatgtaccaaccccattcccttcccactccctgcctgggatcaaacagccacccctgcctggatgataaattatgaaagcaaatatcaaagtcgaagctctgccttattactaccttagctgttgtaatgaatgtttattccttgcacttgtgccctggataattaaaaaaagagagagagataaaataatctgcagatgaaaacatctggtgcagagccaagcccctccagccctcctctcaggcgtgctccgggcagactgcagcaatgcagcccgtcattaaccggccaccggggagacgtgggtttgtgcacacgaggaacacggaactatttctcagaaatgagcatcatcaaaagttaacactgaactatttctgagagctgagcaccatcaaaagttaagcaattccatttccaggtgtatgcccaaaagaattgaaagcagggacttgaacagagatttgcacacccacgttcatagcaacattattcacagtagcaaaaggtagaaacaacccaggcatatgctgacagacgaatggaaaagaaaaaggtgatgcacgtacgtgcaatgggatactactcatccttaaaaaggaaagccatcctgacacatgtcacaacatgaatgaactctgtggacattatggtgactgaaataagccatttgtccacaaaaggataaatactgcatgattccacttatatgaggtatctagagtcatcagattcacacagatagaaagtagaatggaggttggcaggggctgggggagagggaaagggggaagatagtgtttaatgggcaggaagtttccattttgtggacagtgaaaaagttctggaggtggatggtggtggtggttgcattaacaaggtgaatgtgctttaggccactgagctggtccacataaaaatggttcagacggtgaatttcgtattacatatgcattctaccacaaaaaaaaaaaaaaaacccagaaaaagaaacttgcaaaaaaataatgtttaagttaacggaacttccagagttgatgactttgaaggaggggtgggagcagcatggcaccctcacatgcccactgaggccacgtcggaaagcagatccctggcccaggtcccaggggcctccttggcaagtgtaccttgcagaagagcctggcatatgaggaaacatgtgggtccagcggctcgacatgaggcctctactctgagtgctgccgaagcagcctcccttcagagcacaataggggtgaggggcatggcggagatagagggagtttcctgcagagagaggcatgtcccgaaagccagtcctggaaagtcttcaacgaaatggaagacaaagtaccagagatttgtcctcctaacaagcaggattgccgtggggttccccacacccagtgggcccaggattggggtcctcaacattgatttccctgtggctggttaggggaaagaaaggcttgacatggtggtcatagctctgccagtgacttcctgtgtgaccctggcaatgtccctgagcctccctgctctcgggcctccttcagcctctgggaaacaagctgtgggatcccatccccacaaggggagaatcagtcctggtctcctttgtccaggccaccacatgccaccaggcctcccagccaccacagccccagctacacaactaccagagccgagatcccagtgggaacggtgcattgggggttcatccagctttgtgtccttgcccagccacagccccgcccaatccgcctctaaaacaccggaggtcccagcaacataacatccacacatgggcaaagagtcacctgcagaccctgtccagccatgaggaccaccaccctctgctatcctacccgcactctgagcccctcccttgggcttcatgtcagagccaacttcctccccagcacttacccctgagctccagcgctcatcacaccaagcaaacaaaggcgcctgtggcctgggccagcccaggctctgcaccttcgctagacctcaagaccttggctgcagctggcccaaaggccctgcagattccgggaataggcatgtcatctccctaccccacaacccacggctgctgtgtccccactgaaaactcaggccctgggtcattccccactgcacccatttcgtttaaccttgccctgtcctctcgcgtcactcccttccataagcggcctgaccatttgtggccaggcactgtgcactcactgtggccagagctaaattcctgacctgctgataagcagcagactgaaagaggttcttctgttatggctgggcaggagtctggcccaggcctgaggctaaacctcacactcggaaccttcgcacccctttccctctacaaagttccccttgacccagattccacctgactaggcttctctctcctctcctttagccaagatcagcaacttggctgtttctacagctgagttgtagctgtttctgcttctcatttcccattcacttttcagtttgtcctcatcaagcatctacagacaacactccctaatgccattccatctggcattgttaaccaggctcctcctgcacctgtcaccccttcttcaggacaacctcctcccaggtcgttgccccatcccccccagggctggtgctccatgggctgtctttggacagcttctctactcactgacacatttcagccaggcagtgctactcactccgctacttcagctgctgctgtaggctgaaaagcccaggtccctctttcccaccaagacatctgtcctgatttcccaccttgaattcagcttgtccagaatggaaactctttgctgtggccccatattcattgctcctccttttctcagacaatggctccaccacccacccagaggcccagcttgaagcctgggtgtagtagcctggatttctcttgcctcctcttcctgactctccaacccccacatcctgccagtcaccaattcctgcagctccttccttttaccccaggccctcctccattcccactccaacctctcccacactcacgccagccccaatgctccacaacactgcttcccattccaatccatcctgcatgcagctgctgggctgttcttcctaacatcaacctcggcacactgctcccctccccttcagtggtcccacttctcagggtggagcccctgctcctcaagatgcctggcccgccctccctcaccaggccctgtccacaacttccacacccttatggctccccgttcccgccatgtcaaatgacttggtccttaaaaacacctgggaaaatgaatgggtgggtaaagctaggatgcccttgaaggtccttcagtgtctaacatttgaggagtcagcctcaccacccatccatccccatttgacaaatcggacatagacagacgtgggcatcctgactccttccttggttctctcaactaggcagcctctctaagtcaacacagtaagctctttttcccatagaggttggaatttgttccccccgctagactatggactccttggagcagggtctgggattcacaggactttgccgcttggagtgggtcttatacttttgggaaggaagccttctggtaacaagtggccccatcactgagcagatctgggcacttcaacactacgccagtgtggagccgagggcaggtgctcttccatcgggatgtcccccagttacttgccctcctcaatgcccagaattaccaggctatgttcccgtatccccaacccagcgtcttcctcacttgaggagatgaggacacagcacctgcttccagatctctcatcaaggagaaaacagagccccccacatcaggaccccggctccggactcaccatgttcatgacggtcaggatgaacctctgggcggcctcggccccgtggtactgcaccatgtcggcgtcggccaccaccagggtctccaccgtgtgctcgctggtgagccggatagcgttcctccgctcccgccagtcccgcgaaggcctgccccacgtcggcttcttcttttctagaaaatgatggaaacatttgtgcggtccttggcttactgacttccaaaaccatgcagtgaacaggccttctgtcaagcctgcccgagagagtggtcagtctcgacaggcctagaggggcccagcacccagcaatctccaccgtcatgtgggtgccccgagttcactcacgtaggggggtgctggcccaaaagaagggtaacagctatgaggccagatgaggggcccacacccaactcccaccacagctggggaggccaatggggctgaggggaacagaggagaaaacccacccctttagagaagcacggagagctgccaagtacgcacagaaaaggaggcctggacccagcgggcaggggtctgaaaggccacacccaaggtggataactggaccaaggaagctgggcagaggggacaggacactcccctgggggctggcatcccagtaactcttcttggactcaggaatcaggagccataaatgttggtagacataaaaacactatgttttttaaaaaaatacataatcagaaggaaaatcatacgacccacatccaggctaaaatgaaaatcttccctttcctcacaatagggaaggattagtagtagatgtgtgagtaattctccattgattctctagataacctatatccctgtaaaatcttactttgataaacagctactgttatcaaagagcccacacctacaggtccaaatctgccatagtctttgtacatggaaacatctctgaccaacacaacaggttgatatgaacagcatgcattttcagaatccgaatataaacaggaagtctctctcatttgatagttatttccatgttagcactagcctatatggacacatctctgctacacacagtctacatatgcaccaaccggcttcataaagtgacccaatcattccaggaccaaaactggatacagcaggccctctttatctgcaggggctatgttccaagactcccagtggatccctgaaaccacagacagtaccgagccctacatctactagactatgttacgtcctatgcatacatacctacgatgacgtgtcatttataaattaggcatagtaagagatttacattaacgaatggaatcataacaatatactgtactaaaagttatgtgaatgaggtctctctctcaaaatcgctcattgtactgtactcacctatttttgatgcctggttgaccgtgaataaatgaaactacggaaagtgaaaccacagataagaggtaaccactgtattatgaaataatctgagatatgggtcgtaatttacaaacaaaaatggctatacaacacaattacaatcacaaaaaagtggcaaaaaaatggaaatatacaactatagataaagccaacaacagtaaaaaggtatacagccattaaaatcataccacgaagatgacttagagatctagagaagccgatataaatctgcatgtatagttagatcatgattttgcaaaaatcttacatacaagtatcttcaggccccaaaggaaaataaatactaaaacacctaggaagaaccaaaatatgaatagtggtatgtgatcttcgttttcctattttcctctgtattttccagatttatataatatgcaggtattactgtattttaaagaaatatcattgagtttgagaaaaacacaggcatcacttttaaactctaaacgataaaacagaagctctcgagggagaaaagtatgccatctgatttatcacaaaactgcaaaatgaagtcttctcagccctgcaggatgggcctcctccctcagagccaggcccatctcccctgaagccttccgggcctcagtgatggaataagggaagaaagcatccattctaacacaaaatcaaggtcctaggtggctgtgcctttgcacattggcagaaggaaagaggccgctggtggaaaatctagtgacctacccccacactcaccagccaggttatctctcacctgaccagcctggaatctatgaagattccttccttgtttccattttaaaggtgcagagctgatgggccacccaagcaggagctctgttgtaaccagcacaccctcgttctcccaggcgatcaggtatgagccaaatggcagccgccgcccttctcaaagtcagtgttgataatccatttctttgagtcaccatctgcagatgctccccacgttggttattcggtacttgttttcacaccttgtcgtatatttttaagttctagtacagaaagagctgcattcctagcagggcccacaggacacattaggagccagctagcatcaacatgtaagagctgagagctctctaagaaaagtagcctgtcactcccagaccagagggacaggttgttcctggacacttaacatttcaaaatcctgcactgcactgggtacagtggctcacgcctgtaatcccagcactttggaaggccaaggagggcagatcacttgcggtcaggagtttgagaccaccctagccaacctggtgaaaccccgtctctactaaaattacaaaaattagccaggcatggtggtgcgtgcctgtaatcccagccactcgggaggcgaggcaggataattgcttgaacctgggtagcagaggttgcagtgagccaagatcacaccactgcaatccagcctgggcgacagagcaagattccatcttaaacaaacaaacaaacaaacaaacaaacaaaaaatcctgtactgggtatgtgtctttcaagtttacaaagaaaaacttataagacctgtgcctccctaggccttggagagctaacctaacagggtgccgtaaagagtgacacactctgagttaacacatacccagaatactgagtaacaggtaaacgggcaggtgcgctgtggttttcacaagcttccactaatgactgtcattggctcctttcccccattccctagcacacaggtggggggaaataaatgctcacccaaggaatgcatgcagtgggtaaagggatgaataatgacacttgctcaacagccccatgtgagtgcagggcagagcttgccacaaaatgagtgttgaaacccctggattttggaactgcaggcaagagaccgtggacttgcattcctttccaacgcaagtgtccttcctggggtgctggcaagtgagaacaggagcactgaggggtgggaggctagagggcaccttagccttctcctccctccctgatctcaaccactccctcagcagagacccacagcatcatttttgatggtcattccttttcctacagggagaaaagaaccctaataaacttttacctttaattccctaaactgcaaaaatatgcttgataatgctgcacagatgccaatattcacagatgatagcaacttcaaaagtaagaagaaaaacactaatttcagaataacacatgtgctggattctgacctcaccagagaggtcaaagtgcaggtgggtgggcgtgtggccagccggggagtgctccaagctctgctcgtgaccagctgtctccagctgctgtgggaatgaagggtggctctcgccccgctgatgaggacatcgcagtcaggtcaggcctcaagccttctcctgttgtcacagacaccaggaagcattcttgaaggcaagcccagcagtttcttttgccagcaccttgctggaggtggtactgacttggaaaattttcagtctctggcttcatactatttttcttacatctctttccctttgcctcagttatccattagaaaagaaaattttatgtatttatgtaagatacctcaaatccttctggaacaagatgaagagaaaaagacagaaatggacttttagaatcttcaaattacaatttactctagacgtttggggactgccaaaaatgttgagcaaatatataaactgtcattgtagttactagttctccactttgaaaactgaaaaaataaaaacaacaactatctcaactgtgaattatcaaagctctgtatggaacagatactctttagtttagaaaggatacagtatccaggtatttattagggaaaaacaatacgtagatcaaaaaatatttggcatgaaaattcaaaaccacaacccctctcagaattcctttactttctgctacacaagaagaatctctgcatctcaaattctaccaacgccatttccaaggaagacctggggaagagttgagttgaataggcaaggagtagcctgctcctgccacagacttctgaaatcctagctgcaggagatcccatgacccgcacgaatgcttgagccggcagggagagctgctgagagaggtggcaggggcaggactccagcctgtgtggagcccagagggttttgcgtgggaacaggtacagtggagcatggccatggatgcccagcccccaagtcttaccaagatcttctaggtggcttcagcctttgggtgactgctggacctgcacagaccagggtggtcttgcccataggatgaggacagtctgatctgagcaccacccaccatgtgccagcctctcctagggccccagcatggtcacaccagcttccagcacagccttcaatgcccgaacagggtgcttcccaggggcggcccatcatagctccttcatgggcagatggcagctaaccactggagagctccagcagaccagcctccaccgacgcgaccagcccacaagcagcctctcccaccactttgtcagcaaacactcacccacagatctctcccactgctttgccggcacacacgtattggcagacttcaccctccctccccgcaaaacgtgaatgtgcatgtgcaccctgctgccctaccactgatggcagagcccatcccaccgccctacgcacctccactgggactccactgctgctgaggcacaggcagtctgacatgccaccgtggctgctggcacatatgagcaagcacagatcccacttccaccgctcctatgaagtactgtggccagcaccccacatcgaagtgttggggccagcagaccgggaacacctcagcctctccagtgcatcaggttactaactgcaggggaccagaaaacaaagctgggaaactcataccggcacctcagagttaaagcacagagcccatgggtgctgagctgagccttagccctctgaaatcttccagaatagaagccagtcagctgagttcaccttataccacaatcaaatgcctaagggcatcaaaaaaaacccatccaaaggacagcaacttcaaagagtaaaggaacatcagcccatgcagacgggaaaaatacagtataaacacactggcaactcaaaaagccagagtgtcttacctccaaatgaccacactagatggttcttaaccaggctgaaatgacagacacagaattcagaatatggagagcaataaagatcactgagattcaggagaaagttgaaacccaatctaaggaatacaaaatgatacaggagctaaaagatgaaacggccattataagaaagatctgatggactttgcaaggccgaagtgggcggatcacaaggtcaagagatcgagaccatcctggccaacctggttaaaccccgtctctactaaaaatacaaaaattagctgggtgtggtggcacacacctgtagtcccagctactcaggaggctgaggtgggagaatcacttgaacccaggaggcagaggttgcagtgagccaagatcacgccaccacactccagcctggtgacacagcaagactccatctcaaaagaaaaaacaaaaaagatctgatggagctgaaaatctcactacaagaatttcataatgcaatcgcaagtactaacagcaggatacaccaagttgaggaaggaatcacagagttcgaagactggttctctgaattaactcaggcagacaagctaaagaaaaaaagaatgaataaaacctcaagaaatatggaattatgtaaagagaccaaatcgatcagccgttggcatccttgaaagagaaggagagaaagcaagcaacagggaaaacatatttgaggatatcatccatgaaaattcccccaacctcactagagaggacaacattcaaattcaggaaatagagaacccctgaaagatcctatacaagatgaccatccccaagacacacagtcatcagattctccaaggttgacataaaataaagaatattaaaggcaactagggagaagaggtaggtcacctacgaagggaaccccatcaggctaacagcagacctttcagcagaaattctataagccaggagaaattacaggcctgtactccaatcaagaacttgatatccagccaaattaagcttcatacgtgaaagagaaataagatccttttcaccaaagcaaatgctaagggaatttaataccaccagacctgccttacaagatgtccttaagggactgttaaatatggaaaggaatgactgttaatggccaccacaaaaacgcacttaagtagatagccattgacactataaagcaactacacaatcaagtctatgtaataaccagctagcaacatgatgacaggaagaaatctgtatatatcgatattagctttgaatataaacaaactaaaggccccagtcaaaagtcacaaagtgacaagttggataaagaagcaagaaacaactgtatgctgtcttcaagagacccatctcacatgcagtgacacccacaggatcagagtaaagggatggagaaacatctaccaagtaaatggaaaacaaaacaaaacaaaaaagcaagagttgctattctaatttcagacaaaacaggctttaagccaacaataattttttaaaaagacaaagaagggcattacataatggtaaagggttcaattcaacaagaacacttaactattccaaatatatatgcacccaacacagaagcagattcataaaacaatttcttagagacctacaaagagacacagataatacatagtaacagctggagacttcaacaccctactgacagtattacatagatcatcaaggcagaaaactaataaagatattcaggacgtgaactcaacacttgaccaaatggatctaacagacaactacaaaactctccgcccaaaagcaacagagtatacattcttctcatctgcacatgccacatactctaaaatctaccacacaatcagccataagacaattctcagcacattcacaaaaaacccaaaattatatcagtcacactgtcagaacagtgcaataaaaatagaaatcaatactaagaagatcactcaaaaccatacaattacatggaaattaaacaagctgcacctggaaacagtgaaattaaggcagaaatcaatgaattttttgaaactaatgagaaaaaagatacaacataccaaaatctttgagagacagctaaagcagaaaatgaagttatttaaatgccaaatgctctcatcaaaaaagtcagaaagatatgaaattaatgatctgacatcacaccttgaggaactagaaaaacaagagtaaaccaacctcaatgctagcagaagacaagaaataaccaaaatcacagctgaactgaataaaattgagacatgaaaaacaaaagatcaacaaaaccggagctttgttctttgaaagagtaaataagattggtagacctctagctagaccaataaaaaaagagaagatccaaataaacccaatcataaatgacaaaggggacattaccactaactccacagaaatacaaaaaacttttaaagactactatgaacacctctatgcacacaaactagaaaacctggaagaaactgatgaattcctggaaacatccattctcccaaaattgaatcaggaagaaactgaatccctgaaaaaaccaagttccaaaattgaatcagtaataaaaagcctaccaaccagaaaaagcccaggaccagacagattcacagccagattctaccagatgtataaagaagagctggtaccattcctactaaaagcattatgaaatatgaaggaggagggactcctccctaactcattctatatggtcagcatcattctgatgccaaaaccttgcagacacacacatacacacatacacacactcacacacacacacacacacacactcttaaggccaatgtccttgatgaacacagatgcaaaaatcttcaacaaaatactagcaaactgaatccagcaacacatcaaaacctaattcaccatgatcaaccaggctttattcctgggatgcaaggttggttcaacatatgcaaatcaataattgtgattcatcgcataaacagaaataaaacccaaagccatataatcatctcaatagatgcagaaaaaggcttgtgataaaactccacatccctttatgttaaaaaccctccacaaactacatattgaaggagcatacctcaaaatagtaagagccatctatgacaaacccaccgcccatcatactcaatgggcagaagctgaaagcattccgcttgagaactgtaacaagacaaggatgcccactctcatggctcctactcaacctagtactggaagtcctagccagagcattcaggcaagagaaagaaataaaagacatcatacaggaagagagtaagtcaaaccatctctgcttgcagacgttatgattttacaactagaaatcccataatctctacccccaaaagctcctagatctgataactccagcaaagtttcagatatataatcaatgcacaaaaatcagtagcatttctatataccaatgacatccaagatgagtgcaaatcaatgcaatcccactaacaataacaacaacaaaaaataaaatacccaggaataaggctaaccaaggacacgcaaaatctctacagtgagaactacaaaacacttctcaaagaaatcagagatgacacaaacaaatggaaaatcattccatggtcttggataggaagaaacaatattgttaaaatagccatagtgtccaaagcaatttatagattcaatgttattcctatcaaactaccaaagacattcttcacaggattagaaaaaaactattctaaaattcatatggaaccaggaaagagcctgaatagctaaagcaattctaagcaaaaagaacaaagaaggaggcatgacattaccggactttacatactacaaggctagagtaaccaaaacagcatggcacttgtacaaaaacagacacatagaccaatggaacagaatagagagcccagaaataaagctgcacacctacaactacctgatctctgaaaaagacaacaaaaacaagcactagggaaaggactttctattcaataaatggtgctgaaataacttatttgcagaagattaaaattggaccccttcctctcaccatatacaaaaattaactcgggatggattaaatgcttaaatgtaaaacctaaaactataaaaactctggaaaaaaacctaggaaataccattctatacataggccctccttaccaaagatttcatgacaaagatgccaaaagcaattgcaacaaaaacaaaaattgacaaatggggcctaattaaaccaaagagcccttgcacagcaaaagaacctatcaacagaataaacacacaacccacagactgagaggaaatatttgcaaactatgtatctgacacagatctaatatacagaatctataaggaatgcaaattaacaagcacaaaacaaatcccattaaaaagtgggcaaaggacaggaacagatacttttcaaaagaagacatacacgtggccaataaccatatgaaaagttactcaacatcactaatcatcagaggaatgcaaaccaaaaccacaatgagataccatctcataccagttagaatggctattgttaaaaagtaaaaaactagcagatgctggcgaggttgtagagaaaaggaaatgctttatacactgctggtggaaatgtaaattagtttcagctactatgaaaataaatttggaaatttctcaaagaattttaacacagaactaccattcaacccattattgagtatatacccaaaggaatataaatcattctaacaggatgacccatgcacgtgtatgttcatcacagcacgattcacaatagcaaaaacctggaatcaatctagatgcctatcaatggtagactggtaaacaaaatgtggtacatatacaccaggaaatactatacagccataaaaaagaatgagatcatgtcctctgcagcacatggatggagcgaaaggccatcatcctaagcgaactaacaccagaacagaaaaccaaatactgcaagttctcatttataagtgggagttaaacactcagtacacatggccacaaagaagtgaacgacctatcgggtactatgcttatttacctaggtgatgaaataatatgtacaccaaacccccacgatgcgatttatttgtgtaacaaacctgcacatgtacccctgaaactaaaataaaagttaaaaaagaaaagaaaatacaaatataccaactaaaggtcaacacggtagctctcgtgataaaaattatgagacactcaccccgtgtggaatcacgagagacgctcagcccgtggggagtcacgagagacgctcagcccgtggggagtcatgagagacgctcagcccgtggggagtcacgagagacgctcagcccgtggggagtcacgagacacgctcaccccgtgggaaactacgagacacgctcaccccgtggggaatcacgagacacgctcaccccgtggggaatcacgagagacgctcaccccgtgagaaactatgagagacgctcagcccgtgagaatctacgagagacactcagcccgtgtgaaactacgagagacactcagcccgtgtggaattacgagagacactcaccccgtgtgaaattacgagagatgctcaccccgtgtgaaattacgagagacactcaccccgttagagacactcaccccgtgttagagacactcaccccgtgtgaaattatgagagatactcaccccgtgtgaaattatgagagacactcaccccgtgtgaaattatgagagacactcaccccgtgagaaattatgagagacactcaccccgtgtgaaattatgagagacactaaccccgtgtgaaattatgagagatactaaccccatgtgcacagaactgcccaccaagcactgagtcaggactacatcccattctacagatgtgcaaactgaggcacaaggagatttgttaactatcttgcccaacaccactaacctagttgactgggattccagcccaggcatccttatcaccattcattctgccctgaaatttggttctgagtttcctaaaaccagagggggaaaaaaagaatcatgctggattataggtttgtcattctcttccagcaggacgaaggataccattccttagggacagataatattctccaaacaccaacttcccaaataaaaacaccaaggaagaccccacagagggaccatctggtgatacaataggcagtattgtcgacatcattttatggcaaatgcgatcatgaattttgtttaattatatcttataggaaccttcgaaaatgccaaagggcctaaaattaaaatactcatcaaagggaattccagaaagtgttcaatctgtgtgttccaagtcggtagcctcaggggtcccttggtccagggagagttattatcgcacccagaagaggggccaagaaaaagtggggaggatgggagtggggggaacagaactccaagaaaggccaatgacagaggtggcccaagctggcaggaagaggtgaggtggtgacttttgtttcctgaatcagaatggcactggtcggcaggtggtcctgttttttactgggtggcatgacctaggaagggccccaatgggcagcccactttaagtacaaagagtctgtggtccccagggcttggctgttacatagaacgtgtggatggagataatgcttttttttctgtacctgccccatcaaaaacaaattcaaacttataaattagaagtaaccgtgggaatggcaaaacctctcagaacagactggacagaagactggaactctggaggtcacccagtgtgccccaggatcccccagccatcccaccactgatgggggtctagacagccaacctcaaggggccttggaacgcctcctggccacctacccccagctctcctcctccaggctacacagctattactgtgcactttgagagtctacacttgccttcttgactagactacggggacccaaacattaacctttggacctatcccaacacctagcactgtgtggtttacagtagtaattcaataggcatagttattgaacgatttgtttaaaactctttgaaattcctaataacaagatcagttttaggaaacttaacataaatgtcctgaaatgaaatacgagtcacttcctccacctaaaagggagggggcaacactagtcgtaaggtgcccaactttgacatctgacagagctggttagaatctgcccatggacttccagggtgacagtgggtgagtttccttgtctataaggcaagatgataatcgttctgccctcttaaggtagatgtgggattaagaggcccacgctcagcctctaacatagggtcagatatataacaacacaaccaaatcatgccactcgtcttatttctatcatctgcatggcactgtcattattgctgttaattattagggtctaagtactgatttgaaaattttgcatgtccccagaaccacatagcaaacttggattgcttttatgaacactacaggtctgaatggtcatattctccagctgccaagagctccagtctgaacactcaccaaaaacttgccttccgtatttcctactctgcaggaggcatgaaataacttctctcctagggccaccctccatcacaaaaaaaatgaattggaactgatacaaaaataacagttttggaccagatgcagtggctcatacctgtaaccccagagctatgtgaggccaaggtagaaggatcccccaagcctaggagtttgagaccagcgtgggcaaaaaaaaaaaaaagctggggatggtggcacgtgcttgtagtcccggcgactcaggaggctgaggtcggaggatcacttgagcccagagactgatgatgcattgagccatgaccgtgccactgcactccagcatgggcgacagagcaagaccctacctcaaaataccagttgtaagaggggctccccaacatcccactctaacatctcaacattccagggggagtggaggttgtaatcatcagaaacatgataaaacaaaatgtggccgtccgtgaaaaccacctatttgaaccgtgaaacgttagcgacattttacataggtggggaaaatgaaaatcaaatgtctctcaccaaggtgggaagcagagtgcatgagtccttctccttgggagagagaccaatggccgcaacaactgggctttctgtgtatcagccttctgtccctctgcctcctgcccccagccacaccagtgctttctcaggacaccaaagtcaccacaattgcagcatgaaaaatagtaagacatgtggattaccctgcatgtccaactgtcttgtgtcattgaccttcttaaaaagcatgggatataatcaaaatatcttcagactgaggttcaggagccctagatattcacccaggcctcaacttggtgcccttgaagttttactgaacagaaaggtctccatttcccattctgcctcttgtctcccagcccctcttctgcacgctgctctataactctggggctggcagcctaactattaatatatttcccagaccaccttgccagctggcttcctgctgagctctgtcaatagggggcactagagggagaatgaaaggcaggaggtgaggagatggggttccttgtgttttcagctcagtagggacaaccatacaggacaactatggttccagcctccagctcttgggctattacaggacccagcctccccatgctccctcagaggtgcagccatctaggcaccaacttgggtatactccctccatggtctgtcccttcaaaggtataagccacagccccacagccccctccttcacgctctgtgatcctggaaattcaccttttatttctctagccctaggatgatacctatctcctgggttatatcagcttccctctttgctcgtgcagacactgacactgacataaccaattccctgtgttaaatccctctgttagaaatacctagcatggttccagctttcctggctagacacaagctgacatagagaaggtcagaccttaaactagtgcctatatgtcattgaagcttcaaagactcctcccaggtgtggaactaaggattgacttcctttcaccatagaaatatcaggatattgaatatgtacttccacactacagaatgctgccatagacaggaaagttggcctatattctgagtcaccatttaacaaaaaccagtcaatagggtgtcctgtgatgggaattaagagtatcaaagcgtaccacagatttctcaacaacctaccacccacatctaagaacctggggacagtgcttaacagattcggggtcaatgtgggaaacgtactcgagaaggaaacccaagccaagcagtgagccggcagcaggttttcaggtgtcgtaccgagtttgaacacacgcacttgcaaacaacatgttttccaatgaaattgccaggtccaagaaaactgctttgtgaccactttttttttttaacaaaagcaaaagatctgtttatagaaaaatcaccttcttaactggaaatgatggctccacatgtgcagaactcctagccaggtgaagttttccacagctgcataaatccaacatccttgaagcataatggccttctctttctttttttttccaaaaggcaaaaaataagttttgctctccaagtttgcattctttaaataacttccaagaccaagtcatttttataaaaggcatctttttcatgtaaattccttacaaagaaaggtggaaaataagggttttttgtttggagggggtgagggggggtgtgtgtgtgtgtgtgtgtgtgtatgtgtgtgtgtgcgcatgcacgcgcacgtgcatttacgatatatgattaagatcccaaatgaaaacagacctgatgaaatttggagtctaaaatcagtccccatactagaaaggaggtatgacccatgcctgcattcttgaatacagcaggccagggtagggaagccgggctggaccttcctatccatggttacagccatgtagataccaagcagggcacctctgcctatagatgaagttgaaagatattcattcagttaaatatttattgagaacccatgtgtgctaggtactgccacaatgtaggtgcccatctagaaggagcagacattaaccaaatgaacagaagaattaaacattctacatgtgacaggtactatcaagaaagagtggacaatgctatgagaaaatataaggaggggccctaatttaccctgggggttcaagaaagccttccccaaggcagtgatgcaagggccaaggttggaaagataagtaggagttaacagataggggtgggggagaggagctaggaggagtccagagagtgggaacagcatatacacagggcccaggggtggaagaaagcacggtatgttctagaaactgcaaggaggcaagagcaagagagaacgtaggcaccaaggaggccggagcaatgggcagggcaaacaggcagggtcatgtgggatgtgttaagagctttcttctttaattctgggagcagggggatgccacctagggcttgtgttctgaatgtgtccttatggcttctgtgggcagaagagattccagggcacactggttggataactactccatgggccaaggtgaaaacggacaatatctggacaaggaaggcaactgcaggtgggaagaagcaaatagattcaggagggacttcgaagatggaacaatactggggctatttggataaagaagaggcaccatcaaggataattcctcactgacctggatgaatggggggaccagtcactgaattggggaccactggaatagggccaggtaggaagaaagcactgtgagttctggcctaattgagtttcaggtgctttagaagcatccaggtggagatgtcaggctggctgctggctgtgcggatttgggagctcaagaagcaagggaatacttcattccaatgcctcagagctcacagcattcaggaatcatcagttccagacgaatcctttagagacctcaaaaccacatggctagatagaagagatggaaataacactacagagacagagacaaagaaggccaagctacgacaagagcagagcatgacatcccaagaaccagggaaagtgaagtcctgagaggcagggctgcgtggcgtctccaacacagcagagtgcccaggaaggaaggaaggaggggctgactgaacaacagggagtcacggtgtgggggtggggggtctcagtgagagtgctcgtggggacagatgcaggcgaaaaccagactagagagggttgaatgcatgtttggcccgcgaggaaatggcgcaaactttggagaagtctggggaggagagagacaggaatgcagctagaaggtcctagagtcaagggaagatttccttgaaatgagaaaaaattgaaacataaaatgaagaaacccaggcccactgaagactgcctccctcagtttctactgctgtccccttccagccacatttgaggatgtcagctccagactcccagccaggaagaacgaggcttctactgcactcataccaactgggaaaggacaactgtcgctctgcaagccctcatcaagccccgactctgtggtcgaccctgcgctgggtgctctcccagagggagggagaaactcatctgagtgtttacatgtttttgcatgcaaaaactcatcagtcccataaacacaccccagatggcagaaccgtgttgggcacacacatccaggaaccggtacagaacttccagggaaagctggcttccaaatggagggagaaagaaagggaaatcatatacattgcattagggaagaacaaagctggaccaccaagtacatgcacaaagaaagagagaaaatgccaggcagcatcatgcaggagaagctgagtctagtccagtaaaaatgcttcagactggctgtcacaggataccccgaaaataaaggagaccaccacattttctggttaattttgcatcacccttaaacctttgtctcaacctctaataaatattcaatgcacttaaatgaaagaaatttacttctcacagtcccagaggctggaagtccaagatcaaagagtcagtggggttggtttcttcagagggccacgagggaaggacttgttccaggcctctctcctttgcttgtaggtggctgtcaccttcctgtcctcacagggttgtccctctgtacatgtctgtgtccaaatttcctttttgtctaaggacaccggtcatatcagattaggggacccaccttcatcaccttattttaacttaattacctctttaaagaccccatctgcaaaaacagtcacattctaaggtactgggctagttagtacttcaacctatgaacttgggggagacacaatttagcccataagatactcagatactcatcttccctgcctcaagaagtgtggatgaggcaggccacctttgcacgcccggacgtcagggtgtgtgtgtgtgtaaccgccgtcaggacagtcgggggactcgcaggcaggacagtcatctcacagccccaccaagacacattcagcaaatccgcaaaaaacaaacgccagtacttagaattatcatgattctcaccaccacttttcagcaaagtctactgctgaaagattacactagcctatagcagcttgacagttttaccttctaaattgatggaaaagaaaaaaaaaaaaaaagaacattccccaaacacacagcttgggggaagaaattaattaatgtgttcacgtttcaaccagagcaagacagggcaaacaaaagcctgaaaagaaatcgacggcttctctgcacctggaatcccccatcgggatcctgggaatggtttcttttgacagatggtctttcatctttgacaaggatgtaagagaaacttcagacacctcagaaattcctccacctatgcaaaggggccaggccattgtgtgactagcaacccacactcttcaccttcatcactttaacacaaagccacctctcccccagtccccaaaatcaccaagcacaccctacgggggcctgaggttgtgtccccacgctgctaggtttgaggatgggaacagccctctctcctctgtacctcttgtgctgagaagggcaccaggaacacaggtggtgttcagtcattgtttctgaatgaataagttaatgacagaatgaagtaaatgaacaaattaagaaaagaataaagcaatccttcagtcctcttttcagaggattagcaagcaacaacaaatccttggccctgtagggctctggagtcagggtttcttccaaatgtgtcaaatacctccaacatgcccagggctgtttacagtcaggtgtccttcactcctccagaggcctctggagtgtcacagaagccccagatgtccctcaagatagaagagggagagacaccacaagagagagtgctcaaccaaccaaccataggcttaggggtgagaaaaaagtcaaaatatttcccttttggcctagacccatcatcagaatggcattctttcccaaagaatcccttcccaaatgccaaggacccttcagagcaaaacgacctgcccagaaaatgcagtcacctgagccatggtccttctgacccacagtgatatggagctcactggactcctactcccaactttccaatgcccccactggattaccaagaggacagtgcttccttgacagccaggtcagccatttcttgaagtgcttccacgtgcaaaggagccttgggctccaccagggtgagcaaaccagccaagagtagagaggcggaattccttgttaggcaactcacaaatgcactagaacccctcattcttgatttcctagagcttcctgtggcttcctctaaaatccaactaggagggcaccacatcatcacatgggctttcatgagttccagcatctcatctcttgtccacaccctggcctctggaacatgctgcagctccacctggaaagttattatccccagcagtcacataacttgtatgtacaccccaagtgccacttcctcaaagaagcttttgtgggtcccttaatctaaaccacaatagcacatttttcttttccttggagcactcactatttgtcatcatttaattgttctgtgtttaatgttagcctcttccaccacacaggaagctcaagagcaaggatcaccactccaaacctagtgcctagcatgcagtggatattcaaggaatagttttaaaataagtgaaagagcaaataaaagaatactagacttttggagcactatggtaaatattattcccagttttaccaccttttaagttgtgtttaatgcttaaatctttacctgtgcttttacattaactttttaactcatttctaagtccttgtatttcaactggggattttaacacttttatatttattgtaaaagttgataatggttgatcttctgtcatgtttttagttccttttctctctctactgttctatgtgagttatatatatatatatatttttctgagacggagtctctgttgcccaggctgaagtgcagtggtgtaatctcagctcactgcaagctccacctcccaggttcacaccattctcctgcctcagcctcccaagtagctgggactacaggcgcccaccaccacaccgggctaatttttttttttttttttttgtatatttagtagagacggggtttcactgtgttagccaggatggttgatctcctgatgttgtgatccacctcagcctcccaaagcgctgggattacaggcgtgagtcaccacgcccagcttatgtaagttatatttcattaggcttatcatctttagtaattgggtaggctattctactagtaaattatctttaccatcttaagaaacaacctttactctacagttttctgattatcgaagtcaagaacaatttgattttcccttttgaataagaatttagcatctttttttctcccacatccctttccacttctgatttgtcaacatttcataaacttgagatacaaattactattaaagcatcctaatttatgttttacatcttcccttaatttttataacagctttattgctatcatccatatattatacaattcacccatttagcatatacagttgttttcagtgtattcacagaactatatgcactcagcacatttttagaacagttgcatcacctaaatagaaaccccataaccccctgcaatcactttccattttcctctgtccttccccaccctcaggcctaagaaaccattaatctttctgtctccagatttgcctattctgggtatttcacattaacagaatcatataatatgtgatcttctgtgtctggtttctttcactttcatgttcaaggttcatccatgctgcagcaggcatcagtgcttcattcctttttattgccaaataaaattctattgtatgactatacacattttatttaattcgcaaattgacagtcatttgagttgtttccactttgaagctattatcaacaatgctgctatggacgttcttactcaagtttctgtgtggataaatgttttaatttcttttggatatgtatgaggtggagtggctaagtcatacagtaattctatgcttaaacttttaaagaacttccagactgttttcttcaacaactgcaccattttacattctcaacagcagtctatgagaattcgaaatccttgccaacatttgctatcttttttactataaccatccaagcaggagtgaggtggtacctcattgtaattttgatttgcatttccctgatggctgatgatgctgagcatctctgcaggtgcttattgtctatttgtataccttctttagagaactatctgcgatggttaatactgagtgtcaatttgactggattgaagaatacaaagtattgatcctgggtgtgtctgtgagagtattgccacaggacattcacatttgaatcagtgggctgcgaaaggcaggcccacccttaatctaggtgggcataatcctaaccctgccagggaggttaggatacaaagcaggcagaaaaatgtgagaagagaaactggcctggcctcccagcctacattttttcccatgctggatgcttcctgtcctcaaacatcggactccaagttcttcagttttggaacttggactggctctccttactccatagcctgcagatggcctattgtgggaccttatgatcatgtgagttaatacttaataaacttccctttatatatataaaatatataatatatattataaatatatatttatatttatatataaactatatataaaaatataaaaatttatatatataaacttacctttataaaatatataatatatatgtaacatatatattatatatatattccattagttctgtccctcgagagaaccctgatacactgttcaagtcctttatccattaattgaagtcaatgtcattctatcactgagttacaagaattctttatatattttaaatacaagtctcttaccggacatatgatttaaagaactcttctcccatcatatgagttgtatttttacttttttgatggtatcctttaagacacaaaagtttttaattttcatgaggtccaatttatctatattttctttggttgcttgtgctttgggtaccgtatgtaagaaaccatcgcctaaacctagaccacaaatactcacatctatgtttgcttctaagactctgatagttttagctcttaaatttaggtctttgatctccccttaattcttaattctattccatatgtgattatatttgtatcagttaggcttcactctgctcaacagttttaatcagcttttttaaaatttattttattttattttatttattttttgagaaggagtttctctcttgtcgcccaggctggagtgcagtggtgtgatctcagctcattgcaacctctgcctcctgggaggttcaagcgattcttctgcctcaacctcccgagtagttgggactacaggtgcatgccgccacgcccggctaattttttgtatttttagtagagacggcgtttcgccacgttgggcaggctggtctccaactcctgacctcaggtgatccacccgcttcggcctcccaaagcgctgggattacaggcatgagccgccgcacccggccttaatcagctctttatgtcatgacttccctattcccaatctcttaattttacttcagctcagaatcaactgcagtgatgtcttcagacaatccttcccagaacaaaggcaaccaggctatatcatctcgaacctctcaggtagctaaaagcacccctcagttgcctgtactcttgaacaacaacttgtctgagtgtcacatccttagggcacaaccccttctcctccaagcactggactcctggctccactgtcttctgggaccccgtaacatggataactctgtggcctgctggattttcatttcttttgagtagcccgttttgtctgtttgaatgctagtataatttttttaaccttataattcgcaaattttgccagaataaatctgtgagtccatgtaaattcattctgactacaacacagtaagccttttatcctgaaaactgagatttgtttcaaacttcccgaagtcttcattcattataaatctttgatcaatgctcctattctgtcttgggggaagggttccatctgcagggattactggattggatttccattctctgtaatccattcctagcactttctttctcaccactgtcttctttcctttgcctcctgagggactacctcacagttattctcatcgctaattcaaatgtacaaagccatttctgctctgtactgccgcctttgtgcattttggtctgctgtagcagactgtagtacagttgacccttgaatatcacaggtttgaactgtgcgggcccacttatacatggattttcacctctgccacccaagacagcaagaccaacctctcctctccctcttccacctactcagcatgaagatgacaaggatgaagatctttgtaatgatctacttccacttaataaatagtgaatatattttctcttatgattttcttagtaacattttcttttctctagcttactatattgaaagaatacagtatacaatacccattgtttatgttaacagtaagacttccagtcaagcgcagcctataagcagttaagtttctggagagtcaaaagttatactgaaattttcaactgcatgttgtggtgcaggagcagagggggagggtcagtacccttcatcctcaaccctgcacattgttcaaaggtcaactatagaaaaaaaaaacaccttataaagcttatctcatccaggtctcatttattttaagcttgttttaacatctcaacctggtctttatggctctttgtttcttagaagccctagcttcttgccagatttgtttatttgtttacctatttaggatgccagattcctcaaactgtttctggtccctgaaataaatccgtctcaaaggctgtggtatttgtactcaggtcttcagatgggtttgctgtatttactcaaattccaacgacaagagcgctggcaaaagccagtgccaagacctgtgtgcacaaggccccctagatggccctggttcacgtcccatctcagatcagctgctagagggcaggcaggtgcacccaggggctcacaggcatctgcctactccattctgctgggccatggtggggtcttacacttgccccagagactgagactgtacattctgaggacacttagatctggatctaccggatatgttatcttatcgtgagggtggttttactgatgcattcacatgtcaaaactcatcacattaggccagtcatggtggctcacacctgtaatcccagcactttgggaagccaaggcaggaggactgcttgggcccagttcaagaccagcctaggcaacatggcaagacaccatctctaaaaatatatataaatttaaacaaactcatcacattgtacatttgaatatattcagtttattgcatgttaattttatctccgtaaagctataatcaattaactgaccaaggacactcagagtgactacaccacagctctgacaccaaagccttctctaggcccaatgcccacagttgatgcacaccaatgtccaaagctgggctgaagagccccatacccggtatgctgtctctgaactatggaatatgctctctcctcgagctgtctctgatccctctgcacagtagccctttgtcactagcggtgtcacctacctacagttatagaggtgtgaagaggttttaaataaggcccccaaattctttgacattgagcggtggggtctatctctctgcccttgaacctgggtaggtttctaaccgcttcagccaacagagtaccttcagagtgatgctctaggatttctgaggctgatcctcaaaggcagcacagctcctgctgggcttgcgggaactcttgcattgggagccctggtggccatagaagaagtatgtctgccaccaaggtatggacgccaagctgcagaggccacaggtagacgctccacgttgttgtccttgtcttcaagtcatccacctccaggccagacacatgaatgaggcacctccagatcactccagcctccagatttcaagtcctcccaggtgaggcccagacactgtggaactgagaaaagctatgtccaccgtgccttgtcaaatccctgacccacagaatctatgaacttattaaaatggcaatttcaaacgactcagctttggggtagctcatcgtgcagcaacagggactgagacagcagtcagcgccataacttgttcgtttctcccatgctcgaactcggtagaaacccttatgccctgctgtgcttccaaagcccaaagcggggatgcagcacccccttgaaatacctgagccaacccagacttgggcaactgggcatcctgcaagaacacaggcccaaagaattgctcttagaagggcctttcacctaagcatagcccacagcttgaacatgacttccttcctctgctgaccctgacagaaaggagaacgaggctgagagaggaccatggcagggactgaggagcacttcatgaatgcctgtgagcaaacgccatcccaaaagtctgggttcaggagaaaaaggcaaagattgacaaaattatctaggccacctaagagggcttctagagttttgccccatcctgcaacagaacacctctttgcttctgaggaccacaccaaaccaatgaagctgtctatcaccagccctaccccaatgctgtgtgatgaccacgttataggacaggaaaaaagactctgcttcttggacagagggatgagtccagggctgggcacgtgacccaagcagggccactcaaatcctttcacaaagtttggtgtgacggggttcacaggcaccaaggaccacaaaagctgcagctgccaggggccccctgtgctgccatcaggaaagacctgcctgagacttaagtaaacccagagtgaaacaaaagaaagagatggcaagagcaagcaaggaagccccagccacactgctgtaaaccctgggtccagccatgactaaagctcatattacctgatgggcttttcacacgagtcaataaattcccttttatttatttttctggcttagcttgagatggagagagggctaagcaatgcagacctcctgcctctggtccctaaatgccccttcatgtttatccagctgtaatgggaaccatgccgttttactgtgatgaaaacagctgagcatttgaggaggagaaaatgagatagccgatgtcacgtgccgcgtgcagtgccaggtgtggctggcgtcctccacaagcttctgaaagagcacaacagtgtgggttcccacagaccccctgctgggacctgccacccaccacacagccccaacactgccacacctggacgacagtcttgctcatctataatggtgccctgcagaaagagtccaatcatcacaaatctgccctagacaagcaattatgttttttctatgaaaaatacaaaattcaacctacgagtacgttctaagcagctggtgcatatcctgccaaaaacgtctccactttacagaatttactccagcttcctttaaaacggtaagctcatctacttcatttaaaatttgacccactttacagaagtctcactttttaaaacaacttttcaatgacatctattaccaaaacatcatacccctggagcaaaacggtctccgctttttctcccacatacacagacaactcacacacaccccacaaaaggcttgatcgtccagccttgtcaaaaagttattataaaacattttattttatctggcagccagaaattatgttcagttgtctggaacacaggctgctagcggctgcttgccacagacaactggaaggaaaaaagcaaaagacgacagttgtaaatctcagaatccccaaagataaagcaagcagggaacaccatcgttcactcgctggtagaatcctcaggcttcctgagcaaagtgcccacgtcattcacgctggaagcaattataacaagattcttgctacaacttgaacagcttcctttttttgctattgctaaatgctttccctttttaggtagttactgatgtatcataactccaagtaactactctttaatatggttgaaactggaatgtcttcaagaaatctgtactgtcagtgttggattcatgaaaaaagaaaaaaaagtaatgggaaaggaaaacagaatcccgggcttagccatccaagtttgccctggcttcttctgccggctactttctccacgagacaacccagtgtacatcaccaggggagtctgactaagcagcaggaaaggccaccccaggggacacagagggacacaactcatgcacaactgggcatatcttggggtttcgtgccctggtcagatgaggtgagaaagccacaccagattcacaaccatcaatccctgttcctgtttcttcccaaacttctgggtccccaaatacagcaaaatgggcagcttgctcagggaaaactctgattttcacaacttagatgtcccaaagaaagctacgttctcaacaacatggtcctcattcttacagaggctggacgctgcatgcccacagaatggccatgtggccaggggcaatggctcaagcctgtgatcccagcactttgggaggcagaggtggcaggattgagcccaggagttcacgaaaatcctgggcagcacagtgagacctcatctccacaaaaaaataatcagctgggcgtggtggcacacacctctgaacccaggtactcggaggcatgtgggggcgagtgtgggaggatcgctcgaggaaggtcgaggctgcagtgagctgtgattgtgccactgcactccagactgggtgacagggcgacaccctgtctcaaaaacgcacaaaaaatggaatggctattccccacagctgtgatggtggtcggcgctgggatggaacccactgcaacctcgggggtgccccctgcccaagccccctcagtgaggatggatttcgagacaggactcaagctctggcctgcctcagtctggtgcctgtctcaccaccctggctgccgcagagtcctctctaatcccaaacccattcccatgggcttcttgagatttctgaagcctacaacgtgccaggcatgtggacaacgtacaaaggcacagatgacacaagccatgccctttctctggaatccacgtgaagcccagcagtttcaatgcctggctcatatcttgcttccccagggagcatccccaaatcgccatcatgacctctttcctcctctcctccagaactctgggcccaccccaactgcctgggggtctgtgtggccaagcctgttctgggcactctctctccctgctgcccccgaccacagtagccaacgcctgtacacacgtgatgaagcaaacacagcagagaccccaggacccttgcaggggcagcttcagggaaaggcgtcagggataggaaacaggaagatttgaggcagatcacctgccggcaagggacaatgtgccccgagggatgcacagatgctcttgtcactgcaacagccgagccgtcctcgaggctgggaaatgcatatttatactaaggcaggcagcttttcaaactcagaggcgagccaagcaggcccgtgacagaaattcacggatgtgccgctgaacactctgcaccaacaagatgattaactgcctcccagaaaggaaaccaacaggccaaacaccattcagatgatacccccagggacaaagcaggcaggagactccgaacctaagctgtgcccgctgtcgaccatcagccccacacagggagaggaggggtaataaagcatcccccaaaagcacagtgagagaagcagccacatccctggcagcagtggaaacagtttatcttctaggagtgtgttgtatttctttaaatattgacacaaagaatggctcattcccttcgcaggggcccagcaggccaagcactggcttcctaagaaatccacgggaccccaacctataagctgtgtctcttcgcttacagagaagaaaggtccctttctgctccccaattctggagcacgcctaagcacagggtgcagtgtggacaccagagcagaaggtcccctgcagcagatgtgagcgagacctctgtcccttcacagctggtcccaggttgcatccacaccaccaccaaagccgaccaccagtgacgcctgacgttttctgctccactgggtgggaacactcccggctttactgggcttttcccctaagcttcattgtccagctccatccaaacgccacggcagggggtttgatctacgacttgctaatggattgagaaaggtaccagctccttcagcccaaagccagtttgtgcaaccccatacaggttccagcaggcaaattctctgtctggtcgtgcacatgaaattgcctgttgctttggaaagcaggctttgcaaaaggacccactgcatctgcagctggaaaacgctcaacaaaactgggcagcagctgtcccggtgagactttctgctaggcttttccatgagaaattcatgtactgagaaggctagacctttttgcagaggaaaaaatgtaacccgaaagccatttcttaaaaagaccagagtgtctgttctccttcccttgcctcgggtggactttttggccagaggcctcctgccgggagggaagccgggtgtgcactctcagtcacacattctcccggctctctcccttggagggaacatgaacgccgctgattcaaaaatcagacactactgcgggagctggcagggacctctctctccacccccaccgccccctgcaacaccaagccagcaccgaggccatgcgctcactcagccgcctggcccatggccttctgggggccaccatccctcctccagcctcagggctggaccagctgccaggagcttccctgagccacctggacagccccagccagtgtgcactttaaataataaactatgaattcttgatccgtctgcagctcgaggcagattttcctatttaagctggaggccttctctgctttgagttactaaagtggggcgggcgtgtgttgcataagagtccaggggagaactgggaagagccgacaccacttcttgtccaattcctctgtttggtggagctgcatgtgggaaaaaggattcagacacatatgcgcacacacaaaaaatggcatcatacccttttattttttgtttcaatgtttagattttagcttttctttcttaatcaagtaatattcaagaagaggtgcctgccctagcctcacatctgggttctcagagagaacatgtccaacagataagtgaaaaaggaaaaaaaaaaaatacttaatattgactgtgattgccatgcttagactcgtgggagaaaaaaggaaacttctttatgtgttgcagtagacggatcaagaatgcatggtttattatttaaagtgcatgctggctggggctgtccaggtggctcagggaagctcctggcagctggcccagccctgaggctgcaggagggatggtcgtccccagaaggccatgggccagacggctgagtgagctcatggcctcccaacaccccaaggatgtccacatcctaatccccagaacctacgaaaatgtgaacttacatggtaaacggggctttgcaaatgtgatccagctaaggttttgagatgcacacgttatcctggattatctgggtggctttgatgggtctttagatgagggaggcagagggaaatctgactacagaagagaattgtcagagtgacgcagtgtgaaaaagactcaacagccactgctgactttgaaggagggggaagaggccatgagccaaggaatgcaggcagcctctgggagctggaaaaaatgaggaaacagattctcccctggaacctccagaaggaatgaaggcctgctgacactttgattttaccccagtgaaactgattgcagacttctgacctccagagccgtaagataatatatttgtgttattttacaacactaagtttgtggtaatttgttagagcggtaataagaaagtaatgcctgagtcttgccttcctgccagaatgccttggatacaatgaagacaatgaactgcagatacagtgtgatgctcagcccttcaggagtcagcaaagcacttcaggattacagaaaaccaaatgaggcaatcagggtggactttctggagaaggtgacatccaaattgggcctccaaaaccaagagagattttcaagagcagtacaaagatagacacaaaaaggtcactccatacagtcccatgagcctaagtataactttaatgtaccaaaggccctgtgacctagggatgtgcaatctagggtgacctccattaagtaataatacataaataaagggaggcccttacacatttaaattggaaaatctagatacaattttctaggaaaatacaatttaccaaaattgatcccataagcatacaaagcttaaacagatcaattttcacggaagaaagggagaaagttatgaagcaactatagtcacaaaaaagcattaatctgagatggctccacgggggattctactaaacctctacaaaaccaatagcttccatggttcataaattgtttcagagcaccaaaaataaatgaaagcttccatacttcttttcatggagctataatactaatatctaaactgaaaataacacacacacacaaaacaatattatagggcaatatcacatatgaatatggatgcaaagagcctaaataaaacactagcaaacagaatgcaataacactctgaggaaagaatacaccacaaccaaatgagatttattccagaatttaaggttgtcataacattagaaaactatttacataatatgccacattaatatatctatgcagaaaaattatatgcaagcctccatgatgttgcaaaagtgtttggaagatttgatacccatgtccaattttaaaaaatacacccacacgggccaaatctgagaccgtttgggcatctaaataaataaatgtagaatgaatattcatgaggtaaaataagaatctacaactccatgcagctaaacacaaccttggccaagtaacagaagttgacatccccaataatgggacagacatacagcatgtgcctcctgataagatgcactgagcagaacacaacatcactgctttcttgctggacacgtacaccccaaatgtcaccatgaagaaacgtcagacaaaaccaccccaaacgtcaccatgaagaaacgtcagacaaaaccaccccaaacgtcaccatgaagaaacgtcagacaaaaccatcccaaacgtcaccatgaagaaacgtcagacaaaaccaccccaaacgtcaccatgaagaaacgtcagacaaaaccaccccaaacgtcaccatgaagaaacgtcagacaaaaccaccccaaacgtcaccatgaagaaacgtcagacaaaaccaccccaaacgtcaccatgaagaaacgtcagacaaaaccaccccaaacgtcaccatgaagaaacgtcagacaaaaccaccccaaatgtcaccatgaagaaacgtcagacaaaaccaaatttaaagacatcctacaaaataactagtctatactaatattttggggaaaaaatgtgaagatcaggaaagacaaatacaaaggaattaacccagattggagaagactcggaagacatgacagctaaatgcaatatgtgagtctagactggattctgtaccaagaaaagaaagctataaaagacattactgtgacaactggaaaaatggaaatgcaaatggcgtattagataacagtattgtatcccctaagtctatccttacgttaaataagggttctaagaaaatttgtatgtatagataaagggacatgatgtcagcaaattagtctcaagtggttcagaacaaaatatgtgtggagggagaaagggttggaatacgaaagagagggttgaaagagggaagagagagagaacaccataaagagagaaaaatgctcatcagtgaattcgggtgacagatataccaaagctctttgctactacagtataccaaaataagaagcaaaccaaaagtatgggagaatattgtacaagtaaaggggacaaggataacagagcaaagagttatttttgagtctgggtgactggaaaaaaaactggtgagaacatggacaggcatcgtcagacaagactttggttcagaaacaccaagttattgggaatggacagtgcctgcagccagccacaaagacaggaggctggggacagagtgggagatatgccgagtgggactgctcccagctggagccaggaaggatcccaaggcagtgagaaaaagagcagcagagacctgggacaccctgtttggaagaaggtgcagaagaggagccgaccgtccctggagagtgcattttataaaccgggaactgaaggaggcacaaggagtgaggggtccttattgtcaaatgcctctgagggacaagggggcaaaccccgccggctctgttgtaatggcatgacctggggcaggtcccaggtgggagacatcagtccacagaacccacctgatctcagaggtaaaagcaaggatgctaggaatgctgggctggaggccgggaggcaggcaggcagcgtggcaggtgggcgggaccttcgtcctctgccccaggtatccactgcagggataaggagtccaccgtgcaggggcactgctgcttcctgcggcagcctcggctgccagcctgctgactcggttcacccctcttttctctccccccacccttcccagggaacactgcagggaaatcagaaactgatcaggggacagaacaacactggtgatcggccgatctcaaggagggtggctgtgtgagggcagggacatctgtctcttaggatctccagtgctcagaacagggcttaacacagcataaaggaacattagtcaagcaaatacatcactgcatcactgccctagataagagggcacgttacaagtgtaaatgcagaagcctgccagctgtgatggctcacacctataatcccagcattctgggaggctgaggtgggtggaccaatccagtccaggagtttgccaccagcctaggcaacacaatgagacccctgcgtccacaaaaaattttaaaaaaaattacagaggcctaaaaatacactaaaagacaactttaaagacacacacactcacacacagtcactgaaagcttaaaagtatacagaatttaactcatacttacatgaagcctcatttaaacactgccccaggcctggcttatccatttccaattgtctccagatcagcccagaaagcagggaccactggagggaaccacgggggcagagggtgtccctccaaggcgagaggcccttgcagagcctaagaggctcactttggccaagccttgaacactcccgaggaaatctccaagctgctttgtggaatgactctatttttacaaagtaggaaggatggaaggaatatggcatagatcaacaggttgttcatgcaggaagaaatttttttaactgactacacaaggttttttagaaagtaacaaactttcttaagttactagcattttgagagggttagggccccagcactgtgcattgatggaatctgccactggctgcctccccaggatgccctcctgaggtaccatgccaccccaacttctgccatagctgtggtggcagtgcagctggcccagcccctcctcaagcatgtgacgctggcctttgattttttacaggttttcttgcctagaagcccactcccttggcctgcacaggagcatctcagaaatttgggagccaagaacccccggatcacacttccattctcgccatccgtgggtcacgtctggggagccttctgtgcacactccagtgttcccttcggaatcaagcccattgcctgcagcaacaatcttgacacacactcactccccttccggtggattttccactggatgccagtggattttcctctgccctgtctctctctcctgcttcctggaaccccctccctccctgacactgaccacctgcacccaagtcctcatcccaggcttggcttttgggaaacccactctatggaagttttccatagagagatgacaccttacattttaataatactttctacttcatgaaattgcatttgcatgagttcatttaactcaatttaacttgcaacctggagaagcaaatatatcaagacatgcattccctctctctcagagatgaggaaaggtaggaataggagaaacaggctgacttgtcccagcctctacgtgctgggaagtaggggcaggccctgcccaaggccactaggcccatccatggctgtgtccattcccagtcacacaggtgggcagcaggaaatgtcccttttacagtatctgacaggctccacacggtcatacagcctccggggaataataacagcaatcatcatagtttttagagtgatatggttgggttttagctttattctccccaaagggtaattacgaattatcagcacaacaccccttcctaaagggtaagtgtccactcacccgacacctcaaaaaaaaatcctaagatttcctcagtcgtttgtctaaaaaacacataaaaatgggatggagggacttggataaagacatagttcatatcaaccaaacggcagggtctgagcttctcctcaaagcttgtgaggcacaagcttggaagacaatggcaaacgtagtaatgatgacgactgaacactcagggtgtaaaaggggccccatgggcttctctggaaagcactgaagtcccagaaacaattatctggtgacttccacagtgcctctgccccatgagcaccagggagacaggaaatgaggacccaggttcccagcctcaaaggagcagagggtctgcttgaccctctgttcttccaggatggaccctcgctcagctgacccctaacatcagctccagatccctccagatgagccggtggggacacatcagaaatgccacagggctgtgctctcgcagggcacgcaagaaacaccatgcgaggtgtgtggccccagggaacaaatgttgagcattttgggggggacaacactgagaaaaagagacaatgcttggacttgaggtcagcaaaagaaatagtaagtgcttgctctgctgacttacgaggcatgcatgtggttttcttctcatgttatggtgacaaggtagcctttctgttcctctgccatgggtgccttgctgggcataaagctgggcacagccaccattcctggtttagtttctgaaacctgagctcccaaaagagtaacaccaggggcagggggcagccgtgagttgaggggccaaggctgaagcggccaagagcagagcataggacagcgtcctgtgaatgggacatgtgcttttcagtagcgacccgaatgccagagggactgagggcctgtcttgaaagtcctgccattacaaagccccagggacatttgcaggacatggaagggaaggcctccatcaatgactgaggtgacgggtcagagtgcatgatctgactttcagatgatgagacgatgacatttctgacacgcctgagtccaaggaatgaaacagtcacactgtttcatgaggggtaaatcattcatgaataattcatgaaacagagtcagacaacaagaaggacctagatttaccagacaaaatctaacacccgcccccccttatagttttttaataccaggtatggtctgagtgtttatgtccccctcaaattcagacattgagacctaacctacaatgtgatggtgttggaaggtgaagcctttgggaggtgattaggtcatgagggtggggccctcatgaatggtattagtgcccttataagagagtctccagagagccagctagccccttcccccaggtgaggacacagagagaaggcaccatctgtgaagcagagagcaggcccctcaccagacactgaggctgctagtaccttgatcttgggcttcccagactgtagaactgtaagaaataaatttctgttgtttatgaactatctagctgacagtttttgttatagcagcccaaacagactaagaccattccttaggcaaatgcaaaataaacaaacgggaaaatctcctgttccagaaaggtgaagaaatctcacgcctgtaagtgagtgaatgatctgagacctcaacaatccagcagttgttgggctcaaatattggcctactgggtgaagggccaatgttaacctacaacacggagatgggggaatctggccaggaccccagagtggctggacaaccccgcccatggcacaggggtgcagggaagtctgtctgcattcagagttcaggataccagcgggacatgggcagggtccccagtacaaatccccaagcctgtgctacacacacaagtagatcatcctgtgcttccgatggcctaaggataagcactgaaggagagatgacatgtgcacttgtggaagagccctggggcatctggcagaagtgcatatgaaatgactcagtgaagacttttccataatgcagggcataggggactcccaaagagggtagaatagcactgggggcagggggtggccttgagccaaggctgaagcagccaagagcagagcaaaggacagtgtcctgtaaatgggacgtgtgcttttcagcagtgacccaaaagccagaggggctgagggcctaccttgaaagtcctgccattagaaattcccagggaagcagggcaggagggagaacacatcagcagaatttgagctcacggtataaaattacaatccacatgtgaaagggagtgtgagctgacactcctcaagaaattcagaagctggctgggcagtggctcacgcctgtaatcccagcacttagggaggccgacgcaagcagatctcaaggtcaggagtttgagaacagcctggccaacatggcgaaaccccgtctctactaaaaatacaaaaaaattagctgggcatggtggcacgcacctgtagtcccggctactcggaggctgaggcaagagaatcgcttgaacccaggaagtggaggttacagtgagtcaagaccgtaccactgcactccaacctgggcgacagagagagactccatctcgagaaaaagaaaagaaattcagaaggtggaatcactcaaaaaagacttcaaataattatactaagaagatctaggtggggcgcggtggctcacacctataatcccagccactcaggaggctgaggcaggagaattgcttgaacccaggaagcagaggttgcggtgagctgagatcctgccactgcactccagcctgggcagcaagagcgaaactctgtctcaaaaaaataaatacataaaagatctaaagtgataaaggaaaggtaacagcatcatgaaagaataggacactataaaaaagacagcagtggaaaagaatcagatataacttctaaaagtattgaatataattgcgaaaattaaaaactcagtagaagattaaatggagatcagacgtagtttaagaaaaatctggtgaactgagaaaccgatgacaggaaattctctagaacagagaacacagagatggagaccaaaaacgcaaaaagatgacacaaaacatggaggaaaaaatagtaagatccacatatatcaactaggaattccaggagaagacgtaggtaatgggaagaggcacgtctccacgagagggaggctgggaaaatcacgacaagtcccaaacagaataaacatgggaagtccacgggaaatgctgcagaacccaacaacagtcctgcacagagagaaggcagagcattacacagaatctaaaatcagaggggcagaggaccttttgtaacaaaaatagcagtctgaacacagtacaatagtatctttaaagtgtgaagactcaacctaggattccacatttggataaatcgtcactaagaataagggcggaggctgaacaccatggcccacacctgtagtcccagcactttgggaggccgaggcgggccaattgcttagttccaggagatggcgaccagcctgggctacatggtgaaaccctgtctctaaaaatatactaaaaattagccgggtgtggtggcgcatgcctgtagtcccagctactcgaaaggttaaggtaggaggatcccttaagcctgggaggcagaggttgcagtgaaccaagatcgcgccactgcactccagcatgggagacagagcaagactctgtctcaaaagaagaaaaaaagagtaaaggtaaaataaagacagtttggacaaagcaaaaataataatttagccatttgcaaaccctcatttaaaaatgttcttcaaggacattaagcccagggaagagggttgcaagaaacaatactgagcaagctgacaaagatatcagtaaatctaaataattctaactgcaaaaacatgattaccattcattgggaagagacaaagacaaaatgtggttaaattaacagataaaaataacgtgtaaaatcaagataaagcatttgaaggcttttatattatcaatgaaggaaacctgatgcctcagacttcctttatatatttttaaggcaacaacaacaaaattttaatagattatcaaatttccacaccagtggaagagagaaggggaaattttttttaaaagttggtcaagccaatagaaacaaacaaacaacaacaaagagaaacagaagcaaagaaaaagcatggtatagtaaacagataaaataaataaaatgaattctagcaatactagaaacatgaaaacactaactctgccaatgaaaaaacatattcccaaatttgacattttttaaaaaattcaaatatatcttacttttaagaaacatacgtacatcatcatgacagagaatgactgaaaataaaactaagggaaaagaaacatcaagcaaacatttaccaaaataaaacctgactggcaatactaacgttagctgaaaacatctggaaggacaaaagtattggcagggataaaaatggcccattacatgatgataaaaggaatggctcaccagccgtacagctcatacacctgtgtgcaccaaacaatactgcctcacaacttacaaagcagagatcaatagaattaaaaggtaaaactggccaagccacaataagttatgagatttttaatatatctctaaaacaaatcaagcaggtccaaaataatgagactataaatgattctgacatcacactaacttcagtaaatgggcatatagaacacaacaattagaaaatatataatctgtttgcagtaatttgagattatgtactcttttcatttatacataaaacatttattaaaacaaaaacatctatgttctaggccacgatgcaaatctctaccactaccagtaaatcaatgacatacggaattcagtatgctcaaaagcttctaataaacctaatcctcctacagatagcaactgtaaacttgaaaaaaatacaaaaatccaaacacctgaaggttggaagatgtgggtggagtcaacacttggaagacaggaacagcacaggagactgagggaaggcctggtcagtgccatgcagaaggggtaacgctccaacagaaagcttgcagcccctgtgatctgaagaaccagaggacagagtgcagggcaacaaggtgactggaaagtatgggggaggcatgctggaaaggagagatccacaaaggggaagccgaaaattctgtatataaattctacccaactctcaggatgatgcctacatggaaaagagtctagttaagaataaaagaactgagatttgagttgccacccaagatacaaattctgcagtctgagtccaacaaaattaattgccagctaaaatactctccagagtaatagaattcagaatctccacgttacatttacaatatccagaacacaatccaaaattacttgacacatgaataacttggaaaatgtgacccctttttaagagaaaagacaatcaatgtagaccaaacccgaagatgacccagatgttagaatagcagacaagaattttgaagcaattattaccataatgctcaaggacttaaaggaaaatgtgctcatgatggatgaaaagacaggaaattgcagcagaaatactgacactacttaaaaaatggaaatatcatatgcaccacattctccattgttatacacagaattataaattggccaggcgtggtggctcacacctgtaatcccagcactttgggaggctgaggcagacagatcacgaggtcaggagatcaagaccatcctggtcaacatggtgaaagcccatctctactaaaaatacaaaaaattagccaggcgtggtggcgggcacctgtagtcccagctactcaggaggctgaggcaggagaatggcatggacccgggaggcggagcttgcagtgagctgagattgtgccactgaactccagcccgggagacagcgagactccgtctcaaaaaaaaaaaaaaaaaaaagaattataaatcatgttgtaaagataccaaaaaaattatatgaaaaaataaaaattcaattaatttatagcataatatttactttctgccacatgctgtgtttacatatattaacttaatcatcttaattttataaaatacatgcaagcattatcacccttttacaaataaagaaattgagacactttaaaggggttaaataaataacccaaggtcactcaagctagtggtagagacaggaaatcaaatccagtaaacttgtgtctaaattcttaccactatactgtactgcctctttagggaaaaggtatgtggaaattacagactatttagaagtgggtactagaaatattacatatgaaaatttgtatgcccctacaggtgtgcttacagggaaatgagtagccttaaatacagaaattaaatatgaagatagtaaaatttactgagctaggtattctactcaagaagttagggaaaaagcaataggaataaacctagagaacatttaaaaaaggaataaaggaaaaaaaataaagatacaaatagaaattcaaaaataaaaacaaaaccaagccagttcttcgaaaaggttaatagacaaaactctgcaataaagataaatgaactagatttgcatttattaagatggataaatctagaagacatgactgtgagtgataaatgcaagctgcacagcataaaatcatttatgtgaattttaaaacatacaaaacaatacagtatgcagtttatgactatatatcataatcgctataaaagtacaaaaaaacatggaaaggaaggggtcccctatgtcaggtcagtctggtggttgcttccggggaataagccagagccatgatagtgggtggaggggagaacgccatcagtcacatccgtaaacgttcctttctctcaaaaaaaaaaaaaaaagaagaaagcatcccagcactttgggaggccgaggcaggcagatcacctgaggtcaggagttcaagaccaccctggccaacatggcgaaaccccatctctactaaaagtacagaaatcagtcgggcgtgctggtgggcacctgtggtcccagctacttgggaggctgaggcaggagaatcacttgaacccgggagacagattttgcagtgagccgagatcacgccactacactctagccagggtgacagagtgagactccgtctcaaataaataaataaatagaaaaaaaaagctctgaagcaaatctgaccacatgttaacatagggtaggtctgaatactggatacgcaggtttcttttttgtgttttgcctgttgtaaattatttcataattcaaaataatttacacctgctacattcatttatgtctttactgcctatctcccccaccaaaccctaagttctctggaggcaaggaccatactatgtcatgttcgccatagtatgcaaatctcaccagagtccggagggtcagtgagaagggaagcataacttcctgtctacaaatactaagattccttgatttcttgtggatttgctcaagaggcaaggatggcagattcaagaatactaatgagagtctctagctcccagcttagtgctctgcaggccctctctctccctgacttaatacagaaaaagggcattgaagtggtctcctcaatagtcaaaaatgagcaggtgaattataaccacagcagctgcagcaatagccaacatggactggccctaagtggcaagtctgcattaactcatttaatactcacaaaagccctaagaggtagatgacattacaaggaaactgaagctcagagagggtggcaccattctaacttgcctgagcttacacagcccctcaaattgttatcaagagtgtaactgaatagctgaccagccaacgatggtgtctattgttacagacagggtccctttgtgtggcccacttctagtttcctgtaaatgtgatttttaccttttagacatttatgacggttcgcttgaacatgccctccagagtggctggaggtggttacagcacccctggttctcagtgttcctccgcaattatcctacaacagacatcaccaccccatggtgcaggtaagaaaacagaggctgtgtggcttgaactatgcaccacacccctgcccaccactccagaaccctgccagattcctatgttgaagtcctaacccccaggaccttagaatgtggttgcatttgcagatagggtttttacagaggtaactaagttaaaataaagcacaacagtgggccctaatccaatgactgggatcctcctaagaggaaatttggacggagacatgcagagagataagaccatgtgaagacacagggagaggacggccaatacggtttggatgtgtgtcccctccagatctcataatgaaacatgctgcccaatgctggaggtggagcctagtgggaggtggcggatccctcatgaatggcttagtgccatccccgtggtgatgagtgagttctcactccattagttcatgcaagagttggctgtttaaaacgaccctcacctcttcgctctctctcgttcccttctctcttgctcccttctctccccatgtgacacgctggctccccttcatcttccaccagaaacagacactgacactatgctttatgtagacgctgcagaactctgagccaaaataaacctcttttctgtataaattacccagcctcaggtattccttcaggcaacacaaatcgactaacacaatagccatctgcaagccaaggagagaagcctggaacagatcctttcctcatagcctcagaaggaaccaaccctgtcaacgccttgatcccacacttttggcctccagaactatgaataataaataccaacaaaacaataaatttcggttaagcccctgggtctgtgcagctttggagcagcctcttcgctccacacacagaagcacagagacatcaagggactctttttctggggttacagcaaagggaacagaattgcgcctctaccatggttcttttttctctttgcggaataataattcttaaactattgatgtctacttatagagttaacatttatatgcaaataaatgtttaaaatattaacttaaagaaactcaaagtagcaatttaatgccattccttttaggttctgcttccagttaagatgtagaaggacaggaaagactccaactaccacttttacagcaaagaacactggatacactacaaaatcatattttattttatccactgggagagctacggtctcaaagaagtgtagaggaaccaaatttcagagggattggcccttgctgagcaaagatcagctacagttatccctggggcacaggtggaatgaggagctcattagcatctaagctgtggaaataaggaggaaacagccaattgttaactgtgtgggctgtaataatggattacacctggatttgagatgtcctaaatctactccagacttttaccaagtgtgtgatggctggcaaaagtcaggacagggatggaaacagagtggtatctgcatagtcacatgagtactggcacctacgctctttatggggagagacctaagcctgccataaacctttgcagctagtggcaaacccaatccaagccaacccacttcaaatcccaattaaacagaacgtttgaccccctcatcctaattaaaaagaagggttgacctcatcctagctgcctcttggtcaccctaagcggagccaggtgaggacagagggtgtcatacaaagaagtgaccgcagagaagtgaagcttgggtaagtgttacctgatgtccaacctcctgctttactcatcagctccatgaactcatgtcaatgatgtctttagtgtttaagtcagtttcatttctgtcatttccaaccgaatgaatcttaacccatttatgccagaggttgcacattttttttgtgaaaactcagaccttggcgatgaccttgagcagtagggtataaataactcccacaagcttagcgttccaataatggaacactaggcataattggtacaaagcacaagacctgaccaactgtgcactacagaggatatacacgtattatacgtgcaaattcttgcataaattagcaatgcgcagtttctacagagttatagtatccaccaaatactcattgacattacctttataatgctataaatgaacaaacaatactaaaaaataaccacaatgattttttgaaacaatgataacagaacttaacctataaagtagacatcagtgcttcacagaaaccacagctggaggcataatcacgttccagtgagctcaccaccactcagcatgttgcaggattcctatactgcaaaggccaagggaaaatcactcttctatttcaccatctacttctaccacacacatgtgaaatacaccatgggggaggagaggaagattcatagttacttaagagtatgaaaatgctgggaggaagattctaaactgaatcataatggagaaattaaaacaagcacagaaggaagattagaacgtttgaagtcaaagtaactttttaaaaatcaaggaacatttcaaaatatccaaggtaccattttagtttgccaagttccaacctggagtgctattttatggatcagtttatcaggcccccaaaataaggagcaatgtaggaaacaggatcagcctgtcccctcgcctgaagccccaaagaccattagaaatgcaacctcagtagtatccaagggaaagaaacagttcccagatggcctttgccgtgtcagtccttctagccaccaaccctgctcagacataaaaccctactcagcacagcggctcacctaggttcacctttcaagtacactgagtgcttcatggaggaagtttcttagacttctcctcacctacaagagccggcaaggctactctcagaccatgtccaaggctatcataacacagggtcaccaacagggcacgaaacctatggctgccatgttcagccaggaagagcatgttcccatgggaaagcttggattaatctgattaatctttctaggaaagattaggaaacttctaggaaacttaaagaatgtactttgcagatgtcccagtaaattaattttcccgatttctaaactcctgatgtttgaaagctaatccaaactagatagggcctaactgactgctcattagctcagcctattaaaaggcccattgtcattctcaggacagccacatttactgaatatttcatgcaatgcaagaaggaccagaagcaaaatatgtaactctcctctgtgtctgtgttcctgactagtgcagagcctgagtctggcacaaccttaaatccgcacattactcccgcaccaaaaagcaagctgatgcaaggtttgagagcagggaaggagagattgtatttttaagcaagttcagaaatttctccctacagtcttgcgtggctgctcttgttttaacttgttccatcacacccaccccaccctgattttgttaattttatttcctcattaaaggctaaacagtctatcaaaagaatgcctcaaaactctccttagggacaaaaatgcaaacacaagcaccatttatcatgtcagtgatcctcagtatcacaccactaaaggggatggaaggcggccattagacaaacatcccattatctcatctacaagcacgctgagttctgaccatggactagagtctgatgaacggtggcgtgagcagagagaacagtgagaagaagacacatctgtcctttgtttcgttgcatggccctgcttgaaggtgctcaaatgggaaaatccactcccgatggcccacaggtgctattcctcaggtttaacagtccttagcgatgtggttttcaacaccagctgaacatcagaaccacctgggagtctttactttgccagatgtccccaggatgtctaattaaagtggttctctgtgggtgggacccaggcgtgagtagctgttaaagcttcccaggtgatgctaaggtacagccaggactgagaaccactgccgtagagaaatccctctgcctctgtgccggtacgtcaagacagaactaggtagggtcaggggctcaggttaaaaatagcacactgcagggggccaggcatagtggctcatgcctataatcccaggactttggcaggccaaggcgagaggatcacttgagcccaggggttcaagaccagcctgggcaacacagtgaaacccatctctaccaaaacaaaaattagccaggtgtggtggtgcacgcctgtggtcccagctactcaggagcgaggatcacctgagcgcaggaggtcaaggctgtggcaagccatgatcacaccactgcactccagcctgggtgacagagtgagatcgtgtctccaaaaaaaaaaaaaaagccatactgacatcaaatccacacacaaccaactgtcagaccaaagaccctgtttcctattaaaaggtattttttaggtgctagtaattgtacggggtcttcctcacttttgtaaggaggcagaaagaacagaaaaaccctaatgtctccatttgagactcaaagctctcttgaggtttcagagatgccctctatccagcacaatcacctctaatactcaccttgcccacacagactaggctaaggagaaagtcaatgtactgccatccagtccacacacagcagctgagctcaactgcaaaacttgtttacaaataacaaggtaattctaaagcagtcacataatttattcccaatgtcaccgggatactaaaccaagacacattgtttccaatgtcaccagaatactaaaccaagacacactgcattttcatacaaagataagtctttaaactacagaagcacaacccccagaagtcagcagtggggtcccacgatctcctgggaggaaatgccacctgtgctccaacttcatctggggacatttgtagccccatgaaatgtccttaaacaggtgacaggtcatccacattagggttgttcaaagagagacccagagtataagagccccaggttctccccccacactgcatcttaaaatcacttttaaaaaccctggcacccaaatcataccccagactaaaacagatcaggatgttgggggacaggccagtgcatggcaagttttaaagcagtggttctcacactttagcacgtatctaaatcccctggaggacccgtgaaactacagatgactggaccctcccccagggtttctgattcacagctctggcctgaaaatgtgcatgtctaacaagttcccacgtgatgctgatgctgctggcccgggggccacactgtaagaatcgagaatcgaatcacagcttcagaggcgccccaggtggctttagttactgcggccagaactcgggagcactgtattattaagagtgagctcctggccagggcaccaggaggagggaattcttatccaagctcggctacaaggttttttggacctcaacttgctcttgatatataaaattgagggactgcatgaaagagatcctaggttccttgcagaaacaaaacgatgactttttcaaaggactgccgacactaagacacatagaaaggaaaaggaagtggtctcagggcaataaaacagcttttgaaatataggggaaggtaagttctcactcatgtggcttcagtgcacttggagacacacaaaggatgtgggctgtgcgtgtgttctaagctggtcatgctgctgccccgactcacctgttagaaccttgcagagctgctcaggtctctgggcctcagcagaagggctgggggtcaaggaccatttgcgcctgatcagatgttctcgtccactgaatgggccctgggagttgttgaggggctggattagcacctgctcctgcccaagctgaatgaggccaacctgtccagaaaggagaaggaaacgcgatgtcggtcatcctcactcacacacgcccatggccccccggaggggcaggcaagaccaccttgctgtgatttggttttccaggtctgggctcgtttctttgcagattggtcagatttacctgagcccaagagtgagcttgtgtgtgacttacaaacataccacagagcagctgcgttgggggtaggggtacagagacagatacaacagcatccattttccatgttggctttcagagaagatgaactacttcattatcaaatttttaattttaaaattattttttaagttacttcaaaaatcatccccccaaaagtccacctgggaggcaacactgaaattgttgggaatgacatttgtatccctaatggaaaaatgtatcttatccctgggtatattaagagtaacattagtattgttttgacagcatcaaaacaatttgccctccttcagcaggcacctgctgctagtttcccttcttatgcagagtcaaaatggtaaatctctcaaggaaatcgaacccaggcagggccaggggaggacctggtttgaacactgatcgatgcagtcaacatccccttctcctgggaacaatcccgaactgcctttgatcgcagattcaggagatctggcggatgagtctcagggggccatggcatcctttcttgtctccctcttccaccctcacttttcaaaagccatgacacactacacccctggttctcaaagcctagcgtgtgcccaaatcacctggaggtcctgctggagcccaagaatgtgcatttctaagaagtttccatgtaatacagggaccacacttggagaaacagcactccccaccacacgcagagctaactccagtctcaagtataaaactcacttaagccaaatgagatagaccccagctctacgttctgaaaggatgcaccagtaccaagattcctggaaagtaaatcagatcaactaataagatcgcctacaatcttgcgtccccaagatacagggtgaggccatacttaccgctctaagcatatttcaaggtttccatttcattagaacttttgccaagaaaaactcaaagattttactgcccaaataaaactgtctcaaagtggcactgcatgacctgcaggagagcacagctttcctccctctccttcaaagtgaaaacttgagtttgttcactaggaaactttggggaaactgaagaaatggaagacggtggccacagtgggatctgcagagctccatcacagctgtgcgcgatgcggcctcggtgcagaacacccgaaaactgccgcagtcaagaaagagtgggcagggtacggcacagtgcctgggatggagccccgcgtgggaggaccccccacctgctccccagaggatacgcttcactctaatgaggggctgcactcatttggaaacaccctggctgtgggtcaaagcccccccaggatctagcactttcaaagctagttattattcgttcagtctagagtttgcattcacaaaccccggcataaaaagcagtcagctgttagttctaagctgatacaaatttttaaagacagggagatctcaccttggtgagaaatcctacacatacacactcatatacacatgcaaagcatcacttagcaccttagggaaggtttttctttacaattctcagggcccccatgtgctggtttctataaacttaaggaagaaaacagcaatgctggggaaagatggatgaatggactagtgggtactcgccccggcagccacttgccctcttgggccccgacctcgaacagggatgtggccaggctagcaccaggaaggaggggttgtacagggccctcaccctgggaacctgcgtgaggaagggccctgcctcctcctccctcactgtctcactgtccccaggttccttcaagcctaacactgccattgtcagcatgccaccagtggtcaaacgtcctgttgagaagtgccacctatgcattacacacagtctcaccccaaatacccaccagccttccttctctctccctgacctctcttccctaaataaacccccttccccgcagccccctgcactcttacattccagcccactaccccatgttataggaccttttcacgacctaacggtttgttccactgaggcaagatcagaattattcctcctgtttttgccaatgtctgccacataacagttactcagaaagaaaaaattcgactgaaaatgcagttacgtgcacagactgcctgcagccccctggctcagggcttctcatccccggctacctattgttatgatctggggagcttcgaaaactcctgatgcctcagcccctactccaggccaagtgaatcggaatctctggggtggagcccaggcactgatattttttcaaaggtgaccaggaaaattcaatgtgtagccagggttgagaagcgccgtcctagcttttcactgggtgctggagaccctggacacctactgccttgattccatgtggagaggtccttggatttggaacctgggacttcctctgtggagctctgcccactgcccttgcttctggcccacgactgcgcgtggccccaaaagctgagcagggcttcttggatctgtgtgactcccgtgtcaccatctatgcggggaagggagactcagggaaatgtttgtccaaggcctcttctgtcccattgatggcgatgaagaaacactagctatgagcctgtgccttagacacaagaggcctgcaaccgtcctccaaagagacaaactttgtagaaataaatgcctatggcagacagaactggcagccctgaagccccttggttttaaggcatataataaagcccccaatgaaatggtgctcttaaaagagaaatcttcagttttgcaggatttggtatgctatactataagtgtggctcaaataaaatggatcaggcaataacttgatatttcagcagttgtgagtggttacctttcaactctctttgttgtgggtacttgctttgaagggttctattaagacagagttgtaaatcaggcattgttcacgccacaccacctcgtgcctgaagcaggacgagctctcactgcagtgtggaaagtgtgaaagacatagaggtttttatcacctaacgttagcacatgttctcggcatagcttagaaaatgcagttaagataacagagaacgtctgtcctgtgtgcttcaaagcagcatgcctctgtgggaggggacaaagtcacacgattccacaaagaccgcaatggaattccctttcttcaggagtctgcagctcctcagttaacatgagtgggtctcaggtctccttctctaggtcaagatgggttgagaggatagggccaacggggtggtgagtttgcttcctgtagggaccaaccagcttccaagaagaaaaagccaccctgtaactgcagatcctcccgtcctgcctctgactctccggcgggcacacacctctttcgatcctcccgtcctgccccccgactctcgggtgggcacgcacctctttccgtggaaggaggctcccccacgcaacacggccacgcggggcttcccaacctgcaccccttctgaggcaccacctggagggcccctcccccggtcccgccgcctcctcgaatgtgaaatgcctgagcacagacgcttggtcttcttcccaaagcaagcctctccttggtaatgtgggggtccctcacttcagtgtcagccctttcagaccactagtcagtgccagccagccaaaaaggactgccagcctgcccttcagagtccctctcgtgtggtcttccttcctttctgaggcttgccatggtcggaggcttgagcctggtcacctccctgctctaagtgctcccctcgttcagtcctccccatacggctagccccaggattccccaactacccatcctccatcgcctctcagccagtgaccctcagagtgccctcccaggacggcagcatcagcacccccgggggaacttgtgagaaatgcaagctctcaggcccaccccagacctgctacatcaaaaactcctggatggggcccagcagtcagtttaacgggccctccaggggactgtaacgccggctcaaggttgagaaccactgctctaggatcaagtccaaatgccttcggttggcacccagagacctgccccatttaatccacacgcctgccagttcagttcctctacccccatctctcccgtaaaaccaccaccccacaaatccactcatgggtcccttatctcaggacaatggggcctcggtgacttttcagtcactcacttctccctcctggaatctgaaggctaccctcctccctccccagagccccgccctgcccagttccaggctccagcacacctacctccaggaggctgggactgccttcccagacagggcctgcattgtctttctctctgagccttgctgggcgcctaccagagcatcctgcacgtggcaggtgcgtgataatgatctgctcattcaggcaacagcgatgactgatcagctgatgtataactagaaaagtctgggaacagcctgcagggcaggagaagcggcctgtttttaatgccttaatgtgccaggctctcactaaatgatttcacagactttatcttcttccattctaccaacagccttgcagggctatgttatttacccctgtatggctgcaggcagaaaggttcaaaggagttaagtgactcgctcaagatcacagctccaaatggccaaacagtttcatttcctaagaagcaagaatgtgactatgcatctggggacctgtgcacagaagcgggtccagggaaaagttaaccaaccactctgcatggttccctcagatgtactggctgcaaaaaacatcttccccatcacacacatccaagatcaggcagctgcagtatttcagagttcaggaagtaagctccaagaatgcaatcagtcaaagaagactgcttcacttcatcgtcccatcttttacttctttttcgtttgtttttaaatgttgtcaacaaaagttcaaagtgggaaaatctaacgtgtgtcctagacgatgctggtgggcagcctggtgcaggagcagtcagtgcctggcagcctaagaggagtcagcccagccctggagagctgcagctggatgaagccctgagtaatcaggaggaaaacaagagtatgcagggctggagaggacaaaggcggacaaagagaagccaccatgaggccacaggaatgttgttccagaggtggcagccagaggccttagaactttctgagttcttccctccaatacttccgtgcctctcaactccacaaaactgtctttgcccttcttccattcctgccaaagtgccccttaacatccactcaattgtttctttttacaaagttctatatatgtgctttgtattctccaaacatatttattctgcacacgatcaagtcctcagcaataataagtaatcacttaggactacgtaccttcctcagacctgtctcaatataatgatgtattataatgcagacccttccaatgggtctccacaccatataatttttgacaagactaactcctactcagctgttctccatcgagtaggctgcattataaagctgggcaattttgtaaatcaatcaatcgaaagggtttgaaaactcttttctaaagaaagaagtagtaacatcccaaacctgctttctcatcacaggagtcgtacacgtgcaggctgccctcttaaaagtggggtccccaacacttctaacctaagctgcctactcatcagctggctgagctcacccaggctggagtgcattggcgggatctcacctcactgcaagctccacctcccaggttcaagcgattctcctgcctcagcctcccgagtagctgggattacaggcgcccaccaccatgcccagctaattttttgtatctttagtagagacgaggtttcaccatgttggccaagactggtcttgagctcctgacctgctggtccacccacctcggccttccaaagtgctgggattacaggcgtaagccaccgcacctggctgcccccatctattcttatctggactacacttgctcccctataaattagaggtatgcattctctaaagttctcaagtggactggaatagctgtacggaactatgaatgtcccatgtgccacaaatgacgtgctaccaacatggacacgtggtctgcagtcaggctgaccagtcagagtgaggtgggctgggccaccagactgaccccagtgattccaaataagagtcctacagcatgtggctgtggcaacagaagagctatggtaggaggatccccgaccttctcacagtccttcaaggtggcctggaacgtggatccctgaccttctcacagtccttcaaggtgacctggaacgcggttatggcttaatgttttgcagcccagagctccttggtggtctgtctggtcccaccatctcacagtgtgcccctggcaggccacagctttttccaagaaggggtggacacattccagtgggtggccttcccaagctttgtgagtatcatccaagaaaggatggccactgcttggcagaccaaacccgacagcagggggcctccagccctcccctcctctcgttcactcttcctaaaacaagtcctccagccactcacttcagacaagctgcaaagattcttttcagagcctgacgctcatgctgttcttgaagtgccctctccgctatcctgtctacctatgaagttcagcctgattccaattccactggccttccacgatccagtcctgatcacagaggcagctgatccgaacttacataaattcacgaagagtgtaaaggccttcctcagacacctgaagttcatgctttgaaatgatatgctcatagaaacacttccaaaaaacccatgctctaaagactcttggaaatgtaaatacaatgaagaagcataaacagaaaacaattaatacttaagtctatggcctttgaagatccaaaaggcgcagctggcccagcttttcaggataagacaccaagaaaggaatgcggcaggcccatgcctctatctgctgtcaaaaggaaaaggagcaaaaatggaacaggtgctttactctccatggcccctaaacagctacggaatgatctattctaataattcgtctcctttaaacagacagcaaacatctctggagacaaacagcacagattccatgcaacatggaatagaacgtgtgtgcccccagcccaggcactcaacactctctactgagccctttaggagatgttcaatacagtgggacttaccagcaattaacatgatactcaacatccggaacgaagttttgttgaacgtggccacatccattcgctcgtatgccatccgtagctgtagctgctttcacactgaaagggcagctttgagcagctgcaacaaaggctatgtggcccccaaagcctaaactatttattttctggtccttaagagaagaagtttgcccgactcttgctcatttttagatacaaggacacttcgaaatgcccctcctccatggccaccaaaaatcatctacttatagcctcccttcccacaccttatagccgagcctgtcgtagcaaatacacacacacacaactccacatctccactcacagagcttctaccacagtaccacagtcaagagggactaacacaacatcatcagccacctgaactgagaaccaaagtcaaagctagtctgcaatgcaaacttggttagcccaaattcctgttgctttcttttctttacgctttcaggaccaccttgcaaacaaagggtccacctccaagtcaccccactgtctcttccctccggccttcagtacgtacagagggggaagtgtccaatgtccagctcacacgaacgggatgaacaaggcagactaaacaacagaagtgtctgctccggcaggaatttaaaagctgaagtcttagaggtacaaccgccactggcacacactgaactcagcctgttggccaggttcctttatctaaagcacagcaccctcacatggtgctaaagggaaggacagtcttgccgagaagctggctgagatgccatctatgacagggcccagccctcattctgcaaggattttaaatcaatgttatccagctttccacctcggcgccttcacagatagctccttgctggaaactttacaccaagaagtataaactctgacctctacagaaactcactaaaccgcagcaaatgggattcagatgtttccatgtacagtacaatgatgtgacttagactttaaacactttggcaaaaacaggaaaaatgatgtggcccttccagtccctcccagaacatgatacagccttgacccgagccctacagtgatctgagcctttctcactcctacttaagcctccttgcctacaacccacattccccgccccaggtccacattccccgccccaggtccacattccccgccccaggtccacattccccgccccaggtccacattccccgccccaggtccacattccccgccccaggtccacattagctccttcctaccaggccccctccaagggtctatatcactttccttgtttcaccaaagttgcctatttttcccagctgagcaaaagtctatcataccctaatcagaactcagaaaattcctgaaaggagagccagactgatctaggaaactacacacagagatacccgcaggactgggaagaaagagaggtctcacataagaccttgcacccccagccttctagcttcgtagattctcgaggactcgccacagactctgtgagtaagggctggagaattctagatggtggcacaagaaaaggtggaggtgtggggagcagtttcttgtgcctgggaaggacagacacaaactaatatcagaaactgcctccccagaggccagtcatgacagaagacagagaacccctgcggttcatgctctgggtccataccaagcttcgctgggggcagcccatctgccggccatgtgtgcggctttcggggcacgatggagaagctgagtgctcgtctgggcgccagtgtagccacatgatcaagtgtgcgcgcaggcagggcaagtgcacacaagaaccccccctccccctgggagcacctgttccgggtgcctcaaatgcaacaggccaggaacttcggggcagggaagttactgccacagcaagggagctcctgggggcaggaatagggtttatcaccaatgtaaacacccctcaggcctggttgggggtgggcaccagataaatgcctactaatagtataaggaagcaaagacaaacaccctttctctcctgtttcttacgtttcagctaggaagagtggggtgagccgtggcctgtctgggtacctctccaaacttcctgttccaggtacagagagaagactcaaaaggaagggaggtgaatgcccactcccccacctccaagtccaagaacataacacctacacgtacacaggtactcccgtgacatacactttgacacggcggtgcagatgcagtgttctctacattggggccaaggcgcctctgtccagggccctgacagtttcatccctgccagatctgcgctccctagagcgggcggcgtataccccacgcaaccccagctccgcgcgggttccacgggctgcagaggcgctggactgggatgctgcccctcccaccccctttgcctatagagggtaccgaaggccggggtgggggatggggagaggtggaaaggcagggggttccctccggttcccctggaggctggacttccagcagaggcgccccacccccaccctccacggcgaccactctgcgtcgcaacagaccggacgggccgacccggaggtggcgcgggcagtaccaggccgccggcggcgccgcaggcgctgagcgagacgagggagccggggtggccgagcacacggcccgagtagaagcacagctcggcggggcggccgcggcgccgggccgcgcccgcctcctccacctcgaagcctcgggacaggaagcgcaggtcgcggcgcagctgaaggtacaggtcgcgcccgaaggccggcaggtgcagcagcagggcgcgctctccgggccgggcgcgcggggcggctgggggcgtgcgggggcgtcgccgccgtcggggcccgggggctgcgggcagcggcggcaggtgcacgtcgtcggggcgcacccgccacgggagcaccacctccacgtcggccgccgcgtcgccgacagctgcggggagagaggagacgcgtcagcgcggcggggcccgcccggacgcccgccctcccgctggccgccagccgcgccagcgcggggacagcgcgacccggagccggcgctgccttcccttccctcgcccggcacctccacgctggcccgcgccacccggggagggtctccggcgcagccgcgcgagcacctcccggaacggcgccgcgcatcggcgagcggagacccggcggcggcgcgcctgccacggagccacccgattcccgtactccggccgcggcccgcgcctcctccgctcgggcgccgtcagcggtcccgccgccgcccccgggccgccaggacgccgcgagaacgcagagggaaggtagccgcaggacgcggggtgaagagggctgtgggagggggcgctacctgtgcccgggtccagtccccaaaccagcagcagcagcacgggcaggacgagcggaggcagcagggcgccgtcacacatggtacccgggaccggcagcccccccggaccgtggcggcgaagcaggagcgcgctaggcggcggcgccagccggagtgaagccctccagcctttggaaaaagtaattagcgctgcggacaaacccaacgtggtaaaccccaagccccgccttcccctcggaaggcgggaggggattgggccctcgctttcctccgccccgcctcctccttccctactggttgggatgggtcgaaaccacagtgcgtagttaggttgtcagcgctttcttacacgtggtttctgggcagtggcggggacacggcaccaggtggcgcgcgggagccgaccggagccgtgggaccctggaagagctggaggatgcggggctggtcttcagagcttgtcctcattttggaactctctcagcctgctgcccagtttcccgggaaggtagggcggaaatcgccccggccaagcggtttcatccaaaactgcatataatctttacatctgaagttaggttttagttgtttgtggccgcaaagactcccagtccactttcccgcacacctgagttagcacctgaaggctatatccgcggcgtttatccaaactcttcacacctcctgtcttctttaatcccacaggagccagtgcaacacgcatgctcacaccctcttacagactgaaaaactgaggaagagagagagcttaaggaaaaacgctgaagttacccagagagttcctgttggagcagaggctagaatttgtgatcctgatttctggcttggtgcttcttattaacagcaggatccccccgccccgagggaagcaggactcagtgttacaggttaggaaacggaggcacaaagtcccaaagcctagccttgaacgtgagtctcccagaaacagaatgagttgatcctttcctgccacaatataactgaggtctgcagggaaggtgactccattagcttgctgaatagcatcttgtagaggctcatgcctgtaatcccagcactttgggaggccaaggcgggcgggtcacgaagtcaggggttccagactagcctggccaatatggtgaaaccctgtctctactaaaaatacaaaaattagccaggcgtgatggcgcacacctgtagtcccagctactcgggaggctaaggcagaagaatcgcttgaacccggggggtggaggttgcagtgagccgagattgtgccactgcactccagcctgggcaacagagcaagactccatctcaaaaaaacaaaacaaaaccaaacaaaacaaaaaaaacaattaagtgtaaccataaccaatctcaggtttcccgtcccttccctgtcctgctcttttccattttatcatagcagaaaggttatagttccccgctggatgctgcttgaagcctcggaatctaaattcatcacaggattacatatcatctgaaggaatctataacactggccaccttccccgaaatataatgaaccccaaggctgaacagtgaccctccacagaggcttgccacaaaaggggctgccctcactgcttggcacctacagttctgggggcatctgcacaggtcctgctctt

SEQ ID NO: 11 - DNA, 237579 bp, Homo sapiens
  source 1..237579: mol_type = genomic DNA
cgacgggtaaaatggacaaaactgcaattgaaatgggagaaatagtaaaatccatgatcagtgggagctactgaaacaactttctggctgggcgcagtggctcatgcctgtaatcccagtcctttgggaggccaaggcggtcgcatcacctgaggtcgggagttcaagaccagcctggccaacatggcaaaaacctgtctctactgaaaatacaaaaattagctgagcgtgatgatgggtgcctataatccaagctactcatgaggctgaggcaggagaattgcttgaacctgggaggtggagggttgcagtgagccaagattgtgccattgtactccagcctgggcaacaagagcgaaactccctccagaaaaacaaacaacaacaataacaaaaaaaaaaaacccaaaaaccccctaactttctatcaaactgatagaacaaggagacaacaaaatcaagatacaaaatatttcaataacaaattaacaaatttgacatcatgggcatgtatagatactatccccaacaaccaccaattccatgttcttttagaaggcatgggaatacttacaaaaattgggacagaagaaatctcctctgccttcctacccctgcttctccctatacctgctgatagcaacaagggccagagataagggttttctttagaagtggaacacgaaggccaggcgcggtggctcatgcctgtaatcccagcactttgggaggccgaggcgggcggatcacgaggtcaggagattgagaccatcctggctaacacgatgaaaccctatctctaccaaaaatacaaaaattagctggacatggtggtgggcgcctgtagtcccagctactcgggaggctgaggcaggagaatggtgtgaacccaggaggtggagcttgcagtgagcagagatcgcgccgctgctctccagcctgggtgacagagcgagactccgtctcaaaagaaaaaaaaaaaaaagaagtggaacacgaagtacaagttgggtgaccaaatttaacaaataacacaggattctcagttaaatttgcatttcagagaaacaaaaaataatttcttagtataaatatgtctcattttcatgctaaaaaaaagcatgtgtgttgtttctctgaaattcaaatttcactgtgcatctagtattttttctggaagccctaatcataggagagaagggattgtcatcagggaggagatgtctggagactcttcatctcttccctgaactaaaggtttggttggggcccttggctcagtcatgtgacttggagagccgacccgtggggagctaggagagggagcctttcttcggggtgccttctgccctttgcatggttctcccttgagcagccctggctcaatgctccccggcgccctgacctctcggccttgtgaaggcagcacctccttccattctgcccacgttccagccaggcacgggcacaagtgtaatgaagacaacaacaaacgcaggcatgatttgcaaaaacacagacattttaactttaataagttataaaagtaaggagtcaaattttacattacagaacaaagatgtattggttgttgtatcggtaagccagaattttgtgatttgagttcagcaccttgattcagtatagtggctacctgtcatacaggagggagtggaatcataaactgcttcatctgctaagatgttgctattgagcaccatgtatatactcaaaacaaacagaaaaaccttaaaatacaaatgaaagccttatacatgaaattccatgggttttccaaaaggagtaaatcagagagctgggttccacaaatctaacacgagtctgcccactaaggagaagtgactcagggacactgttgcagattttctagtgcagcggaaggtctgagtctcatcatgcggttagaaactcagctagaagacatctgtctgcctcctctgggcgccaggagcccctcagatgcagaagaagctggcttgcgaagatcaggactgttactaagccggttctccaagtggtccccagctcagagatttgcgtcgtttctcagagcccggtgaacgttggcattccttggacagacttttgaggaccatccggctctagaggactcttgatatatggctcaaggattgaggatggcacagagggtcatggctgtcagtcccagagggcaccttgctcccttcagcggaagacaggtgcccagggaatgtcccagctgggcctcttcccaaaggcttccagcctcaagccaggaagccctgctctgctgagatcttggaatggagtgttcccatccagaggcccctaggctgggtaaaccgagtcatactctctgcctagcgttagtcctgaacttcctccacatcctaggacagacccaagtaagaactgcccagttcttcagcctgtgaatagcaccagctgtcctgggttcaaccaacaatggaaagcctcgggctccgtttcctaattacagaggcaggattgcacacatgctctaaaccacatcttcttaaggaaggggtactatgagagatactcagaaaggttttctccagtttggttctccaggagacacggggacagtgcgcagcacgtgtgggatgcggtggtggagggcgggaggctagccatcacccaggtggagactgaagcatcagcccagattccgttcttgctggttcctacatcgtcattttgtcccttggatcatacacacagagccacccacatgtgcagcctcagacaaacatacttattagcacctcaaaactcagtagaaggtagccactatgctgttatcctgagcctcatccatataatggggaaatacacatgaacaaattctcgaagaggattggtgagagtacacagcctctagaagtttcttaaacaggaaaggtttaagaattatgtgtcaggctgagcccatctaaggagctgacgtgcccctgggtcttgtaagcccagaaagtttaagcttcacgttcacaaaatgtcaaggcagtgagaggtaaaaatgagccactcttctcccatccgcccctactcccccttcctcctatttctctcttactcgcatgttgctcacaaagcaccattctctggaaaataggagctattaaagttttcaaggagcaaaagacaatgtaggctctccccatctcccaccctaagcccccatcagaggccacattttgcaggtcactgctgggttctggagcttctgagagacagaggcgaggtggggcagggcgggacagggaaagcccattcccagcaagcaagcaaagcccacaaagcccagaatcccagaacccttagacttggccgtagggagattccaggcccttgaaccgctcactggaccttcccagcagagcacgtgcctctctcatctttctcaggtacttggggagggaagaggctctctggggagccctggagccaaggtggccagggaagaatgcaggagctcttcccccagagcctggaaggcagccggcaaggccagggttagtggacaggggagaggcctgggagagcaccccactgttttcttggcatggaccctgtttagacctatccttatgtcccgtgataggattctcattactttcgcaggtggaggacagctgcacggctcagactcggtcgagacattcagatgccgtacagcatgagcaccaagaaggtcagaaggcctttagttcttaattagcaagactgcatcagaccaagtggaggcctccttaaaatgttctgagtcgacctttaaagattgagtttttttcatgcaaaaatctagacttcttccgaaaaagaacactgtctggcaaggccggggatagtagagcagagatggagagagatacagatttcacagtggcagcaacagccagaaccaagtcagctccaggtgggtgtggctgtcagggcggccatggtccccagcgggccactacgctcaccccggtcagccgcctggccctggaagacgatttgagttcatcacctccacttcattgtactcatctcggcaacgggtcagttattcagtaaatcaccatttctcctaagagtcccacaggctgtgtctggggatcggtagggaatgtcatgcatctccgccaaggaaaggaaggttcccaatcactgcttagcaacttggggcctatttttgttctctcagagtgatccctcttgccctgccctcactgagggaggccatacagcctctatattcctctccactgcacacctgacgccaccacagtatttggtcgctcctgggctgggaagcacacgtgctaacctagttaccacatgctcatgcctatctttcttacgtcattccccctctttgttttctcaaaaccttttggaatcaggaattttgacttcatctccatgacacaggatttgctatcccatggaatatctctataagcaagaaaaaaatgctagggatgctatctttccattttattagaactttccgagcatctctttcttccgcatctcatcaatgagctcttggattctttggtttctggtcttttcataggggctcggtcgtcgagggattaggttgggtggctggacttcatcttccaggccatggattttgtagggttcatctacggcattggtttctgggtgatcctctgtggcattggtgctggaggcattgagagggacctccaggggggtgcttggtgatggccgcacctccatggctacagtgggcactgggagggtaggcatgaacacgtcaatgtcgttgtgcttcccaggcggtggctctatcctgccctccacgttggtgaggttgttgtacaggttacaggacttgcagcacagcttgttgtagcctgggatggagcaatagcgggacaagacttccatcctacagaatattgacttgtcgccttggcagtggccctctgaaaaagaaaagtgggacaaataaccaaaggacaagataagggggactttgttcccccacagggtgcagcttgctggaggaggcatatggaagagcccagagacagcacagaggcaagtgagcccaggcagaaagtctgtgtgggttcagtgtcaaagcatccccagtgcaggcagtgtccagggacccctgcctggaagtgctgacacacaagctgtgagcaaggcttccctcttccaagcaggccccagttgaacctggatgtttcagtatctcttaaagtttgagaaagaaatgaggcccgtttgttcttacagagtgattccaaactcatcttaaagaataggactttatcacatcttcacatttgacatcccagtggtaaccccagtgaaattctgtggcaaggcttgactctacaataatctctaagtagtaactataacaaaattaaacctaaaagagccaattcctaagacccaatatagcaaatcccagggccgctgtggccccaccatgctccacaactccctgatgttgctcccattctgacccagatgccccggacgatcttttaactgaacagcacctaaaggaaagttaaacatcacccaaacctgcatgggctttcttatacttgcctcaacttacccaacaacctcatttccagcctctgctccatccccctatagcaccgccaccttgcgcatccagccatttcccaaagaaacgtgctgccctcacatagattaatcgttccaccctgcacatctttctctttcctttccacccaagaaactggtcatctgtggtccagcttacatggagagccccgactctccacagaagccaccattatctctcactttccacccagccatcttctccctggcccatctcgacctctgtctgcggctatgttcattcaacccatcaactcttcttgcgctcacactctctttactctctgtctccttcccaagttttcaccccttccctctccccatcccctcattccacaacacaaaaattaagatgattttaaaaaattcactcaagaagaaagaataagtcatgttacaggagatacttgatccagtataaattccgaatcactgacctccgtgagcccaacaccgcctgttgtggtctctgctcagctgctctctactctccacagtgatgacttcagacctttcccacacaaacccccgacgtgccctccttttccctcactctccttagttgaactcatctactattgaaaggaaggaaggagggagagggtgaaaggaaggaggaactgaaggaaggaaagaaaggaaaaaaggaaagggagggagggacaaaaggaagaaagggaggaggaaagggagggagaaagggagggagaaaggctcaggcattggatgggagccacatctgacagttatcccatacaccaacatatgacacaatctacacctgaagctgtccaaaacagacaagacccccttccttccatcgagggccagtggttctgatgtcctgcttcttaatggccactgctccagcctgtaattttcccttagaagctggtgacagaccaccagctccaaacccctgaagcttcagacttgctacaagccaaatccaccaagggcctgtgggtcccaaaagcccgagacccaacccctgcagcgtgagcttagggcctctgctgcccaccctgtctcggtgcatggtgtttcaggcacacaagccaaacacctgggtgccccgtcctagacactctcagatatgcccttgttcctccccgtctcccacctccaccctggctgagctgcctcttggctgcactatgggaggggtctgtgtccattcttcacccatgtcatccagctatcctgcttcagtcagaatgctgttttctcactgaagatgtgaccacggcaccccccccccaccccccgccacttgaagtccctgacctgtccctttcccctttccaacctccctctggccttagactccttgctctgcatggaactccttttggccacagggcctttgcacatgcaatgcctctctcctgcctccagctaccacccttcctccttcaggggcagttggagcacatcttcctcaggcaggcatcgcctgacctccttgagcaggtaaggtctctgcagcacacggtctcagcagctgtgccttcccagccaagctcgcatctaattgtcagatgaatgactagtgccagactttttcattatcctgaaagctccacagggcagagccccagagcctagaacagtgaaccaaataatgcataaaggcataaaaaagataaggtatgaaaaagatcaatgtgaataactgaggaagttcaaaacagggaaattttgaatctgaaaatggcaatttccaggcaagaagaatgcagggaggcccatgcatcagagggtgcccgacttcggccctgagcttctacgtggccaaaataaggagaacacatgactggctgcagggtccaccatgaaaagggagttaaaacccatcggccatcaggagaagtggggatctccctgacactgagcccaagaaccatgctcacagtgccaaggaggaagggggagggcctggtacccaggggagatgccagaaatcaaatcggaagatcctgagatgtggctgtcaggattttgaaactggcagaaggcttttctcagataaaaatcttacacaggtgcccaatatatgaaacagatagactcagactgctgatgatagtactgtttgaaggtgggtggaggagacacagagctcccatccctgccccaccccatcctctccagcagcctggtttgtgaaaccactgagccctaccctcagggaaacacagggggttctggataagagctgatggtggcctcccttctccctaccccataggctttgacaaaggagggagcctgggcctgatggtgctgggagggacaccctggctgcacactgccccctctcctgttgcccatagtttttccttcacacagataaggctggtgttacacatttatccacatctccactccctcactgtctcccccaccaggctgggatccctgaaaagcaggaatcacatcagcctggtacagtggtgggccatctacggctagtgtgccaagtccctccctccacctggttttgtaaataaagttttattggatcaggcccatgcccatgcatttttttttttttttttgagatgaagtcttgctctgtcgcccaggctggagtgcagtggcgtgatcttggctcactgcaacctccgcctcctgggttcaagagcctcccgagtagctgggactacaggtgcgtgccaccatgcccggctaatttttgtatttttagtagagacggggtttcgctatgttggtcaggctggtcttgaactcctgaccttgtgatccatccacctcagcctcccaaagtgctgggattacaggtgtaagccactgtgcccggcccatgcatttcttatctgtggctgctttcccactataaaggcagagctgagtcctgtgacagagaccatgtgggctccaatgcccaaaatattgactacctggccctttacagaaaaggttgactgatcgtgggtcaagtgcacgcctaggtcagagccatgcacgagaaagtgctccataaatgcccattgagtgaggggtggcagccccaggtggggtcccccttccacctggtctacatactggacttctatgtctgattttctccccacagtgggcggcattgctcttagtttaaaaaaataaaaatacgtcaatgagtaaatacaaaattgaaataaaatcctggccaagagattgactatgcaaatagcctaggaaaatttcaaaatagcctagaaaaatttcaaagtcatcatgaccaactgatcttaaagatgccccaggtttgtacatttttaagtatcatcacggaccacagagaagagtgatgcacctgaggtaatgactggcgatgcctctccgccaagatgaacactgtggttttacaatatttggtcttcggccatttccagtagcaatcaagtagtgagacctattgtcttccagtgaatgacaatcaaccattgagagtaaacacagttttcataaacttaagtcactgtaggctactcccacgatcttggctacacctgaacagcacctgcattattatttgcttagtcatatcctttaaattaactcctttttacacttaaaatttgttttagaagaccttatactattaccactcatggaaagctactgcagtgaacaaaggtaaccctaaaataggaatacaaaaaaaaagtttaaagtccttttaaagtcaatttcaaagtcacactttaactcatcaaattctagagagagactcctgcctgccaagctctgagctgaagggaaatgagcaaatgtgagacaggctaaagctggtagcaagtgaggctttcttcctgaggtcaccataaagcataaagggaactaggaagggaccgctcagtgcagtgcagccccagctatgtttatgcaccaccgaatcaccttccatttcccatgctttggaaaatgctggatggagaatacctcattctcatttctcagtaaaggagtggtaggctcagacacccatgccaacattcaaaaggtcatgcagctggttaaaaaagcaagaggcacccccctccagatgtgccctccttggcacctgggctgtaggcggcgtctctagctctggcctaggagcctcttagcgggaattgctcctgacccatctctgggaagagagactgagtggagggaagcactgtctgacccaattttccctgatgcttcttgtctcctttaagctgcgattgcttttgatgatcaatgatctgagctctgggcaggctgaactcagccatcgctaccatggttgctccctccccaggctagcccccgggcccggccctatgcccaaggcctgtccccatgacactgggctgctccccactgttctttctcatggccttccacgctttcttccctctccctggtgggactcctcagtggtacagaaaagggaggagtgagacttccatgggcaggacacagcccaggccccaggtcaggaggtccctcttgaacccagaccctctttctggccattttcagcaatgtgagagaacacaggccctgtggctgcctgggaagaccttggaagacatgggcaggccagttgcccagagagccaccactgccctgcccctctcccgacccaggctttcccggggctggcccagccccccacctgagccggatgggcacctctcccttcctggacgagtagcccaaggccgagaactgtgcctggagccagggtagtgacctgctggtggctcacggcaggtgacctggactagcaatgtctgggctactgaccccacattcccactccacaggctctgctccaaagatgaggagaaacccatctcgggcccttttcctgacgaggagacctccatatagaacctagatattcttgcgaggtgctcatatgacatgattcaaaacccggagtcacggtggggtgtctgcacggtttgctatcagattttggaaaatacctggggaggggagatacacctttcagggggaggggccctaaatatctatgttgggcagtggggagtggggcagtaaagtcattcaaattagaaaccggggtagttaatgctactgagtgaggccccgcaactcctcagtgtctgggcccccaaaaagagaaggagccatcagcttgccaaacccacgcacccagtttcatggaacttttattgagtttatttgtgggatgcatgacaggaggtctttccatcattagtaagaatgaaaggtcattttcacagtcactttggcacacgctaacgtctcataaaaaaaaccagaaaagcaacgacaatggaacctatagaatacgtcattaaatacatacaaaacactaataaaatatccctgataaaccaaagtgcatatgcccaggacagtattgcaccttccccagtcgcgcgtgtcgctcgcatggcctcgtcaaagttggaagttaacagtcgtgagattagtacgcaggtgcacaccagttatttacagaacggcggtcagagccgcgggagtaggggccggccgcccggcaggggtgcggtgtgaacagaggcggtggctggggtggaggggcggggaggagtgctacatggatcgcggctcagggcccagggggtcgccccctgggtgtaaggccgcgctgtggagcaccctcgggggctccatgcaacagtcagcgccgactggccagtggggcatcagggcagactccagtccgcggagacggacggtgcgcaccgctcagcccaaggagagaagccgtctgcacttggaaacctcaaccttggcaaaaggtggatgaacgcaccggctcccctacaccttccctgccttctactggcccacgttccccctctgaagctggagttggcagccaatcccgttacctttcaactttaaggcatcttctacatagtttttctaagcaaaaaagcaataaaaattgaggtaattctgtagtggttcacacgcgtgggcgaggcacgcgcgcaccagacggccactctctctctcagccctgcggcgggggagctgtgcgcgaggcgagaaaaggccaccggggccgacgggcggacagtggaggtggggagtgtccccgcgcccctccgccgcctccgcgaccggacccccgcaggacagggccgcgcggggctgtgagctgcgcgaaggccgggcggaagcgggccatagttccacgagtcagaaggacacgctcagcaaagggtcggcggcagcagcgacggcggtggcagccgggaagcacctggcagtgccggaaactcggggtggggtccccgcacgacgccgcgagaccgcgaacccccccgggccgggacgggctcggcccggagggtcgccctttggccaccggcccctcctgcaaccacgacagatctttgcccctttacaagccatcaccaaccaggttcggccccagcagaggcccgagcccccgccagcaggcagcgcggcccggagcggacgccgagctcagaggcccgggagaaaacggtcaccccagagcgcgcccgcagagtcaggggagctttccatagacagagaggaggggggcccaaggcaagctccacagggcgcagggcatgcactggagggcagaggcagagttataaacgggtcggttacttgacgagatcttccggatgggcgagtcggggtccgggcgggacagccactgaactacgtagctcttcttggagggatctgagatgtttcctagagggaggagagaggggctgcggccgcagggcaccaggctggggcccccaccccaggcagagaggctccgggtctcccggggtcctggggaagcgtcattcaaggccctcgcctccccgggcggacaaagggtcctccgctgccaagtccacgcccacctcctgcccctcctgacagcagccggggtctcagctgggtctcagctatcccgtccctctcgctgccctggcatgcaggccctgccgcctccttttctgggccggctcctctgcccctgcaccctgcccgcgccccgggttccacctgctgactcgagctctgagctcccagaaagcttggacagagagtgccaggggaatgagagatcctggatacaccctccccagctgggggcaggtgcctagaccccccagagctccctcctctatagaagggaactgtggcaggcacggtccagtcttgaactgtgtggagaccttagaggtgacacatgtatagcgtttggacaggcatctgtgcgtggtaggtattctggttctcctcaaaggtcacagagcacactctctactcgcacaggcgtccccctattcacacaggcaccccctacaccatagccaccagcattccctagctggccgagtcctgctgtcaccgtgagtctgcagtgccctgaaagcagggaggggcgagtcagctccacacagctccctccatttcctgccaggcaaaggtcccagacctggcctgcagtgccccgcttctccatgctcacagatgttgagtccagctactctccgggaagagccagatttgcctgaaccaagcctctgacacccccgccctgggctgctgcatgctgggagcaggggcaggggctgcaggtggcttacggggacaggggccaagcctgcaggtcctcgctgtctcaggacgctcctcctggcagatgccgaagctgtcgtccgcggtgcggcagagcactggccgctcctgggtgccgttgccacaggttactgagcactgcagggggagagtcgccaggcagggttcacctcccacacagggcccgcactggcagagctggaggagcccacagtccccaggcacatgacccatgcgctcaggaggaggtgtgggacagtggggagagtggggtttcaggttgccttgccccaccctcgggggcagccccaatctcctggggctctaaagaagggacccacatgcctgtctctctgagctgctgtgagacagtgcccatatacagactggcataggcctggcgctgctggactctcagtgacagcctcacttctctggctggaggaggtccaaggcccaggagaacctgctgtgccctgggcaggggttgaggtggggcactgggaaagctctgacccagcctaggaggcgccagtaggctccccacaatcctgggcatgagggtccaccactagtgccctcactggctcctccagcccccagcaccaccactgctccaccacactgaccagggaggtgccagaaggagcagtcacgcccagccttgcccaaggaaaattctccaggcctcaccaggtgcacaggaaaaggctgactcagcagacctggattgctcaaagcctgcacattcccaacaaaggtctgtgtttttgttttgttttgttttgtttcttttgttgttggtttcgagacaggatctcgctgtgtggcccaggctggagtacagtggcacgatatcagcacactgcaacctccacctcccaggctcaagcaatcctcccaccttagcctcccgaggagcagggagtacaggcacacgccaccacatctggctaattttttttaatttttttgtaaagacggtgttttgccatgccgcccaggctggtctctaacacctgagttcaggcgatccacccgcctgggcctcccaaagtgctgggatcactggcgtaagccactgtgcccggccaacgcctgttttcaagactggcccttgtgcagctcctgggaaccaagctcatggaaggctccacctattaagagtgtttttgcctgcctgaggccttgagtcaccagtaccagttggtctgggtagttcataccaacagtgatggatggggaacacctgcttttcctctacagtctgaggtcacacctatgtagctgaccccattgaaaaccctggacgcccaggctctggtgggctcccctgcttggcagcatttcacatgcattgccacacatgggtgcagggagaattcagggcatttccgtgaccccactgggaggggacaccgggagcctgcgcctggattcctcccaacctccttgcctgtgacttttctttttcccgattctactctgtatcctttcaccgtaagcccctgcaactgcaagtcccgcttctgagtctgtgagtccttctagtggattactgagcctgagggtggtcttggggagcccctgacacacgctcctccagctctgccagcgtgggccctgcatgtgaccgggctgtcagagctcacgtcagctctgtcctggcctcagctggctctcaggccctgcccctaggaccacccctgaagcccttcagtccatcctcattcttcctcccagcacaagcctaagcacgccctgctcttctcccctcctgcgagtttgtcccctcccacctctgcatgagacccaggcgtcccctaggatcctggagccccgaacatcctactgggcctcggagcccgggctaccctcagtttcctgggattccagaccccgtatcatgcagaagcctctgcctgtgcagtgaagacacacattccactggtttcttagtacagcactgaccacgtggcagccactggcgccgtgaaacccacaggatgtggctcaggacaggagctacatccaggcccacgggccgaaaggggaatgctctggtcacctcagtcccacccaagctcagtttgggagctgaggacacgggatcaggggattgcttacctgggaccagggcccggctcgccaatgatcagggcagagctcgctgctgcaggcccggcggctctcaggccgggcgtcattgcagtgcttggcatgcacggagcgggtggtggtgttgtgtagcggctgaatgcagcgcacggagcgcacctgcatgcctgtccaccctcagttttggagctgaggacacgggatcgggggattgcgtacctgggaccagggcccggctcgccaacgaccagggcagagctcgcggctgcaggcccggcggctctcgggccgggcgtcattgcagtgcttggcgtgcacggagcgggtggtgttgtcgtgtagcggctgaatgcagcgcacggagcgcacctgcatgcctgtccgcccacaggtctggctacatggctcccattcgcctgtgacccacctgccagggcagagcggggcacagtcaggcttccgcagcacctggagaacctgcctggctgagctccagcgccgctccctgcagcccaggtagacagcgagcacagagggcagcctgcacccctccccggtgcaccttctcttattctcactaagatgctggctgtccaggcttgcacagaggggaaactgaggctcagctgccccaggtcctactgaccatgagtcccatgcatgtcaccactgggaggccctggtggagctggtggctctggaggtccctagcctgaagaggtttcccagcctccttagggtctgggccctgctacctggcctcaccttctgctgacgtcacaaatccttctcggcagagctcaagagcagtgtggattccctcagcacgctgtcctatgtggcccccacctgcccatttcccaactgtcttccccactgaggtccctggacccagaaacgcagctgggcccagccccagggcctgaacgtcaaagccactgcttaagaaacatctaccccgtggtacagggccaggaggcgagccctgcgcctctgaacccccatttccccatctgggcatccctgtttcttgtcatctctaagatgctgttcagtttggcgggtttgaagctggggtgcgccttctgccctgcagcatcttagattccatgaaatgtggtgagagagacttggtcaaatgcctcggatgatgccaggcccaggccccacacctccaagcacgggagcccctggtggcccctggcctgtctcctctagtgggagcccgagctgggggcactcacactggctgggagcattcctgtgggttgcacgctctgcggatggctttgggcttcgagagggcggcacagaagccacggtgtaccatcttgtggtccagcctccggcggcagccatacttggtgaactgggaccctgaaggcagagagctcgacgggggtcggtggggcagcatgccctgcccgagggtgcaaggaggggtgggctgcaccagcagtgctggcctcgttttcctgctcacccttgtgatgacaataagggtgggcagggcaccgagcctgcggctggctggggggaggccttggtgtgtcccgggtggaggggcgagagggcaggagaggccattttctcccctaggctgcctctccctcactgggctcctgggtcagagtggaggccctatttccttgctactgctaggcaccgcttctaccttgacctcacatgcccagcaggcctggtgcaagccaggagccgggcaagcactgggcccgcagcccgcatgcttcctcccacaggcccagagcagccgtgctcaacccgggtgattttctccagcaggggacatttggccacgtctgggacatgtttggttgtcacaactgggggaaggggtgctactggcatctggtgagcaaaggccaaggatgctgcttgacaccccaccgtgcacaggacagcccccatggcggcgagtgacagagcccaaaatgtcagtgatgcccaggcttcgaaaccctggcctgctgggtaagaccaaagaaagcatggagataaagcctgacctcctctgggtgcctggaggcatcccaggaagcagaggctggggaggctgacgtggtggcagggcggtggaggggctcaggcgaggagaagcctgcgcagaggccccaaggtgggacatggtgtgtatccaggaaaagcccttaaggccggcgtggccaggacctgggggcgaggcacagggtggagatatactgggagaggccaacaagttgccccaaccctggaggccatgaggagaattttgttttttatcctaagagcagaggaagctgttgaagactatgacaccaggaagagagagacattgtctgatgtgttccctcaaacggttactttggggtgagagtggacacacaagggccagtccagaggaaggtgggtgccaggaccggggaatggccaggaagatgggaagagcacacaggcccaggagatttcaggaatcaccaggggtggatgcgctgatgaaatccaggcccggtgtggggccgggggtgcccaggggccctggaagaggacccttccatctgcctgggccagggagtgaccccacctcttggtgagctccttgtcctccaggtgtgggcccagcatggcatcgagggaggactgtcctggtcacttgcctggtatcgcccagcccccaggagcacgcagaacagatcagcgcttcctgtctgcctctgggtcctatgtcccatcaactgcagactctctggggtccagagtgggtaggacccctctgtgctcagccctgtcccagaaacatctgggaggcttttcccagtgaacggagagagaagcctctggaggtgtcatctgcactgccagagtcttgcctatgcgatcctgccaatgccacggcatgatccttctgaggtgtccacacatcaacctcttgctaggccagcctgtcacccccacactgaagcaggcccacaaatacagggtccatgccccacacaccctttggccacatttgacccaatgccccagcaccccccttcctgcccacccaccggcccctccattgccgctaagcccttgcccacccaggcaaaggtccctgctgtggctcctcggcccctgctcacgctggccccaccccagggatgctccctaccttctcgtggtcaccctcatgtcacccaggtccccagcttcgagaccccctcacctccgccacagggcttggagcacggagaccacttcttcagggcccactcgtagaccacagagtcctcttccaggacgttgttgtcgtcgacattcagtgagtcctcatggatcatgtatttgtacgtcagtgagacccgggtgtctcccaccgggatgacctgtgccagcccaagagccttgatgtgcctgacctgccctccatgcttcctccccagccagcttaggaacggcagctgaggccgactccagaggagtctcatcattcatggcagttacattccatgaagtcgccccgagcaccaaattcttgaatagggagccattaccccagggggcacagggtgaggttcctgtgagcctctgtctcaacatttttgttacccgatcaatatataaccttgttttatgtgtgagtctgtttatttttttgtttgtttttgtttgtttttgagatggagtttcgctcttgtagcccaggctggagtgtagtggcacgatctcggctcactgcaacctccgcctcccaggttcaagcgattctcctgcctcagcctcctgagtagctgggattacaggcgcccgccaccacgcctggctaatttttgtatttttagtagagacagggcttccccatgttggccaggctggtcttgaactcctgacctcaagtgatccacccgcctcggcctcccaaagtactgggattacaggcatgagccactgcgcctggcctatgtgtgagtctgtttaaagacactttatttaatttttactgtgattcattaacactgaactcacagtcaatcgcactgcagcccatgcctgaacgaagcttattcaacacatgtattttcttcttaagacaccactgcttcctgggcttaggaacactggacagcacttcagcaacaggctcagggtgattttcaacagcgaaatcgcccccaaaatagcacaaaatgtgatgtatgtgacactcaacagactgcagaaagaacccctgtttgtgggatgagagcagaaacaagcagacagcgtgctgagttgctcccacctccgctgggaacacgtgtggcaggcgactcacacttcaccactctgtgcgtgtccgtttggggctcacgaatcaattttagtgagcaggtgaatttgcaaatacagaaaccgtgagtgccgaggaccagctgctcacacactgatgcaggcaggtcaccaaaggcacgtccagggggccagaagtcactgcaggcgaggcaggcagggtgccagggggtacacggggcatacctggctcactgctgcacctgcttacaggtgcacccacgtgtggagcgctgggggctggtggattaatcccaatgccagcatgcccaccttagggaggggctccagagcatgggagccttatttgtgatatgtaccttttttgacaaataaaatatatccctatgcagttaaattacattttaaaaagtgatctgacctcctcaaaaccaggtaaaaagaaagtgatttgaaaatccagcccccgtggtactttcctacaaccaggagatctggggtcccatcctgcttagagacacagtccagctcaacctgggtctgggcatctagcttcccagaccctgagcgtcacctcccagagtgtcaccgattccaatgtaacagcacactcgaacgagcatgctgatggcagctgtgaatgtcattcagatggtgaaaccgaaaccctcaaagggagagtgtgcccaaggtcacctaggggtcatgtggggtccagagccccggctcgtggatgcatgtcccttcctggctctgaccaagtcggagccccttggtgccaaaggcaggccaaaggggccacgcagagtgtcacctgaagggtcaggaggctcagcgtcccaggcacccccatccctcccccagtggccacccgcacccttccctgggcccagccctgcttggactcaccagaacggtgatggtgccgtggagggggcccatggtctgcagcgtctcccggccgtcctcgtctctgtactcccactccacgcccatggcaatgaaggttttggaactggcatccacgtcattctcttcatttaagatgaacttgcctgtctccaggttcttgacggctgagaatggcaagaccaagtcccccgttgtggtcacccaagagcaggacccaggcccactggtttgggctggtcggggagtgggggcagctagctggaccccttgtctctctggctgcccccggccagtttcctctgtgccacgacagcccagatggctctgggagccctgcttgcccatcactgctccctcgggaccagattaccctccactcgcatcctctgcccccaccagccctggaggtgccggctccccttggaagccactcagtagccgtcaaggccacctacccataccctattgggagcactcagtgggcgcttagaggccacccggggcaggatggctgggaggggtctgtacgcggtgcagggcatctgctggacaggcgagcacatgaccctgctggagtagggcttcctgccatggggtgagtatatgtctggctgaaacagcagaacccccaccccatcagggaccatggcccagccgaggccccagcagctccccacagccccagaagaggcctggcctgattgggtgacactcaggtcatctaggagcagaggacctggctagccaggaagccccatgctctctgcagtgtggggggtggctgctgcggggcagctgggtgatgtgagtggggccgcagacagggcactagtgagaaaatcattccctgtcacgtcccctgtaattctgtccactcacaaacaaagcctctgcttggtgccacacgtccctgccttctctctggcccttgctccctttccacagagagcgacctcagccccagaggcggtggcaggaagcagcgttgggacagaaatgtctttttgttcagaaactgacttttctgttcacctgcttcaggcaagtggtacaggtttttatatttagggtagcagtcgaaagtttcctcttaagaggcgaggtgcagtggctcacagctgtaatcccagcattttgggaggccgaggcaggcggatcacgaggtcaggaaatggagaccatcctggctaacacggtgaaaccccgtctctagtaaaaaatacaaaaaattagctgggcatggtggcacacgcctgtaatcccagctacttgggaggctgaggcaggagaatcacttgaacccagaaggcggaggttgcagtgagccaagatcaggccactgcactccagcctgggcgacagagcgagactcaaaaaaaaaaaaaaaaaaaaaaaaagtaagaaagaaaaatgagtatcaagagagtgagatcctgtctctaaataaaaacaaaataaaataaaacaaaagggagataaaataaaagggcatggtatgtttgtcaggcagcgtgggtgctggtccacggcagcgtgggagccccaatcctgtccagcctcctggggatggggatgaatgtggggctcagattggggaagggacttatccaggggccccagcagtccctggtatcacttctgaccttggcccatgaattcccagaaggtagggcccaggcaccttcagagggagggtggacaggtcctgagagcctcccgcgtggcctgggagggcgtggtctcccaggcagcgctgcttcgtggaaaggggcaccgagaggtgtgagaacatccatattttcaggagataccaggatccctattttagctggaatctcttgaatttaaaattaaacgaattgaaaatgtaagtgcactgtgtgcacccacctgacagctggccttgctgaggggatgggagggctgcccaggaccctgctgcctgcagaccctgcctgccttcccgagggcagggggccttcccgccccgactgtgagaacaggggacagggagtcatcctgtagactgagggacacatgttttgcatatatgtcctttcatagctgctgccaagcggagccctctgatcccaaaccctggcctctccacaaggggaggaccctgggaaagggcccaggtgggctgagcagagggacaggttggggaggggctgccctggctcaggtcatggctgcacaacccgggcccctgacccctgacccctggcactctgcccattgatcccagaggagccaggtcctgaggacgtcaagttgtccggctctgagactcacccagatggtggctggtggcgtctacctcctgaatgagcaggtgtctggctcctgcagggatctcaaacatcttgatgtaacctttttttgatgtggaaagacacagaaaactgagaagggaaggcgccgctcaaattcgcaccatgcaaggaggggcctcgctcttgaaggcagctcctccggaggctctcccaggaccctggtatttctctggctttgaggacccacctgagaggggccaccaggaaagctgctgcctccaggctagtctttaaggcccaacccgggcatcctcatatactggcattctccactctaacccctgtgaccccggcccccactctcctcttccccacccaccctggcacccagctggggctgtccccgacttaggattctccctccccctcagtgtcacagacctctccccctccccagaacagtcataagcccggacagccccaggatgagtcaggccctcagctgtccgggcatgagcctgctgcaggcatccaggctccagggtggagagcagggacccactcaccatgcttcttgggtgaccgtgtgaacgtgcccttgaccactttgcagtggctgttgtcccctccgcacacgccacacttgtcttcctgcttgctggagccgatcacaccgtcacagcccaccttctgttgggggaggaggcagtgagcacttgagacgtcctgctagtagagtcagggtcatactatgttgcccccagtctcgaacacctggcctcaagcgatcctcctgccttggcctcccaaagcattgggattacaggcgtgaaccaccttgcctggcctcatcttttattatctccaaaatcagagtgcgtctagtcatcagttaaacggaccttgcctgccacctacagcagtgtctcgacctggcagtttccgtctgggcccctgtgcacgcggctggtcttgggcaggggactcatcgaggcccaggcaggcaccgtccctggcttgatgaacatttatgtttggcaagcaggagatgctgtttatttttacatttttttttgagacggaatcttgctctgtcgcccaggctggagtacaatggtgcaatctcagctcactgcaacctctgcctcctgggttcaagcaattcttctgcctcagcctcccgagtagctgggattacaggtgcccaccaccatgcctggctaattttttttgtatttttagtacaacggggtttcaccatgttggccagactggtcttgaactcctgacctcaggtgatccacctgccttggcctcccaaagtgctgggattacagtcctgagccaccgcgcccggccaagttttgatattctttaacagacagaatccagttggatattattttttgacccagtattaggttctgcatgaatatttatgttttctaattatgcaaaattgagcaacctgctattacctgtcaaaatcaacattaataaaatatttaacctattctttttttttttttgagacagtctcgctctgtcgcctaagctggagtcagtggcgcgatcttggctcactgcagcctccgcctcccaggttcaagtgagtctcctgcctcagcctcccgagtcgctgcctgtagtcccagctaattttttttttttttgtatttttagtagagacggggtttcaccatgttggtcaggctagtcttgaaccccagacctcaaataatctgcccgcctcggcctcccaaagtgctgggattacaggcgtgagccaccacgcccagcccctatccttctttaatacccatgtcaggagtgacgtgatagccacacccacggagacagtgcattagtgatcttccctccccgttaggtttacaaccatgatcacagctgccatctgaagctacttgtactacaactgtttcccatgcttgctgcctgtattaattatgtttttgtttttcaaaacgtcctatgtcttgatattttgacatcttaaaaatcttcctgtctggggagagactacacctcccaggggtatccagttctaagggacagcaaagcactgggttggggacacacctttcacatgcaagccagccagtcttcagtctataccccaagcacctcctttatccaggactcacataccaaaccaagattcttgcaccctaactcatcccagggttgggtaccaggctactggggaccaccctaaactccagagcccactggaatgattcaaactggccattcctgagctgtcccccttccactgccctgccttcctcaggagccctctcagtgacattggcctccccacgtcctcactgggtcacctccataaattaaaatcccaagggtacagagcagacaccacctgttcttgttttggcgtatttggtgtcgccatctctgagccagctgtatagcccagcctcccggccctgccgaagtcacaggagcaaatgcagagcagccctcgagcaccctcccggctccagctccagctccagctcccggctccagctccagctcccggctccatcccccagctcccggctccagcccccagctcccggctccagcccccagctcccggctccagcccccagctcccggctccagctcccagctcccgggtccagctcccggctccagaccccagctcccggctccagcccccagctcccggctccagcccccagctcccgactccagctccagctcccggctccagcccccagctccgggcctctagcccccagctcccggctccagtccccagctcccggctccagctccagcccccagctcccggctccagctcccagctcccgggtccagctcccggctccagcccccagctcccggctccagcccccagctcccggctccagctcccagctcccggctccagcccccagctcccgactccagctccagctcccggctccagcccccagccgctgtccctgcgcccactcccctagaggtgccttcctgccgatgcggctgtttctcaggaaggtcaagccagagtcagcctccacgactcctgccatcagtcctgtctacacaagccctaagcagagacttccggttgttttcgggggagcctggcagggacaagtctatgttcatgtcaccgtcacatggcgaggtgacacgagattgtttttcctgacagccaaagattgaagccaaaggcatcataataaaagaaaacagaggagggcatttctacaaagcaccaaaccagtgaccctcacagtggccacccagatccagcaagaagctgcccagtgccctgcagggtgcaaggatggggcctgcttcacaagggtcccctgtaggtcacgtgcattggaaatcacctgggatgctcctaaaaattcatgctcccaggccgccaccaccgtgacctgtggaatcaggacgtctgaggtggagtccaaactctccaggtgagtcctaggcatactcaagtctcaggctcccagcacaggggaggggtaaacagacatttgccaagagcctgccctggtccgggcattgtttctgacacttcgtatgcttcacctcatgcatcttgccaataccccgaaaagggggaggtcagtacccaggaagctgagacttgacacggtagccccccgtgccggcctctgtgtactcaccctgcagtccccgcgcacacagaggctgaaggcgtccttgtaggagcagcgcgtcccgtcatgcaccatgcgcttcatggacaccacctccccggtctccctggactcgcagtacaggtggcatctctccttggctggaagggaagcagctgggggtctgcaaggagccctgatggcttccccatgtgtgtgcaaaggaggcaccaagcaggagaaatttccacaagggtccccacgtggcccaccctccagggcagacagagagggaaaggggtgggtgacagcagcccccttcctgtctctgtgtctcctaagcctttgaccctggtggttgtggactttggaagagcttttcccaaccaagccagccaggctgttggtgcagcccggctctcacatccccgaggccccgcttggagacctccgaggctgcaaatgtctgtttgctgggttgctatctaaagaacccttttcaggccaggcaagatggctcacacctgtaatcccagcgctttgggaggcagaggcaggtggatcacttgaggtcaggagttccagaccagcctggccaacatggtgaaacccgtctctactaaaaatacaaaaattagctgggtgtggtggtgagcgcctgtaatcccagatacttgggaggctgaggcaggagaatcgcttgaacccaggaggccgagcttgcagtgagccaagactgcgccactgcacactgcactccagcctgggtgacggagcaagactccatctcaaaaaaaaaaaaaaaaaggccaggagcagtggctcatgcctgtaatcccagcactttgggaggccgaggcaggcggatcatgacgtcaggagatggagaccatcctggctaacatggtgaaaccctgtctctacaaaaaatgcaaaaatttagccgggtgtggtggcgtgcgcctgaagtcccagctactcaggaggctgaggcaggagaatagcttgaacctgggaggcagaggttgcagtgagcagagatcacgccactgcactccagcctgggcaacagagtgagactccgtctcaaaaaaaaaaaaagtaaataatccttttcagtcaatctctgaaatccagaatgaggccagcctgcctcgattcagactcaggtccctggaaccttcccttctcagcctttatctgaggcaactaaaacgctgggcccccagactgtggcctccgccagagggggaccccatctgctgtgtcacctccaaccctgcactggcccacatgaggcagcagctgctgggctagggcaacagccatggaggagaaacaaggactgtgtttacagtccgtcccaggagggtccccagctgccacacaagcactgccatgcccaaggccaccagactcctcaggtccctgagccaataaatgccttctagtgctgaaaccggttggagtcaactttctgacactcgcaactgagagtcccgactaatagagaaggtcagaggtcaccagattccttggcagggtcagccctggcctcagccctgagctgaccacacagctcaagcctcgtccacccacggtgaactgcaggagcccggcccctgccgagcccgcagcccggccacctcttccatgtcctcagctactctggggtgttctggtgctctgggattgcagccctgctaggaactttaatgccccacccaggagtgggccagggcagccacaccagccagggtgggctctcctgccagcccagggtcgcggcagccttgccccatgcaggatcagaggcacaagcccccaccctgcccaccctagggcctgcctgctgagcccccactgatgcctcccagaagggctcaccatcccggtgctcgtggggcagccagtggtgctgggcgtcgccgtgctcgaagtacaggtcccactggcggcactgctcctcgcggaagtcagccagggagtcggggcagtcctggcggctgcagagctggaagtcgtaggcaaggcccgagcaggtgcggcccccgttggccgggctggaggagaaagcaaaggccttgccgctccgtgccattggaaagaggcagcacccgggtgcccttgtgagatctttttaggggggatccctaagtctcaggtgtccggggggcagctctgctgagcaaagggaccttgccctgccatgtcctagctgtaagacctgggcagttgtccagcctgtcaggcctcagagtgaagctcttgaaaggacaggacaggatggccacatcctccctcctggggttcctgtggggaggcagcatctgctcacagccctggtgccacctcctccccagcactgatgcctgggcttggagatgaacaggaagctgtgattgggtgtttaggttctgtgttccccacagggcgaaaaccccagcacggcaggagctgagtgagtctcctctgcagctggccctgggcaccgagcctagcacagaaagaggcatgctgaggccccagagtcccggtgctgcagttctcagcaagtgtcttggcacaaagcagacgcatcacggccgctgggttttctccctgtggagaaggcgggctgcgtttctgcaacgtcttcgcttcactgggaacagcaccaacccacacactgcctcttgaggttctaaatgcccagcaatctctttccgagtctggcgtaaaagccccaggggtgcttgaggaggggccacggggctccctgtctgcttctggccgggagggcagcctggagcctggggcaggaggacagcaggggtaggagagggatccatgcacgagcgtgttcacacgtgctgctgagggaggctgtcccactgcgggatccctccgcggagccgtgactgcgggtcctctctggctccgcagggtccagctcgggcctggccagagcaaggagagcagcccgagtgaacaggacccaggagcggccgcagaggccggagcgcagcagccgggacgcacccggagccctgcccgccagctggtaactgggcccggctgtgcatctgtgatgcccaatttggaggctggaaatctgttttgtttgtttttctaatgtgaaattacagattgtcaatattttcaggcaaatcaaaatctttaaaataccagacaggccaaaaaggaaagaccgaagctctgtgtgtctaagcagctgcagggcctgcggcgtaagagcccgctgcgcaggtgggagacgggggtaacgctgatgtttgtggagggttctccctccatgccagcccccccgggacactccctgggtgaggccagggtgagcgttcaggcaggaggagacaggcagtggaggagggagaggagggtgtggatgagaaagtggctgcgggctgaggagggagcacgggcccgggagatatttacggggtgtgtgggggtgaggtgggaggaatgagaaggggcaggaggacagcacagggcatggggcctgcgtggcgggtggggctgaggtatagctgagcatggggatgcagctggcatgggccggctctacaggttgtccctcccctgggcagccagacactgatgacaaatcccgaccctgccctcacctggctgcaaacagctgcccaggtgctagcatcgggggggctgagagaccacccccgcttacccccatttccccagctcggtcctccctcctctcctccatgcccgtggccaggagagacagagtaaatctgtctagagtgggctgcaggcaggtgggctgtgggccccggccaggggaaggggtaagaggcagagctaagcgtcccctgagccgtcaccccctcccaggtagggtgaggcaggcggggcagcctgccctgcacctctccagaactggtgtgcagccacagggccctccaggacagggctggctggagagggtctcctggaccctcagctgccactcagcaaggccagggggacatggggccaactcactgtgggttgtcacactggcgggtcctgaacttcacgcccgtgccacaggtacgtgagcaggagccaaacggactccaagcgccccagctgccgtcccgtttgaggatgtcaggtgtcagccagatgcagtgtcctttaaaacaatgctgaaagacaggaagccagtccctccactcaccctcacaccgggccgtggggacagtcctgcgctctgcagcctgcagtgtctgggacacgtcctggccccactctggggcacagggggagctcaccctcctcgcccctagatgctcagagcccccagaagacaggcctcattggccagaggcaataagaggcacagtgaggggctggcctgccctgcctcccgcttgctgacccaccctcctgccttctagcagctctgtgtcccctcagctggaagctgcaccacatgacgccgccaggatagatgcctcctgggtgcccacacacagcccatttataaagataccactggcctatcaggccagtgactgcaagacatacaaggtttatttaagcaaaaaaggcaatttagaggaaatactatggaaaaaagggacaagtaatatgctgacatggtaaaaaccaggaataaagtccaatgctggcatgtaggaaaaatgattccacatcttaatctgatcacagtgctctcattcctctagggggaggaagcgtctacagtttaggggacccactttaagaagaagattgcaaaattaaagaattaaattaggtgcaaaatgggttattgacttgaaatgagaaaatacatcacacaaaaacgttttaaaactgacaatgaccaaacaaccaaaaaacagagaacaaggacttctaatacattgactgacagaacttttccttcagttccgactgcatgctctttttttttttttttttttgagacagagtctcactctgtccccccaggttggagtgcagtgacgatcttggctcactgcaacctccgcctcctgggttcaagcgattctcttgcctcagcctcccgagtagctgggattacaggtgtccaccaccacccccagctaatttttgcattttttttttttttatttttagtagacacagggttttgccatgttggccaggctggtctcgaactcctgacctcaggtgatccacctgcctcagccttccaaagtgctaggattacaggcgtgagccaccgcgcccggccgactgcatactctttaacccttctttgtatgacctaattttgtagcactgtttccacaaagagaacagaaagagaacgcagccattccttggcaaactcttctcagcaaaccattcctcagcaaattctttctgtaaaagggccagagagtaactattgtagactttgcaggctatataatctctgttgcaattaatcaattctgccatcagagcttgaaagcagctatagacaacctataaatgaatggacatggctgtgttccttattggaactttattttgtaaactttatttacaaaaacaggcagcaaacagaaactttgaatggaagtgtaaggaggttggtgaaccctctccccagtaactgacgaaaattagtttttaaaaagcagccatttaaagtctctggaaattgtcctaaggtctaaacaacaaatgaagaagctttttttttttctcaagaaaatctattaaatcttggtaagaaaagcaaaagtctatggcattggagccacagccctcccccattcctgccctagctcagtgtgacagaagctttactgccaagaagacggggctgcctctactccaagctcccggtctgaggctacagtttcatactgagaaacccaggccactggtgtcatccctctcaactctgttgcagagtctctctctggtgggatggccaagaggcctggggcccccttcccccacccaggccccactcatagggcacaagctctgctccaggtacaccaggccaagaatggtggacctgatagcccctccccagattgcttatagggtagaggttccatgttgaaaggggcaagcccagaagactagtggctaccattcccatctagtgagcagtctgtaggccaggaatgtcactctgggagaagcaggccactgaccctgctcctttagctctggctcagtggtgcaggggcctgcccagagggagagtcagaacagaaggcttcacagctctccctaaggggactgactttgatctgaaacagagcgtggaggatgttcatgtctaagggcactgtcaaaaacaacaagggtcttagcagtgagcaattaagaggaggccaatggtcctaatagcaacaaacaaaatgttaaaccagctacaggttgagtgtcccttatctgaaatgctcggaaccagaagcgtttggaaccagaagtgtttcggatttcagattttcagattaaggatgctcaacctgtagaagttaaacagacagaaccagggacaaagacagctaagagccctcctgaaggtctcaatacacctcagatactggcaacaccctgcccctgtgaaaggtctagaatttaattaggtcatattgtagagcaagctatataccccaggacactgtcaaaaacaatacagcaatcaatcgcactagctgttagtagcagctagcagttagtgaaggctaacagttgggtgtgatagcaatacaggcagaatgaccagaagcttaatggaaagatctgggaaagagatagtcaaagagcctggctaatgccactaccccagggcattaggggcaggggtgcagtcagggtgactgcatatgaccaaggctgtgacctctggggagcaatatcagtggctgcacactgcaggggacataagcttcattgaaacagcaggaccagggcactaaaatcaacaagcaaacagtagcagcaaggcccaggggatcattatccagtttcttcaatgtattatctaaagtttccagttttcaaggaaactttctgagccatgaaaagaaacaggaaagtgtgacccatacgcaggaaatgaagcaggtgacagaaactaccactgaggaggcccagatgtctgactcagcagacaaagatttcaaagcagctataagtaatgtgtttaaagaacaaaaggaaatcatgtctaaagaactaaaggagagtacaggaatgacgtgtcaccaaatggagaatctcagtaaagagatagaaattataaaaagaactgaatagaggctgagtgcaatggctcacacctgtagtcccagcactttgggaggccgaggggggcagatcacctgaggtcaggagttctggaccagcctggccaacatggtgaaaccctgtctctattaaaaatacaaaaattagccaggcatggtggtacaacctgtgattcccagctactcggaggctgagacaggagaatctcttgaacccgggaggtggaggttgcagtgagctgagatcgcgccactgcgctccaggctgggtaacagagactctgtctcgaaaaaaaaaaaaaaaaaagaagaactaaatagaaattctggagttgaatggtacaaaaacttaaaagataaactaattagctggctcagtggtagatttgagctggcagcagatgcaatcagtgaacttgaacatagacagttttaagaggtggggccttaaggagatccttaggccatgaggtcatcctggatgggattgggggccttataaaagcgccagagggagctagcgaggtccctttttgccctttcgtccctgctgacgtgaggacaaatagccattaagcacacgaaaagcaacggaatagatttgtgtgtgtgtgtgacaaggagctttttgaagtcagtcatttttcttgatttcatcgcccattttttattactttagttccatattccattaatttttatctgaattttctttcctttaacaaatatatttgaaaataataaaagaaggtactttttacacatatattccaatcagagtctgtcatttctcccttattttatcaaaacattctggaaccactttcaaaatggcagttaaaacagtatattatctttattttcagacaaaatgatcttctgtatagaaaatcccaaagaatcccctacaaaacttaaagctaacaaacaaattaactgaggtttcaggaaacaagaccaatatacaaaaaaatcaactgcatttctataaactagtaataaatgatttaaaaatgaaattaagaaaataactccatttacaatagcaccaaaaagaaaaaaagaaccttagtaataaattgaacaaaaggaatgcaaaacgtgtccactaaaaattacaatacatcattgaaagaagttcaagttctaagtaaatggaaagacatctcaatgttcattgatcagtgttaaaatggaaatactttcacactgatctacaggttcaacataattcctatcaaaatgcagactagaattttgcaaagttgagaagctgctcctaaaattcatatggaaagtcacaggatgtagaatagccaaaataatattgaaaaaagagcaaagtgggaagacacttcaccatttcgaagcttactattaaactacagtaatcaagacagtgtatccctggcataaggacagacaaatataccgacggaatagaacaaaagcctagaactaaacctttacatttgataagttaaactttgacaattcaatggaaaaggaatagtctcttcaacgaatggttctgagacaactggatattcacatgcaaaagaatgacgttggacatcttcctcacacttacacaaaaattaactcaaaaatggatcacagatgtcaatgtaagagctgaaactctgagaataaaacataggagtaaatcttcttgacctaagtaatggtttctcaaatacaacaccaaaagcacaggtgataaaagtaaaaatagataaattagacttcatcaaaattaaacacttttgcacctcaatgatgccatcacgaaagtgaaaagacaacccacagaatgggaggaaatatttgcagaccacttacactggtgagtgtgataacagacttgtatccagaataaataaaaaactcttaggattcaataataaaaatataaataactccatgaaaaaataagcaaaggatctaaatagacatttatacaaaaaatatatacaaattgccattaagcacatgaaaagacggtcatcataggtcactagggaaatacaaatcaaaaccccaatgagatatatcacttcacatgcactaggattggtataacaaataaaataacaagttttggggaggatatggagaaatctgaagcatcattgccagttggaatgtaaaacaggctgctttgggaaactggcagttcctcaaaatgtcaaacatggagttaccataaaatccaatgattccatttctaggtgtacatccaagaaaaacgacccatgcacgcaatactttgtacacgaatgtttgtgcggtatttcccatcattaccgaaaggtggaaacaacccaaatgtccatcaactaataaatgatgaatacccacacagtggattagtattcagcaacaggaaggaatgcagggctgctgcacactacaacagggatgagccctgtgaacattatgccaagtgaaagacgccaggcgcaaaatgtcccatgttgtatgattccattgatatgaaatgtccagaattggaaaatcgataaagacagcaagaggatgagtggctacgagtggctatctggagttgggcgagagtaggatggattgaggtgactactaaagggtttggaacttttcagagtgacaaaaatgttccagcgcttgtttgttgtgatggctgtaaaactctatgaatacactgaaaatcactgaattgtacactctcttttacttatttatttatttttgagacgaagtttcgctcttgttgtcccggctggagcgaagtggcgagatctcggctcaccgcaacctctgcttcccgggttcaagtgattctcctgcttcagcctcctgagtagttgggattataggtgcccaccacaaggcccagctaatttttttgtatttttagcagagacagggtttcaccatgttggccaggctggtctcaaactcctgacctcaggtgatcctcctgcctcagcctcccaaactgctgggattacaggcatgagccactgcacccggcctgtacactttaaaaagtgaatttaaatatagatctcaccttattaaagctgttagggaaaaaaaccaataccaaccaaacaggcagcagatggagttggccagcacttggccctggcatattgagggaaattctttctttttaaaaaatgatcagtactttaaagaagttatgggtgacgccatctgaacatttaggatgatgacatttggaggaggtgctctctggtttccgtccttgatgtggttttcagggcatttcaagttttctctgtgggagcttgactttaagacactctttggatgagcaacgctcagtagcagttgccgtggacgccctgactgcagtggcagcgttcgcagctccctggcgtctttgatgttgtcaacatttcatggcaaatcagaaagatgtctgaaccattttcctatgtgttcatcagattcactcctcttcgttaatgagactgtcaaacgctccaaggcctgttaacttctttgatatgtgtctcttcctcctaatgagcaactgcttttggtttgatataaaacctttcttttttggtgacaatgagctttttgaagtcagagttattattttttttatttccttgctcattttctactactttagtttcatatcccattaatttttatctgaattttctttcctttctaataaataaattagaaaatgataaaaggtatatttgatacatatatccaaatcacagtctgtcatttcttccttattttatggaaacattcccaagccactttcaaaacggaagtgaaaacagtgccttcagacgtaaccaacatttctgcatctcgctttcattgcggtttctcttctgtctttgaaattttttagagcccttcatttattgtcatccatatgttgtgaggctaggctaacttttatttatttatgttttatttatttatcgttttgagatggagtctcactctgtcgtccaggctggagtgcagtggcatgatcttgactcactgcaagctccacctcccgggttcaagtgattctcctgcctcagcctccccagtagctaggactataggcatgcgccaccatgcctggctaatttttgtatttttagtagagatggggtttcaccatgttggccaggctggtctcgaactcctgatctcaagtaatccgcccacctcggcctcccaaagtgtcgggattacaggtgtgagccatcacacctggcctaagccagcttttgaacaagcagaccatcttgttacacttggcctttctaaagaaatatccatgttggatctgtgtttaaagtactccatctataaaacaaacctaaaaatcaaacaaaatactgcccatatagaagtagtgacaacctccggtaccgctgaggcacctttttctgcaaagatctgagggaaatggccagcacacagcctgtattctgcaatgaccctagatgagttggcacagcggtgtggcgagtatttctggaagctactattacacctggacagacacaatcatttaactctacttgtaagagacagaatcatggcaataagccaaaacaaatgccctcaatccattttctctgtagccaaagcagcaaaatgcccaaggccattctaatggcacccacaggaggggaagtgtatcagtggcacccacgggaggagaattgtatcaatgagaagcaggaatgaaaagagaagtgctgttaatcaagtatggttaaaatatcttatttttgcaaaatttacaaaaatgtgaccatgtaaacacatggcttggcctctcccagggtctcggaaggggctcctgtgagcaagggaccccaaagcgtaagcatcatgagcttcatggtaaatcgacttctgcttccctcccaaagcccctccatggctccccactcgcagcaggacaagccctgtggctggcatcaaagactcggtacgactggcctctacttacgcctcagggtcaccttcccccagcacagcagcactgcagcgctggcggctctgaacagaccgcactcccttccctccctgcccctgtgcacgcctccatctcctcaacacacgcctggcacagcagaccctgtgctgtgccacccagatccctcttcaggaccaagtcgtttattcctcaagctgtggagcatgtgggctgctcatggctcacagctgagttcttctccaggaacagcccccaggaacagtcccctttcctgcagacagccatagccagtgactggtcagggttgcggttcaaacgttgcttcaattgggccaactctgaaaggctccagagctgcacgtggcgctggccgagccctctgctgaggtcgcatccctgtgcagtgcctcactctccccacggtgctggccctgaaagtgcgccctggaattcctgccaccaggtctctgtgtctgaggtcattgctggggagccgtcctcctgtgtccatgcctgagctgctcccctcccgtgcttccttcctggtcctcctcgctcgggcaagccccacctagcgcccacctgtgcccacatctccccttccttcctagcaaaggcccctcattctcatgccttgctaaaaccctcccagacctgcctttgtggcagtctgagccacgtggggactgcagaggccgccactctggattctccctcccagacggaggggggtactgtgggcaggtggtcaagggctcctcccatcaggctgggccaacaggaactggctggggccaggcaggcctggctcccggcccctggggggtcctagccatctctttcctggcaccattacctcatctcttgcccccaaagctcccctcactcgagcatggaggggaggggaacaacccagagaaatgctggctggcgttcccctcagccagtggcgcaggtggggttgcaggcgaggaggggcccaggtaaggcagtgctgtggcctgagtgcgtgtgtcccctcaaattcatatggtgaagccctaacccccagtgtgggggccttcgggaagcgttaggtgatggccctcatgagtgggactgatgtcctcatgagaagagacctgagagagatgccctctctccctgccatgtgaggagaccacaggaagatggcaagccaggaagagggtcctcccagaagccaaccttgctggcaccctgaccttgggcttcccagcctccaggactgcgaagaacaaggctctgttgtgtaagccacccagtctgcggtatttctgttagagcagccgaagctgaggaagatggagtgtgagctgtcctggcaccgtggaaggctgcggccggggcagactctaagtcactggtggccgcaggaaccaggagccaggaggatggaaggagccacgcagtggtcctcctgtcccaactgggcaagacggtgcctaacctggaaatggaagctgggcatgaccactcagggtccttgcgggaaagggtgggagagaagatgattgctttccagatgtaaaatcacagcgtgagagaacagtgatgcacaggacagggaaacatacagacccacattcagggattctgacagcagcccgggaggagcccgtcttccacgttcccccaacatccccacaccgaatcctgatctaggtcggttccagcctgtgctcctcgggaaccaggggaggctgagcagagccccagctctgcccctcagtcagcacaactatctttaatacataaaaggcaatttcacttactgggctaaatgcagaggatcctaccaccaaaatgagtgaagggctgcggccaggtgggtggtctctgtgaggtggggacacttcggttgcatctgctcactgtccttaccagacctccctctgccccacttctaccttgcaggaaaagcagggggcaatcagctggggtgcaggccagccacacacacacatatgggggccccaccagctcctgctcctgctcctgctccctgaaccagcatgcctgtgcagggcctgcctcccattccctctgcctcctccctgcctggggtgggtgcggcgggcggggagccatgcttagctggccttgttctccaactcagcttttccgaagctccccctggggccacggcagatgttctgccccgctccttctgctgagggcctgtgggaaggggaatagctgggtggttctggcctcactgggcccccagcaacttaccaacaactcacttcggacttctaacccttcattaagtctgggcacatcttaaaaacaccaattcccaggtcttcgaacaaaaccttatacacaaatgttcacagcggcgtgactcacgacggccaaaaggtggaaaccaaccaaatgtccctccgtggagaaacggatacaccaaatgtggcacacccacacgacgggaggttattcagcgatcgagagaaatggaatgtggatagatgccacacaggatggcccttggaaacattctgctgaatgaagtgagtcagacacaaaaggccacatatatatgattccatttatatgaaattccggaataggcaactctatagagacagaaagcaggttggtgctagccaggggatggggcgaggagggaggggagaggtgactgataaatggcgcttcctttttgcagggatgaaaagctctgggaccgggtagtggcgatggttgcccaatattgcaaatgtactaaatgccaccgaatggtgcacttcacttttatttttattttttgagacagggtcttgctgtgtgatccagactggagagcagcgacgcgatcttggctcaccgcaacctccgcctcctgggctcaaacgattttcatgcctcagcctccggagtagctgggattacaggcacccaccaccgcgcccagctaatttttgtatttttagtagagacgggattttgccatgttaaccagacttgtcttgaacttctgacctcaggcgatccacctaccttggcctcccaaagtgctgggataacaggcatgagccaccgcgcccggcctgaactgtgtaaagtggttcagatagtgaattttgtgagaatttttaccatagtttaaaaaagaacaccaaaaacaattattggatcctaccccaaacaaaagtcttcaaggatgggcctgggaatttgtttctttcagaagctccgccagagactaaaattaggcagctggcccagtcccgagccaaagacttccatcaaggagccacaggtccatacagtttgggggcgtcctaggcctggctgggatgtgcaccggtgtccactccctactccctgcccccactgcagggccaaggtggtctcagtggggctgagccttcctgggtggggatccaggcttagctcatctgcatatgccagccccctagcaagtaactggctgaggagtgggtgtgtgatttcatctgaacaaatgagaatcaggtctggagttctgggaggacaacagggaagaagtccttctttcaagagtcaccagagggtgggaagtgggcctggggcagccatcaagggacctcgaaggacagtgtgcccaacaagggacaaacactgaggtcctggggatggaaaggttaagcctcatgctgggcccgaggactccaatgctggcctccaggtgaggtgacccacagtgcccaggggtgaccgaaggctgccaggaccccagaaattgctccttaaagggggattcctgagtggggggcatgaagcaccatgaggaactctcagatgccaggtgtgctccagcatcagaagcacagggtggaggcagctccggcgtacagcgtgtgaggggtaattagaagggggaaaggagagggcagcagaggtcccctgagagggcccccacccccacttcagggcctgtccctggtgacccgggcacctaagattcctgtcctctgccctgctgccctccaagagcccttgatgctgcctcaccttgccaggtgcacacatagtcccgtccaaggggggccccttcttggtcttgcaaaagtaggggttgtcaggatggctgcaccacagctgcttgcaggggtcaaaggtccggaactggaagacagcaccatagcttgccaggtccctcccacctcagggacctcccagggatgccacccacccccgggttctggaacctgagatgccccagtgggactggcccatgatgggcccgtgaggctggtgggtgttgtgattctggggtggtgaagaccttgcccatacggtgtggaggctgcagcatccctggacgcggctgggcctctctgcctccagtctttggaggctgcacacctcagggagcctggcgggcagctgggccctaagtgccagcctgaggctaggtgggcacctgctgaccctttgccgtggatttccctcctaaaccctggcgaagccctacccccacccccacaggcctgccctctctgcagcctcggcctcccctggacttcacagtcctgttccctggcctttctgcttcctgtcctgatagcacttcctgcaggacgtccctgagggatcagctgaaactcagacgtggccctgagcctcccctactcaagcctttccagagcccccatcgccatgagaatcgagtccactgtgctccttagggagtcttggaaggaggtggccctcctgcgttggtactcgactctaccacttgctcgctttgtgggctcaggcaggttacctagcctctccgggtctctgtttcctcatctgtaaaatgggactactttgcttctttccttcatgcagcagaggcgagcattaagacgctcatagacactgaagctcccacagtgtggcctccatgccgatggccggttcctctgacggctcagccctggcacttggccctggagagcagcgagtgctcctgtgcctgccgcgctctcctccaggcctctgcgtccgtggcctctgcgtccgtggccctcccttcctgaatgccctctccttccgcttagcctgcaggcctcccttcttccttgggagccctcctgacctctgcaggctctcactgcccctggctgacaccctggtcacagtcctgtcccccgtgtgcttcctgcctaggaccacgtctgggcctgccaggtgggctcagggtgcctagggggtggggagtggtgggtgcagagggacaggctgccactctggagggccgctctgccctccccacactgggccggtcctcacactgtcccgggagctgcccctacaccagcacgcctccccccagacctgggagggtcccggctgcagggctgcacactcaccgccgtgcacatcatgtagcccaggccgaagtcaaagcggcattgctcgttcatggagtagtgcagtcccgggagctggggcagcgccggccagtcgtgggcgaaggggtcatccagcaggcagtcataggagctgtgggggacacacggtgccgcgagcagccttcagcgcggctgaccatccacagccctggaggcagctgaggcccctgctggagctgccatggcagccctacctgcacatcccggcccctggctgtgctgcctcagtttccctgctgcatctcttgtccttggtgtaagacaccaggacctggcttgagcggaccccagggtagccgccgtgcccacttgccattcaaggacagacccctgacaatgggttctcctccagacaccaggcttctctcacaggtgtgccctctctcctcccccgcacacaagcttagaggacctgaggtcggagggctctggctctggtgcatggggacttgcaccctcccagagctgaccccagggactgaggggtcgcccacggggcacatgggcagtactcactgcaggtagcggctcagctcctgctggctgcagcgggaccagtggaagcggtggaaggcggcctgcaccaggggcgccatgatgctgcccagccgcacctcgtcgccacagcggttgccctgcccgtcgtgctccatgcccagcctgcgagggccgaggcagctggctgaatcccactggcacacgggtctgccagtcccaccccaccccgatgataggagggtgccccatctttccccaacgggcctcctgaccttggcccactctgagccgggtggcaccgaccatctacctgctgcaatttgaaagccgaggcactctggggagacagtgtccagcgggcagtcccccaggtatcctgtccccaggaggggcatgcacacctgggggggaccgtggcttccctgcctccaggtttctaacccagggcgagccaccctccaaacctccgagcctcctctataacatggggtagagcccaccctgcctgggggcttggatgtgataatggggcaaggtccccagctctagctggcccagagcgcctgctcagtctgcaggcaagcccttcctccttcaattggttccttcagcaaaagtgggcctcgggccagcactgcccagcgctgggaagacaggagaccacaccccaagtggctttgacacagggcgtgtccctcttaaggcacagaggagaagtgggcagccagggctggggatcctagggtggcccctctgtgccccacccttccccaggccacttacacgtggccagtctcatgggccaccacaaacgctgaggagaagccgtcctcatggttcagggtgcagctgcggaccggatggcacatgccggtgacaggagcatagcctgggaggagacaagaggcggctccagatgctgccatagcctggccgggaaggtgaggcctggcctaactcccaggcgctgcttctcctcaaggccccaatgccctctctaccacaggcaactgcccccggctggcacagctcagaagacaccacagcagacagctcatagcctgtgacatctggctgacagcaggcccccagcccgtcaccacacaagccccgtggccgttctgcctgtaacagccacactgcagctggggccctctgcttagtcagatgtcacctgctatggcttgtctgacacctgactttcctgcctgccgttctctttcacgccacctgcctctgccccctgcctgcctcactgagtggcccctgagcagcacctgcttccacacctctctctgctagaggcatcctgcccctcgtctgcctggtatcacaccctccaagcccacctcctctggggggcgtttcttgggtctccccgtgtttctctggggtccttgagaccctagctagacctgtttccataatgccgcagaaggctgcaaagctgttcagccgatgggccacactaccctgcagaatatcccagcagggggctggctggtgcggactgggaggtcagagccgccgtagaagatgaggccagtggcctacgacagcccagggccagggggagggtggcagaagttcatgacgcagagaccccacgtcaaactgaggaagatggataatgagacctattcacttccccagctcctgtctcagcagagggaggcggcttggaaagatagggaagtgcctacagggctatgggtgccacacgaggtctctgcttgtacccctgggagtcttcctagaggcctgccaagcatggagccctgactttcagaaccccaacctgccctcactcctgccatgccccactgagagaccctgaggccacgcgttccacagagaagggaaggagggccactgggaccccgggtgagctggcggtgtacgcgcctaaaaatagaagcatcgtgatctaacccttgtcttttcccgttgtaataaacaggaaaatctgcattttttgctctgcagattttgagacgagcgtggagtctgtgtgcctgagtggaacgttgccatctcctctttgccctttgtatgccaggcttgcagatgcatctgcctccgtgggaggctttccattcatcctactcagcattacaggagcctgcgagatctgaaagcgcatctttatgtttttctttgttttcttccctcttattttactttgtggctgttttctctctccggaatcttattagatagagtgtgcctcctcgatggagggtctgtctcctaacttttctctcatgttaatctttttgtcttttgctcccattgggagatggccttgactttttatttcagctttcgattttttttttttttttttgagatggagtctcactctgccgtccaggctggagtgcagtggtgtgatctcggctcactgcaacctccgcctcctgggttcagtccattctactgcctcagcctcctgagtagctgggactacaggcacccgccaccatgctcagctaatttttgtatttttactagagacgggatttcaccatgttagccaggatggtctccatctcctgacctcgtgacctgcccgcctcggcctcccacagtgctgggattacaggcgtgagccaccgcgccccgtctacctttcgaattttttacttcccccatcctatccataattttatacaaatggtttgttgttctctaatttttcatagaaaactcttagggtttatggatgtattttctcaaacattctgggaatactacttttaaaaacatgcttttcttgtctctaaattatctctattttctcttagagccagttttcaaactttttgttttgttttacatcttggtccatctttttcatgctgtaaggatttcttgtgttttggtttttttaaaatatctggtaacccttggctgtcctttcattttttcttttttttttttttttttttgagacagagtcttgctctgttgcccaggctggagtgcagtggcacaatctcggctcactgcaacctctgcctccggggttctagtgattttcctgcctcagcctcctgagtagctgggattacaggcacctgccactacactggctaatttttgtgtttttagtagagatgttggccaggctggtcacgaactcctgacctcaagtgatccgcccgccttggcctcccaaagtgctgggattacaggagtgagccaccacacccagccaatttcacatttttaaatgagggatcaggtcacttaatataaaagctgtgtcggtttcccctcctaggggatagctctgctccccattagtgccctccccaagacaaaacagccaacagcactctcatcacatggtcagggcaacacctggctgcgctgtgtttgaggggagctatccactcctcacccagacatggtagtttcagtctttttaacctagctatgctattaggtgcgtcttgatatttcattgtgtttttaaattttccttttttttttttcttgtaagacaaggcctcgctctgtcacccaggctggagtgcagtggtgtgatcatagctcacttcctgggctcaaacaatcctcccacctcaggttcccgagtggctgggactacaggcatccaccaccatgcccagcctcattgttttaattgcatttttccaatgtctagtgaggttgagtgccttttcatatgtttattgctcattcatattttgtcaagagcctgataagagtctcctgcccattatctgactggattgtctttattatccttattatgatttgtaggcgttcttcacatacttcagatataaatccttttttataaatatttcccccagtggattagcgtgcctttaatgcacaaacttttgaaatgtgctactatttatcagttttttccattgagttcatggtttgtttggttttttttgtctcttttttttttgagacagagtctcgcactgtctcccaggctggagcaaagtggtgcgatctcgactcattgcaaactccgcctcccgggttcacaccattctcctgcctcagcctcccgggtagctgggactacaggcgcccgccaccatgccctgctaatttttttgtatttttattagagacggggtttcaccatgttagccaagatggtctcgatctcctgacctcgtgatctacctgcctccgactcccaaagtgctgggattacaggtgtgaaccaccgcgcccggccttttgtctctttttaaagaaaacatctcttactccaagaacatggagccatccacctacgttatcttctttcattattttgcgtttcttatttagacctaaaatccatgtgagatgctctctgtctatagagtgagtggaggtgacaggcctcctttctttccaaattggccccacaccatttgttaggctgttttcctcctcttctctgaaatgtcacttttgtgacacattagcgtccctatacacataggtccaattcaggacactggattctcttctaatgatgtatttgtccatcagtgcactgccccacaccctcacccagctaaggtggccacggccttccctgccctgacactcttccctgggctgggccaaggctcccggggccccttgcatggccaggggctcatttccagcttcacgcctctgtggccctgcatgggtgaggctcaccttgcatgccggaaggcccaaagtcctgccgtgtgaggaagatggcgtgatcgtggtattcatcgtggcccgtgtctggcttctgctggaggtaggcccagcggcagacattctccaggctctgagaggggttcccgatctcgatgaggctcatggactgcagggggatggagagaaatggaagagagaggttggcgcctggtggcccagtggggggccgagcaggctgtagtgttgacagaccccatccactgggaatctgttccaggtggtacaaaggccctgcccggtcactctcaggacctgctcccactgggctccagtctttgacagggaagaaaagtttccccagtcacactcacctgcgtgagtttccacacaaagtcaccgcagttttcaggtgagatgcagaagccaagctctacgtcatctaaggcctcgcatagtcccaccgtctaccccatttccagaagtccctgtgtttgttctatgaggcacctgttccgtgcaaggcctccacagaaggcaaatgtcatgtggacctcaccccaaagagctcacagttttgggagggtccgtggcaggggaggcggaaattccagtgtggtgtgcaaggccagaggaagcagatcaccttatacgttccccccgtgtgaaggtacttgcagaaaccaacacaatggaggaaaagaaacagcaactgacatatttggtgggtgcaaaagtaatcgcagtattgccatgaaaagtaatggcaaagactttggcatcaacctaatagaaaaacagccatatcaagaacaagggcatacacagatgattcccacaggaactatgcatgggaagcccccgggaaccatcccattccattttgtatcatgacgcacacctgacagctagggtggcctcgggaccgctcgtcttgcacactctctctgcaccatgacatcagcaggcactcccatttagacttcaggactaagaagcctgtcttggacaggaaactgagactcagagaagttaagaagcttgcccaggtcatgaaactaggaagtaggagaattgagatcggatcccaagaaggctgaaaccaaaatctagattcaactcactgccctaaacttcctccttaaataagacatacacaatatcatttcaaaagcaaggcttctgtgagcggcacccttccttttttcctccacaatcctcacagcaggcattttggtttctgttctcaccatagactccaaacaccgaagtagttccctccaagagaaccgagagcccctctgagtcctgggcatgttcttttcccctttaaggatttatctggccataaaatagagatgtgcattccttggaagctacgtatgcaggtgttttttctcttgcataaatgtatccacaaagtagagccacgtatttctctttgtgtctataaataacaaaaagttggccgtgcgcggtggctcacacctgtaatcccagcactttgggaggctgaggcaggtggatcacctgaggtcaggagtttgagaccagcctggccaacatggtgaaaccctgtctctactaaaaatgcaaaacttagtctggcttggtggcgtaatcccagcaacctgggaggctgaggaaggagaatcgcttgaacccgggaggtggaggttgcagtgagctgagatcacgccactgcactccagcctaggcgacagagtgagactccgtctcaaaacaaaacaaaacaaacaacaaagggtattgttagcaagccagttagttccagaagaagggagcacaattcaaggctaggtaagacaagtcgttcccaggggtcccagtcaatgactgacaagatggcagaccaattcccaagtcccaagcacagagttaattgtaaagactttatttcctgctcctgggagataagataactcattctaacaaggtttccatgagtcccgatgaaataagtcataaatcagagtgtgatgtcctgtgactaagacttgtgggacattggcatagaagtggacagaccagaggaagctggaggagggcaaggggaggtgcacttcctgttcccatcatgaccaggaagagcatgtgactagctctggccaatgagctgtgagcaaaagtggggcatgtctcttttcggttggagcatctaatttcccattgagacccttcagagagctctcctttctggcacgagatctggcaacataaagacagtggctgctctgtcacctaggacctgagtgacgatgagacccgaatcctccgccaacccacattgaacatacagcgtgagcaggaaatcttggtcgttttaagccactgggatgcaaagtgtgtttgtttctgtagcataacctcacctactataattgatacaggaggaagggagtgggtatctgcatcacatccaagcctgacccctgcagctcatctcgagtccctgccaggtagtatccgcctctgggtagccttgagaggtcacagttctgaaggaggaatcgggcgaaagaatgtcccttctcactgtctccagctagggggtgagcttgggatggcacaagaaggaagggaaactcggggtggatgtgattcggtgctagagcgtgggccttgtggttggttgtactcgctgaacttaagattggcagcccagatatggatgagcctgggggaccttatgctaaatgaaataagccaggctcagaaagacaaatactgcacgctctcactcatacgtggaagctaaaacagttgatgtcacagaaatagagagtagttcctggagagtggggggcagcgggctggggattgccaaggctggttaacatatccaaaagtgcggcaagatgggggaataagcgttagtgccctatagtgccggaaagcgcctggaatccgtaagaatgtattgtgcattttcaaatagctagaagagtggactttgaatgttcccaacacaaagaaatgataatgtttgaggtgacagatatgctaattaccctgatgtaatcattacacattgcatacacgtgtctaaatatcacaccctaccccagaaatatgtacaattattacatgccaattaaaaataacagtaagagcaaaatcaaaaaccaaacaagaatgactttttaacatacattttttaaaaattgccagtccaaatccaaatcagagggtcagcacaaaggtcactaataagcgcttttgctagggtggtggcagggcccctgctgcagtgtgagtgtctccatccaggacacccagcacagctcggtagccttgctgggctccagggaaaggggccttgcttcctccagggcacgtctcccagcatcagtgtcaagggagtcctgtccaagatgaactcacctgccctcagggtcctaagccccatgtagtgggacggtcccttccgatgccctggtgggttgcggtgacttctgcctgcccttgtttccctttcgtgaaacttcccctcctttaatctgagtcagaccccaggcttcaggggcaggcaggcctggccaatcccagcaccacgccttcctggccaccatgaaggatcagggtgaacatacaaccaaagcgggccaaggagtaggcaaggtgtgaggtggggggcctgcagcggctggagcccccctgcactacaggagaccccccaccaaggattaaaggaggatgagaccactgtcgagctaagactggggctgcagtctcatctgaaggctgtaccggaggcgggtcagctcccaggctcattcaggtggtcacggcgggccccagctgagctgttgcacaccataccgtatgggcccctcctggggccgtcacccatgtcagctttaccccacacggtcgcccctgctcgagggacccaagagacaacaagagaaggcacctcccctacagaagccacagtctgcttttgatagaatctcagtcccgcctaccgcagggcatggacattaagagactgggtcactggcggccatcacgaaggctgcctgccactgacgggtgtcatttatgcctgaagaagttcctctccttgtgaaagccaattctgagttgtgctcttgtcacttgcagcgaagagaatctgagccacgtgcttcctcctttgggggaccacagggaccccagtcaggacactcgctggcccatgaaagatggcgtctgatctgggggcagctgatatgttctgggggcagtttatatgcttctcagtgggagaagggccctggccaagtctttgaggaggagtcaagagtccagccagaaagacatgccccaatatcaggaccagaggcaggaatgaggctagtgtgtaggacagagctgcgggaggagccaggctgaggcaggctgggggtgtgcagggaggtccgctatcctagtgtgtgggcttgtggggagtaccgggaggatgctagaaacccaagcgcctacaggagcaaggcaggtgacaagtcaatgaggcaggctggttgcacgaaaagtaagtccatcttgtgttttcccagttttgaaggagaaagggtacagaggaatatttccctattagaatagagtgggggtcggtgataaggagtggcgaggactgtggcaaacccaggtgcccaggcacagctgaagggagcaacatccgcccagtgctggcaggaacagaggcccagagctgctggatcagatttctcaggtcaatcgtgaaatctggattctacagacacctacctaatagtaaacactggctcaaattgaaatcagttatgcagacaaaacaacgcatcctccccgtcaccactttattccagaaccctggaataagagccctgcagtgggcagccccttctccacgtcctgcagactggatccactctggccgatcacctctctcctcccagatgctggcttctgtggttcagcctgggttcccagcccgtcttagcagccaaagtgatcttgctgctgcggcaagacaatttattgaaatattgatttgtgtttttgttcttgcctcgctttgttctcggcccagtccaagaaggcagcctgccactttcgttctccaaccccaaggaggttgtgctgcagggtccagagctaaaggggtctatgacccccttctggctttggggttctgaggagactccctgaggagggggcagaggggagggctggggtgcatgggcacagggaggggaagctgcactggggccaggggagccctgggaggcaggacttcaggagacatgagagtgtgctagaccctgggagcctgggtcccagcagggggtaccccaagaagtagaggagagggttacctcagtgtccgggcaccccaggactcaacctgccactgggagcttaactgacaagccacagagctgcttgtgcttcctctctctctctgccaacgtcccaacatctccaaggtcccagcctatctctgacgggcacagaggagcccaggggcagagatcttgtccttgctgggtctggagcattcaagggctatggggtacccatgaggcccagacattgaccttgtgcccagaggccagggcaaggtctgtgtgcattcttaaaacagccctttgggtcagtgaggaaggagtggggatagaaggggacagtgtggcactgagatgcatgcaggtgtggctggtgccacgtcaggagggtcaggacctggtggcaggagctgagaggcatcagggctgcagggcgggagcaatgaggcagagacggcaccagtgtctggctttggggattggtagcaaggcagaagaggcggcgcgggaaggggacggcaagtgccagaggaagagcgtggggtccgcagtgcaggaaacatggtcacggcaatgtctttcctggccagcttgctcgttgggaagagctgggctgttttgctttgggagctctcccacttctgggggtgcagcccttgtgggtgatcagtcccaagccgtagctgggacccatgttaggcccatggagcacaggttcgaaaggactgaaaactggctgaagtgggtttgcctggtggcagcacccaaaacaaccatccgcaaactcaggctcatgcaccccagagccccctttcctccacccactcctcccactccatgagagctacaggcagccttgggttctgcatgcctctaaggactcctcacagaaagaaactgatgtccaggcagagacatcggggcagctggacaggtctgcggcccaggagggaagtctgggctggccgtggacagggcaaggccctcgctactggaggcagtcggaacccaagggaagagccaagctcaggtctctccgctgagacctccagccaaggatactgtcctgacatgcagtgaactcccctgtgggtcacttgggctccagcgggaccacctgctgggatgcgacctcctttgctcctctgccacctggcctgcatgcaggaggccagatgggtccctgctgcctggggcaccccagcccccaccatcctgtgcccttgctatgtatcaagcctgggaactgtgcttcccctgagcgagaagaagacacatttctcatatatggatctcctccagaagtgagggaggctgcactgcttgtttccactgaggagtctttcaccagctcgccctggtcatctacgtccctcccagtcctgaatgcacctgacttccagctgcctgctcggctctgcacggctcctctaggaaagtctgtctgtgtgactccacctgttcctagctgtgctgagggggggaccaggagtgagccgtagcaccctgggctctgcaaagggggtggctgcaggaccagccagggactttacagggcagccagtccctcccaggggcagccgcgggcacccagcctccagagcagggggcggtagatggtgctgtatgaccggggatggacatttcgaggccctggggctgcatggtagctgcagggtccacctcctgagtgaggcagggcctctgagggcagactcttcacagcggcagcagctcccagaactcccaggtccagcctagggccccagaagagccaggcgggagaagcctgcagtagggctgtggatgaagtccaggggcccatccagcccaggatgcaggaggagtcctgagtgggctgaccctagctcagagcacgggaacagatgagcttccaagaggctgatcggatcctctacaggggccccaggacagtcgtcacccctcatggagggctctgccacccctgtttggaggtgacatcgaccactgcagacatgggctcccaactgggctccactgcccgagtgctctggggccctggaccaggctggctcttccagagtgcagggtcctccttggccatcatgagtgcccacctatgtccacatggagaccctccttgctatgctggttcacagagctgcccagatgcaggaggcagacactcgtccaggcccctggggccctcccacagcagcaccgggagcctggtcccaagaaggatggtgtttcctccgggttcagcctgtttggctcccctggcccgggctggaaagggtctgaggacatgcctgaaagacccagggatcccaccatgaggtggagagggcagatctgagggccttagggaggcaagagcttgatggccctcaccttgggtcagaaggtcactttgctgaatgctccccagggctgtcaggaggcttggccagggcaagggtgaggaaacactgcgggcccctgaacctcaggcccagcctgcaggggtctgggtaaccccacgggcctcagggaacagccaggagcttagggggcccgtgggccttgggtggacgagtaggctgcgtccagctccaagtcccagccccatcctggccgcgggaccctggctctgagctgcccgccgggtccctcctcctgcgtgcgatcggtcacctgccagatggggcacctactggggatgtgcctgttgctgtcgctggcctctgagtcactaaagcctaagctccttgagggccgggtggttgctgggcccgagtctgtgccccagccctggcccacgcctgccctcagtagccccactcctcccttcacggagcaatcccggcttctgctctccatgccaggatgaggcagcgaacgcggccagaggaccccggctgctgggcgctcagtgatgaaggaatgaacacgagcaccctcaggagccaggctgggcagggagggaggcgccggctgcggggacgttctcgggaggcctggggaagtgagcccaaagggccgccccggcagatgctgaccccagcaggaagtcaccgtccgcaaggagcgccccgctaggctcaggcttggcacacgacacctcgcttccacttcattttcctaccttccggatgacgaactgcgtctcagacaactgaaaggactcgcctgagtcccacagccggaaagaggtcggggtgctgccccccgcgcggggcgggcagaggaagggccgggcccgagcggccaccaggtggcgctgctgccgcgagaacagcggcccgggccggggacgcacccggcgcccagactccgcggccgcacccgggctcccggggccccagcggccccaagacagcctctgggcctcaccctaaatacatcaattatgacctgagcaaaaagttctgttccaatcgttgctctccgacatttccattgtttgctctggaaggagctgaattatctatgctcttccctccttcagtcaaggagacgtgggaggaaaccgggatggggatcagcagcctggaggccgcctccgctggaaccgcgcccgccccgccaggaggctctgcctgctgggcaaggcgcactcagccagccccgcaggccgccacgcgaccgaggctcaccaagtccactgcaggtggcaggtgaggtcacctgggcagctctaggcccggccgaaatatctcatctgctctgttcttgggcaagttaccttacttgtccccacctgcaaaatgggcacaactgcagctccgagcttggagctggggggcttccgcccatgacagttcaggcagggtgcagtcagcgcccacaaatgtcccttgtccttgtctctgccgtgctgttgatactgatggagtataacaccagtccctggggactggcctacccgctggggctggctcatgcccccaaggggatgcggcttcagcaaagcttctcaaccgtccccatcccagaggggccctcctgcctcagaccagcctcctaaacaggtgcaggataggacagcagggaggttgggttctggtgagcagaccacatttctcaacctcagcactccagatatttggggccagataattcctgttgggtgaggcgggcaccctgttcatggcaggatgttgagcacacccctgggcactccttgccagaacccagtggaaccctccccctagtcgtgacaaccaaaagtctctccagacactgccaaatgtcccccgggtggggggaggggtggcaaagtcactcttggttgggagcaactgaccctcaggggaccaggacaaggagcctgaagctggtgctcctgaccagccgggatcacagagtccagcccctcctcccagagcagagtggctccaccagcgtgtggccccgggcaggccgctcgccccctggagccagggtcctcactgtcaaatggggatgatcacagcgcctactccacagggttgctgtgggggtgagggcataaagtcacataaagggcttcagacggtgcctgtcccagaagaagctctacaaacagtcacttgcacgaacgcctttatgattgtcgtcattcctgttgtgtgctggggtttcacagacctcctcttatgggggaaactaaggccccatgatgttaaattgctcaccaaaggtcccacgagtatggacaaagccagaatgaatggcagggacaaggtcccaccatccctgctctgtgagcacatgttctaccgtgccccccagctgagtgcaaagtgggctcccccaaggctggaggtctcttgttccaggcagggcttacagatcaaatctcatcacgacagagaaccacgagagctggggcaggaggcgtgcacctcatttctctgccagaactcccatatcgttccagcattttgtttccagccatcttccccaaagcctgggaagctattcccagagagagccaagctgccagaacaggattctcaacttgagccttcccaggcatgagccagtgcaggcctgtggggaggcagaagaggggcctcctgctagaatctgaatgttgtgtcccccacatttgaaaggttgaaagctgagaaccaatgttatggtattaggaagtgtggtctttgagaggtcattaggtcatgagggtggagtctccataaatgagattagcacccttacaaaagaagcctgagggagcctgttcacccttccatcatgcgagggcacagctagaaggtgccctctaggaggaatgggtccttacgacacatcagttctgctggcgtcctgctcttggacttcccagcccccagaacagtgagtaacacaattccattggttataaattactcagtctaaggtatttctgttattgcagcccaaacagactaaggcacctcccaagggcagtgtccagccttagtgcctcctagttctctggacccaggtaggtctgggtgaggaggtggatggaggatgatgtgggtgggccatcatgccttgcacccctatcaggttgggggttgggacccagatgctcaggaggacagggggctgtccctggggtgaggcatggggtgtgtttcccacctcatcccctgtcccagatccccagggcccttgatatatcctccccagaccttcacttcctggccttcctgcaccatggctgggccactctaaatcctctaccctataggtgggtgggtgggcacaccaagcccccacccccagcacctctcttctcgtgctttccactaagagactcacatgcagaatttctcagacctttcacctccaatgctgaaaaattccagcaagcattccacactttgtcttgacctggttttttataacaagacactttatgtccttctctgatgctccccaagtctctgatttccatttgctttgattttcatcatcctaggaaatatttaaaatgagaacagttgagtagctttggtaccttctcaaaaaatcaattgaaaagccagttgctatgcaacctcaagtgttgccgatgctctgctccctggctggtggtatattgtataaaataagatcatctcttttcttctgcttttttttaagaaatggagaaaaatgttgttttaggaaaaacttgagataactcagaggcttctcataagctagaagacaaacatgtcactcaaacaagtgctaccaattttatccccactggagcctggtgaggcctgggggacaggcaatgggggagcggcaggtggggagctggtctatttctgtcacaatttgggatgaataacaggaaccgagtatctgggccactttctgcccaagtctgggtcatggtctcacatcccccagagtctgtccccaccgtgggggggacagctcagccccctcctgactgccatcgccttggttttgccatgctaaaattcttctagagacgggggcctcattccttgacgggaagcctgtggttccttgaagagcagctcatcagaattcatccccaccatgtgccaaactttgtccccagagccccatcgagaatccctggctgtgcttctctgtgagcaaaaggggtctgttcccttggacacaggagctaggccttttgcccccagatcttggctgggaagtccccatcctggctgctccatccatggtcccctattgcctgccaccctgctgtattccttgccggtgctcaccactctgtcgctgtcttgtctgctgctactgcctggacacagggctcctctcccctcctcgttcatgcacctccctgggattaaacagcagctgctcgggaagccagaggctctgggctggccggatgctttgggggcacaaggatacatctcctcccacgttcatcagacacctcagagacctgaaaacagggcctcccccagtgctatgcaaagtgaagtctgtgcctggtggacacaaactgttccagtccacagtgagataagtacagaaactagaaacttttatagcaattggacgggttgagtttatgtccacagaatttaataataaaaatccagacctagagtttttggatacctcggtttttgtcacatttgcttttcccagtaattcatttataacgtatggtacggaagtattggtctgtgatgggtttgaaataggaaaaagaaaacagccaggtctttggcattgaggtgcactgtgtactgctgctcccaggatggcctctcccctggccacctggggatggcagatggctcctccggtcccacagacgctgctcccaagccctgtggcccacagcacattcgctaagtcagccagggcccatgaccagaacccattttcctagccgctgtgccctctaccccaagccttcagcccagcccctagcagtgccacctcctctgctctactatttcctgcacttttgcagtaggtccaacctaaagcaacgaggactcatagcctcggctcacttcccctctcacagcccagaaccccccagagaagggcacagcagcgggcaggcccggctcttctggcagtctacactcagctgatcaactcaggagatccccgggatggagcggaccccatgggcactggcgtcccctacccccatcactgcctcctgtgcttgatctgggaggcttctaggaggaaggcggggtagggccaggcagaaaaaggtgggcagagtatggggtgagctttgctgagccccactctgggcaggcatgagttaggagcagaaaaaaaggcccagaatgctggaatgttccagaacattccaggaggccaatcatccctgaattcccggggtctgacagagggaccggctgtgtgttgtcctccaagctaggctgaggggcctgggaacaggcactggggtgtcctgggtcccacacccctcacaacccagcactgcctctcccctgcctcctcagctgcgggtccactgagccctcggggccgggggtaagctggttccatctggagttagctctggaagcgtgcgtccagcttccggttctgtcttccaatccctcaccaccatcagttctcaagccccttcccagcaggaggcggaagcaaggccagcctcagttcacctatgtcctctctgttctctttgtacctgggtcgcagaagttgcccggtgcccaccacaggcatgagctgccctggtttgctggctatggatctcagcacccccagggcctgcacatgtccccatgttgtccctgggaagagcaggctgcacctgacaaccggtcccctgcccactgccccattcccaactctgccaaaagtggaagtggggccccagcatggccccagtgaagcagagcttctgcaggtgcatgaggggtgggggtcccagcaaagcagaacttctgcaggcaaggcgcatgaggggcaggggccaaggaggccctggccaggagggtggtgcctgctaacccaggggcgtgggcttctcatgcaggggagaccacgtacctatggcagcctgcgtcctcactccaagatttcccatttccttcaggtggacccgctgcaggtggaccccctgccccagccacaggaagcgtgagctagcgcccatagggtggaacacagaaacctcattactcctccccagcccactgcagagatgacgtgccaagggaaagcatgaattctctttgatgtcttcattgaaatcagaaataaaggactgagcgtgacagagccctgtggcatgccaccggagacctttctccagagtgctgaattcagtcaaacggcatcatttggatcctaccatttttaaatgattttttaaaaaatcatttaaaaaatttaaatttcacaaatttaaaatgcagtgttttgtttataaaagaaacatgctggtccaggctcagctgctcacacctgtaatcccagtgctatgggaggcagaggcaggagaatcatttgagcctgggagttcaagaccagcctgggcaacagagtgagaccctgtctctacaaaaaaaaaaagaaaaaaaaattagtcgagtgtggtggtgcgtgcctgtagtccaagctacttgggaggccgagatgagaggatcccttgagcccaagagatggaggctgcagtgagttatgatcacaccactccactctagtctgggcaacagagctagaccccatctcttaataataataataataataataataataataataaaaaccatgctcatcatattgaatttaaaaaattcagtaaagtacaaagaagaaaatgaaaattaattagcctactgcccacagagaaatcctgttcacatttgatgtgttccttccagtctttttggtaaatatatttgtacaccaaattgagatcatacggaaaactgagatcctgcttttcaaacaacaaacagctttagactgtaaccatttcccaatgccattaaacatgtttcgaaaatgcaattttgtggcagcctaatactctaccacataggtttatcattacttaactagaccactattattggacaatataggttgtttgctgttgttcacatgagagataatgccatgacccttgtcttgttcctaaaacttggcccacagctgggatcactgctttggaacagagttgtagaaatgaatgtctggggtcacagaaatgaatgtctgggggcaaacatcaagaacattttaaaggccaaatgcggtggctcgcgccccataaccccagcactttgggaggccgaggcggatcacctgaggtcaggagttcaagaccagcctggccaacctggtgaaaccccatctctactaaaaatacaaaaaattagctgggtgtggtggcaggtgcctgtaatcccagctacttgggaggctgaggcaggagaatcacttgaacccaggtggcagaggttgcagtgagctgaggtcgcgccactgcactccagcctgggcaacagagcaagactccatctcaaaaaaaaaaaaaaaaagaaagaaaaaaagaacatttttaagggcagtgataaatattgctacatttccttagaatatctgtactcatactcaaagtgtgcctgcttcattcacccagccataaatccctcttcatcttaacagggttgatgctttataaatggtgtattatttatttctttaacagtagagttagatatttttccatatgggctttctcttagccacttggatttttttctttgtttccttccattgacaattttgtttccttatgatttagaggaggttttatatattaagatatatttatcacattgcaaatgtttttcctgcttgtcatttgccttttcattgtgttttttgacagaagtttggtattatacttatccaaatatatccatattcccctttacaattccttcaattggatttatgcttagaaagctcttgacaaccaatattttcttcttgatttgtgtgatttaaatagttgaatgttgtattggcttatatttgtcacatgataatttaatttcctatttattaaatttatgttatatatttatttataacacaataagcattctgtgtttatcacggtaggttatttgtaagaggggtattttcaactattttattcaactgaactgtctatgaaagtttatgcacatatggcactattttaattatcttcactttacaagatgtttggaggaagtctcttacttgcttgggtcccacagctgtctcggccattcttgaccgttcatgttcctttggaggaagtctcttccttgcttgggttccgcagctgtctcagccattcttgaccattcatgttcctttggaggaagtctcttccttgcttgggttccgcagctgtctcagccattcttgaccattcatgttcctttggaggaagtctcttccttgcttgggctccgcagctgtctcagccattcttgaccgttcatgttcctttggaggaagtctcttccttgcttgggttccgcagctgtctcagccattcttgaccgttcatgttcctttggaggaagtctcttccttgcttgggttccgcagctgtctcagccattcttgactgttcatgttcctttggaggaagtctcttccttgcttgggttccgcagctgtctcagccattcttgaccgtccatgttgctttggaggaagtctcttccttgcttgggttccgcagctgtctcagccatgcttgaccgttcatgttcctttggaggatgtctcttccttgcttgggttccgcagctgtctcagccattcttgaccgttcgtgttcctagatggtgcttagaatcacttcataacatttccaactatgaatctgggaaaggccaacctctcgattatacccagcttcccatgaggacagcatttgtgtcttcatttgtgatcactttcttcctatcattaatcaggtacaatttccttccaatgggtccattgtcttgtcaggactattccaggtattctacatttttggttactaccataatggaaattttctctccctgttttccccactaccaaggctgttgtttttggttcacacagaagctactgattttttaaacaatggtctgatatttggccacatcaccagactcctctcctaactctacaagttgtaccgtggattcttttaggttttcccgacacatgattaacagcaaacaatgagaatttgtctctgctcttttccaatactagtttcatgtcacatacaagtatctaggattttcagaaccacagtaactagtttatgggtcttttttgtttgtttgtttccaagactatctccagggcagtgctccccagagcaggttcagcaggctgcggatctgctgagcaagaagcttccgtggagaaagttttcagagaccacctgtactgctcggactctcggaggtacaccatgcacagctccacaggaaagtctccgggaaatttcacccccaggaatgcccattttcctttgtttgaccagcattttccagacttctttgaccttgggacccctctatagtcctctgtaacatctactcatatcctaagaattcgctgtgcagaacacttttagggaaatgtgcttctttttccgcctttaaatacaatcttggttgtcctgttgccctctgttactagttttctggggatctggaaaaggaggagtgccctgtgaggggctacggggccgtcacgcccttgccctgccagaggcttcaacactggagccctgaggcctctctcccaggctccccctaggcagcaagctcctcatgcctgcagttgcttctgctacccccagctccagaccccgcagggctccagacccacatccacatcttcttggcctcctccgctgggatggcaccaggtacctctaactgcacatctcagctgacctcttcagcttccctcctgtgctccccaatctcaggggttgataccatcatctacccagctgagagtctctccgccttcacccacctagtgccacatcctctcgaagtggcctcctctgtcctcctgtctgtatccctggacccaggcctggtcccagtccagctgccagcatcccccatttgatggcagtgactgtctcctaagccactgctcccacctgccccttctgcacacaggagccagtgatcttcttagaaatgcacatgggatcgtgtcactgcttaaagctgccctcatgggcaagccaaaccccttggcgggagacgcaggtctgctctgctccttgcgatcggctccttccgacgtctttggcattgggtctgctgttcctgtccctgtgctcgtccctctgggttcagctgccctccctcccctcccagcctatgaactcagagcatctctatgctggtgacttcactggaccatcttcaggtgtgggtggaacggtcacttcctcccgttgcttttcctgaccttgtaaggaaagactgcctgacccgcgtctcctccatccagccctgagccctggtacaattgtttccttgtctagatctgccttctggaagcggtcccctgaggacagagactatgccagtgaatattcccagcacagcacttcccacacagaagcccttcaaacagtatttgttagaggatgagttttgtcatttggaaactgatgtgatgaactgtatgaatagatttcctgatattaaacaatctccacattcctaggataagccctagatgatcacggtagaagtttctctttatacattattcaattaaactcttaatgccttgggatttttacttctatttttagaagtgagacaggtctgtactttgtcctgacgggctacctttggcatctttgggtataagggtcccattgactacgaaagacacattgggtagatttcagaatacatgagtttacagggtattgtattagtcttgcctgataaatgcttgcaaatgagtatgaatgcactggcaaaactttggaaaaggtgaagaacttgagttccctccatggttatgggacttatggcatattctccattttttggagtcagctttgaaatattcacatcccaggaaatcctcaatttccccaggatctccgtgtccctggcatagagatcctcaaattctcaccttcagggtttgactctcttctgcaaatgttctgactgtgatcacatactccttctacctacctgaggcagttaaggaaaaaaaaagaaaaagaaaaagaaaaggcttagggtcgggataatttagcatagagcctgctaaggagtaattaataaaggaggctttattccatcaagtactcaagactgggaaagagcagacacttttcaggccaaataagatccaaagctttgccagcactggtaagcaattaaccctagtcaattacaaaattcttctttttaaacaatgtaggagcaacctgggggaaaatgcaagccgccacctggcacccagaccaatcaatgggataatcttttctcccctttctagccccaggaccaggagtttcccatttttggaaacttccaaaagaggatataactctgtccatctctcatgccaaaggcttgagaattcctaaaacaccagaggatcctggccaggaagggacaggctggaaagacccggcttggggaaggccggaacagggaactccactggaggcaggcagccagccacatgggatagtccaaagatcccccccgcacctccccgcctgtgaatggagagctggaaccggattgctgggctggggcccacccccaggctctgcatctgtgtggtccaaagccccctgccacaaacctgggatagagggctcagcgagcctctctctgccctcctagccagcattcactggcagaggatgccctgcacatccctcctccactgatcatccctggacctccgaagtggccggctgcagagagcctcccaacagcttcctagtgggcagatggccctgcatgctttcctttctgccaggagaagtatctttttgtagtcacattacatatactctttctgatcttttagtttgtgccttctctctttttttctagattaaataggtcagagggttgctttttccaaagctctcttcttcattgattctatgtgtttcttccattttctaatttattgatttctgctttttctgaactatttccttatttttgctttccttaagtttttggttttgttgctgttgaaattcattcaaatgtactgagttgaaggcagggctaatgtgtgtcgaacatatcacccaaggaagaagcttttggaaaacatctgtgaatttgcctctgaatacagctttaaccacattccaaaagatttgacagtagtgctcttgtttttattagtgttccaaatagtctgtactgcagtcctaatattctctttccttgctctgttacccaggctggagcgcagtggtgtgatctcagctcactgcaacctctgcctcccgggttcaagcaattcgcccacctcagcctcccaaatagttgggactacaggcacatgccaccacacccggctaatttttgtatttttttggtagagacagggtttcaccacgttagctaggctggtctcaaactcctgacctcaagtgatctacccaccttggcctcccaaagtgctaggattacaggtgtgagcgaccatgcctggcccctagtaggttttttttttttttaatgttttcaaatgaattggatttttttaggtttataaattctgctgcccccacccctacttttaggcatttcatcagcgaagatggacaaaatcgttttagctgtataaaattcacaatattttctttatgacccaaaacacttctgtaatttttaagtgttctatgattcctcgaaaagaaggttcatctttctttttttctgtagggcaagggaaacagtgatataactactaatttagctttactcattgtgtcattcaaaaattctatgccttattagcatctaatctgtgaaaggcttttaaaagtgtattagagactctcatagttaggtttttgccaatttcccctttgttccaaggatttgttttgggatgttttgtgttctcttggggtacacgaaggcctgcaactggcatccgccctgtgggtgccttcggtcactgtggaatgaggtgcttggtgggtgtagggaagtggccccaaatctacttagtattcctgggatcccttctgccaccggagtccttcgtcatcatttttacatcgtgtgccttataagttgtatgcagtttgattttattttttgagactgagattctctttgaacagagttcaacttttatataattatctgatgtatttgatcctattatgatttgattttctatgcacagccagaccacaggctcgaattctgctgtctgggtaagaagcctgactcctcgggtgctggatggccctggctgcttacctgggcatgtcactaagtcacattaagcctcggtgttcttatctgtgaaatgggcagagtcacagtgtgcacccctccatctgccctgtagattaagggcattcatccatacaaagtgcttcccacacggctggtacaggcactttgcagtctacacgggccgtaccgtggggctcctctcttcctctgtctgcacagcatcccgtgttgccatcccaggtcactgtccctggcggctacacacccatgcacaccgccaggaaaggacgtcccaggtttggctgcaagaggaagtgggacgggcaagagagcccagctgggacagcagccgaggccagaggagaggaggccacagatttaatacgggggcagaagtccaagggagggtcgtgttaaccacgtgtttctgatgctttgacatccgagccttgctgactctggagggactgccccgctaagtggtaaccaatctttagagacaggaaacaactcatccatgagcacatttttcagatacaaaccaaccaatccagcgcccatgtccccagccacctcctttatcagacttcacactctgagccactatccccctgccctcattacccagaaaactaactcaggaccgctccactccccagagcccactggaattattcaaactggccaaccttaagccagctcaccctgtccccatcggtccttcctgcagaaacaacatggactcaggctgctgtttacccaattccctctgcctcctgaccacccctggtgcctccctgtgtggcccccgtggcctggtatgtctcttcctcttgggatctgggagtaacagactcttttcagtgaacaatagtaatggccacattttaaaacaaggggtgaaagggagcagggatcttgtttcttataggaacctcaggggagccagggagaggcagggtggttctggcaaacgcacacactctccaaggaggcccatgcctcactcccaggcccctcactccgagggggtggaggcaggcccggctggccacagtgcactcacctttccatagctcaggaggatgatccgcaccaggaccacgttgatgtgggcacccaaggactcgtcatggtagatttcattgacctgaaagaaacagggaggcatcagcgggaaccacaggccctaggactggctctggctctgccaatgggatgacccccacctgctccttcttcttcccatgctttccacccaggcgtcaccatcaactaggagccaccttgtgacccctccctcattgccccctgccctctgcctctccaggctgccaccaccacctgctgggatcactgtagccccttcctgagcaaccccacccaccagcccagggtttcctcacctggggcctgaacatggaacgtgggcagggaaagcagccctacgcttgctgtagcctccagctgaaacacaaccttcccttcaacagtgaacgtgggtgatggacccccgcggcacaggcagggctgggaccggccctggcagaagtcactccaagctatagctggtgggtgtggggattacctacctgcatcgctacttggaaatgggggcggttctaggcccaccaccaggtataatgttttaacgtgttaataaaaagctcatattactgcatccccaatgtgctctccctgttctgttttgatggctggagctcctgcagtcgccgtctctgtatttatcacaatcatattcttacacgtgtttcattcttcacatttaaaaccattattctgagcaggtgccaatgggcttcagcagatatcaaagggacccgtggcacaaaaacaggggggtgaactccccttctacagaacacagccagcaagaccctccagaaacataggtcaggttatcccgggctcgaggctgtcaggggcttccttcgcactgagcccccaccctccagcttcccaccgcacacacccagggccctccctagcgcagcccccttcctgtcacctcctttgttggttaaccaaaccctactcctcctcgaggccagctcagcagtcacttccccctggaaggccccccgcaggcctgagccgcccctcatcaagcacaaggtgtgttatttctggagccctctgtgtgcccctgtgggctgggcagccacctgcatcctccctgcttgcatgcccagagccaggctaagcagcacctggcaggcactcagggatacccgctgaaaggctgaagccattggcaccatcaagaagtggagaaacagggactggctgtgtgcagaccgagcccaggggctgctgacagctccggacatggccaagacatacttcccggagcctgctgccacgtcaggccagcacacactccctgcactccaatctgtagagcctgcatctgagcaacagtgattgctacctcaaaacagtgggaaggcacctcaggaaacccgagggttcacaaggagaatgacatcatgatggatgggtggacaggcatacagggcgtgcaagacaaggatcccgaggcccgctggcatcggtgctgggaacaaagatggcaccgatcgtggggcagagttcatgacatgtggaccctgctgagggtaccatccagcccaaacgcagctcctcttggcaactgctgcccagcaaatctacatctgattgtaaatgggctccccacaactcccacctctctttcctataggcaagggacaactcatcagacccacgggagcgtggctggtcaccgtggctccgggctgtaggcgtctggggagggtgggtcagcaacccctgtaggcgctgagggttatcctctagacccccagtgacccatctcgcccctgtggctgacaagatggagctccgaggagggcacccaggtccccaggaagccttgccatttggtcatcgccctccgtttcctctgtaaaatgaggattgcagtccccccatcacaaagctgttgtggggatgaaaccgtcatgcaggtgcaatggaatggtgcttgtgcaaacaatgaaacggtttttcattgctggtaaaccatagtgccctgcagctccctgtgaggtcctgggggtagggtatgcacccctaaaccacagaagtccttgcccagctttgagggtcagactagattgtttagtccacgctggcacagtagccttaaaagccagtttttcttaagagagaaggggtttctgtaattgtccacagtattgctttctctatcacgacaaagcttggccagcttggctcatggagtctgaccgagggaaggtcccactgcagctgaagggagcagaataggagagaggagaaaggccagggatgaggggccaggcttctcctcatcctcaaccccaacctcacaggtcatacagaacagtcctgacatctgagaaggaaggaaatgcaaaagagcttgatcctggctgctgcctgggacctgagaggggacaggttcctagcagtaggagtggcttccagggcccaactggtggcccagcctgctcaggcctgagagggtggcccagctcccagctgtgtgtagcagatgccagggtcccctgcaccccagagacacatgggcaagatagttggggactggcttgcaggtttacctggctctagggggcaccaccaggcttcagggcaagcccaggggggcactggcctacaggagaggagggcaggcctgcttgcaaggctactgcagaggggactcatccctactgccccccaccaggcctctgcctgcaaatggggcttttgggaggtaattaggggtagatgagttcatgggggtgggaccctcatgatagggttagtgtcctataggaacagacaccagagagcctgcatcctctctctctgccgtgggaggacccagcaagaaggcggctgtctgcaaaccaggaagagaatcctcactggggaatgacccagctggcaacatgatcttgaaattcccagtcttcagaactgtgggaaatgaattcctgtgatttaaacccctgggtctatggcattttgttataccagcccaagcggaatgagacaaaggctttatggggaagagactgagccacctcccacaggccagactgcagccttccttctatcctggggctgagtgcccgagatgagggcagcaccagatataggaacgaaagaaagccctggccaggcgcagtggctcacgcctgcaatcccagcactttgggaggccaaggcggtggatcacctgaagtcagaagttcaagaccagcctggccaacacggtgaaaccctctctctactaaaaatacaaaattagccaggcatggtggcgagcgcttgtaatcccagctgctcaggaggctgaggcaggagaatcacttgaacccaggaggcggaggttgcagtgagccgagatcgcgtcattgcactccagcctgggagacagagcaagactctgtctaaaaaaaaaaaaaaaaaaaaaagaatgaaagaaagttgcatttttccccacgtttgagcctaagcgtgtaaatgttgacctcaccgtccacacagaccctcagcacagccacgggcccctcacaggctctcaatgggacttctcaaactaaactgaccctggcctcttgtgcagcccaccacaccctgggacccagaatggcctgggcgagcctgacctggtctctccttccccactgggctgaggctggcacccagcagacccagcagaaccactgcctcaccatgaattgtggctctgagtagatcagagccagccctcctgccaggaggcggagagggacactcagatgctacgagaccagctccaggatcaccggcctcgagggaaaggcagggaaccagaggatatattagtgggaatctgcccactggggcctggaaggacgtggcatgtcatgagacctgagaaacagaacagggtagctcagcaaagcagggatggcgctcctggcagaggaggcagcccatgcaaacctcccagggttggaagcagcgaggcaccttccaagcacagaggggatgtggaagggatgccccagcagaggaggtgggaggggagcactgaggccagaccacgaagtcaggagaaggattccaaatcctctctaagagcagtgggaggacatggaggaaggatgatggcggggcatttaagaagcttactccaggtgccttacggaaagtagatggaaggggtcaagatgtgggaatgtggggttcagctttggggatgagtgcagagaagggacggatgtgagggatgatgtggattggaataggggtcatctgccccgcctgagcagggagaggctggggctctggaagggcattccggcagctcccacagggcggagggaggagatgcggggctggccctctcctggctcctggccaggccctgcccctcaggacgcaagatcttcccactctcctagccctacccctggggccgaaggtggcagctctcatctcaagaaggaatcttgtgtccttctgaacattgagcagatctaatcctgctccctgatttgggacaggaggtgaccaaccactccaaaagccccgtcgctgggcatggaactccctgggatagaccgtcagcctcacattctgcttggaggtggggtcgaggcagctgagccctggggtgtcaggctgctaggcgtgggcccctggctggggagctccactgtgggctgtccgccagcagccagctcccacctcctgcgctgggtgccctgaccctggcctctggaagcctcagatggttcggagattaactggggctccctggctgctgaggagctagagagggcatgcctgcaaatgctcccagcaggtagccagggagaaggaggccaggccgcagccaaggccccctcagccctccctccctggtagccttcaactgtggtgcgctctccctgatcctctccccaggaaacctctgtcccttcctcccttccacaccagcacagcacatagttccccaggcatgcccactctctgggaggcaggcctgagcaaggccgtggtggggcttgcgatggcctcctggctcctctgggtggctgctgggcctgggatcctgctccggagccctcaacttggccccctcccaggccaggtctcagcagcccctcccagcagtcaggaaccccatggggcactgtggcccagagaccactgaccactggcctgggtggttctcctgcccctgcgtgtgctatggcaaagtccaacccacagtccggggccgggctccttctgctgtccagcctctcagtccccgtaggttaatatgatacatcaggaacagacatggggggcaggcagggtttgtggggcatgtgagaggcaggggtgctccacagtgtccttgtcctccgtgggcctgaggagtgagccccgtcctgccccctctaccatcccagggctctacctgcttttcaggaggctgcaaaattgccaaaatttcctgcccagccctggccagaggcctgcagggcccacctgggcatgggaaccactgggagtaatcagtgtaattcccgacaaaacactggcgtcctcagtaaggacacagcggcaacatttctgcagagcagagagtcgactgatgtggcaaaaagagcaactgaagacagaaggcgacctccacatgcctgcctcctgcacatccccctcctcccccggccccacccactttctctgccagacaggagacaggcggtagggctccccaacggtccccctcgtgtcctccccacccccccacccacacacaccattcttcactacgatcaccaagcggaatagatctcaccttccccttccactgtctaaaaccctcaacggctctccagtgccttcggaagcagggcccagcccctcgcctggcattcggagccctctccacgctggccctggctggcttctccatgcgtcacttcagatacctccccacatggcacccttgctcctgacagcccagccagccttccccagagccggctgccctctcctgctgcctgtgctttggttcaggcctggaatcctcactctccctgtgcagcccctcaattctttagatatctcaggagcatttgaaaaaaaagactcatcctaaaaaatatatctcaaaggaaagaggcagtgacctccttgcttaaacccttcctaccccaaggcatgagaccgcagttcctggcgtgacctccaggccaggagggtctggccctgctgagtcttctcgggctgccctggccctgctccctgtgctccagcggctagcccggctgctccttgcacaggcagcctgtctccacctcaggaactttggacttgccgtgcaactgctcccagcagtgtctagcccatagtaggtgctcagtaaacatttgctgaatgaatggagtgaatcactttgaagatatggaataacaggaaatgggcaaaatgtatgacccagcgtaggcctgtgacccctctcatggggaggcccccagctaagggcctcccctcccctccccccagcagccctgggggcctcctccgcatccaccctacccaaggcctgcgtgtgctggggagaagcagctctcctttcccaggttgcagggggaggggaagcccagggacaatgtccttgagtactgtctgagaaattgatcctggaatctttaaaccttggggggaaatgttcaaagccgcagccatctctgtgcggagagaggccaagggctctcttgtttggggaaacacattgtaatgcgccttttgcttatgcaaagatgcagccaagtttctgttctggaatagacaatgaggaaggagcggctctgcatggcaatgtaaagtttgcctcactggtggcagagttccacccaggggatggtgagccctgggaggtggcctgcggctgctgggcagaggtgactttgtcctctgccaaggtgggggaggggtgcagaaaggggggaaccggtgcaggctccctactggggaggcctactggcctgccagccacagaggagacaggcaggggccctggaacagcagccaccccaaccttcaggaaagttcccatgtccttcgctcagctgagctttgggccaccagaggcagcctgtggcccacctggcaaaaccatgtccaggagcaagccaggcctgaaaagtctgtcagaggcctgggggaggggggcctgctgctctgtggcttctctgggaccccctgaaataagtgaggagaaggctgttctctctgtgccccttcggaggccaggcttggaccaccaggatggaggcagagaagagagtgcagccaggagcaggggacagaggtctgctggcctccgtggaggaagagtttaggcattgcatggtgcctaaacggggctgccagagcctgggcttatcatgagaatcaacgttcccattgcagatcttcttcaccctcggctcctcagcagatgcttcagagggaatgctagaagaaacgtgactcttgctcaaaatatcaaactaccatgaaacggaaatggccaggatcagaattactaggctcagttcatacatcaaaaagtgaggtggtcagagtcccctccttcaatacccagcgcaggaacactctgcccaaggccaccccctcactcctcaggcgacgtctcctgtgcctgtccacactctgctgatacctctgcagatgcctcagggtggggacggggctcctccacttccaggccagctcatcaatgcacagagcccagcagggtctcaagagatgtgctgcacccctcagtgtggcactccagcaggcacgttgagaagacaggtcgcattacaaaccttcccgggtttgtactaacgacggcaagaggctgcccctccccctctcctgaatttggggggttagcagagtgtgggggggatattcccactctgaggtcagatttcatgggtgccagcatgggctctgccacaatcctgctgcgtgacttggggccagttacttaacctgtctgggcctcagtttctttatctataaaatggagataataatagtccctgtgtctcagggttgtttcaggttgaagcaacaatgaaaattatcacgtgcgtccatgtgaagagatcaccaaacaggctttgtgtgagcaataaagctttttaatcacctgggtgcaggtgggctgagtccaaaaagagagtcagcaaagggtggtgggactaccattcgttggtataggtttgggatagacggtggagttaggagcaatttttttttttttttgagacggagtctctctctgttgcccaggttggagtgcagtggcatgatctcagctcactgccagctccacctcccaggttcatgccattctcttgcctcagcctcccgagtagctggggctacaggcgcccgccagtgcgcctggttttttttttttttttttttttttttttagtagaggcagggtttcacaatgttagccaggatggtcttgatctcctgacttcatgatctgcccgcctcggcctcccaaagtgctgggattacaggcgtgagccaccgcgcccggccaggagcaattttttgtgggctggggacggattttacaaagtacattctcaagggcggaagaatattacaaaatatcttcttaaggtagggggggacaatattacaaagtatcttcttaaggatgggggtggggaagaatattactaagtatcttcttaagttggggggagagaatattacaaagtatcttctcaagggtggggagggtgtatcatacaaagtagattcacaagggcgggtccggcgggggcgggtggcaatatcacaaagtacattaccccaagggcggagagggtgtattgttcacaaattcaattgattgatcagctagggtggggcaggaacagatcacaatggtggaatgccatcagttaaggcaggaactatctattttcacttcttttgtggatcttcagttgtttcaggccatctggatgtatatgtgcaggtcacaggggatatgatggcttagcttgggctcagaggcctgacattcctgtcttcttatattaataagaaaaacaaaatgaaatagtggtgaagtgttggggtggtgaaaatttttgggggtgatatggagagataatgggtgatgcttctcagggctgcttcgagcaggattaggggcagcatggaaacctagagtgggagagattaagctgaaggaagattttggggtaacaggtgatattatggggttgttagaaggagcatttgtcgtatagaatgattggtgatggcctggatgcagtttggtatgaattgagaaactaaacggaagacacagcgtccgaataaaaggagaaaaacaggtattaaaggactaagaattgggaggacccaggacatccaattagagagtgcccaagggggttcagcataattatttgcttggttggcgagtttttgggctctatccttgagtttatgttgtcatacaccaggccagactgatttaggtaaaaacaacacctaggtgattcaaaagctttattgctcacacaaagcctggtggtggtctcttcacacggacatgcgtgacaaaagtgaaatccccagcacctagtacaggctgaatgaaactgtcatcaaattacaggagggtccaacagcccaagctgtttccctgggaccccatgcacagaatggtccacctgggcttcgcccttacacccaccctggctctcctcctggccatcaccatcgggagaggtctgagtgaacagcttgcacatgcccctgtgttttccagagctggaggggctgctgtgcccaggcacgtccgcgagtgtgacccagccctggagctctccccgctggctgcgtcgcctttggggaaacaacagccatgccaccacttagggactgaccttcccacccgctgaccggatgcctcatcagaaagggaaatgctgcagaacggggaaggaccagtgctgctgaggctgcaggacgcagaaggacacggccgaggcctcaggccagagcccagtgtcccccaggggcctctcggccactgcgagccactgacagggaaaggccgagaaaagtcagggattctaattcttgctagcagtggctgcaggacggccctgcctccctggaactctgctgagcttgtcggctgtccctggccacagagccctggggggctcagtgaggagtttcctttcaaagaggggccctaagtggccagggctcgtgccacccccggccctggcatccccccacacgcccgtctcagaggctgtgtggcccggcccatcccgtgactgagctcggtcacctgggtccgtttgagcaccaccatgtaatttgagaacaatgcatttttattcccccacacatcatattctgccgctgctctgtcaccagtgtgacctaaggaaagagggaaggaaaatgccgctatgggaggagagagctgtggcatcaggggacaggaacggtgtgggggagggggcagcaagcagctgccggggtggggggcgggctgctgagcccacaccaggcttggagccggagccctatccctaccgctgcccccgccttagggtgagatgcagatagtccccggggttctgggctccacttcccactgagatgagaccctctgctgagggtggaggccaacccacatggtggccaagcaggtggttagaatggagagggatctcatgttaatgaatgggcctcaggcagcacatggatgcccctcgctccagaagggggtgtgtgggatgcagcagctcctgctggcgagggccagggcgtgggtagctggcactggctggcagaggctgtagagtggacacccatcaaggcatagggcttggactgggcaggggtccagcatgcctaagtggcccaggcgtcagacccgaccacctcagagcaaagctgaggaggactcaggccagcctccctactccccaggcatccatgcatgatgaggaagaagggagaggccctggcagagcaggtatgaacccctcagagactgagaaggcatgacagagggctgcaggccatcaccttgcactgtgcccctcgacctgggcaggggcccccaaggcactcagagcgcagggcaagagtaaggtgaaggctgcaagaagggtcctgcattacaagctcacggcaagggtcgtctgctgccagcgtatccctccctgaaagcgcagtcatgcagggtgctttccaacacccagagcagatgttccagcgcctcttgggcttggcgggaaacggctttgcccttctgtgcagcaggtcacaatccccctgcaccaccagagtctgtttatgtggcttagctcccttgccagactctggcagatggaaagatagatgaaatcctgcccaccgctacacaggaaacccagaaccaaaggaagaggggccgaattattggaagcacaagggtccgtgatcacttctgctcaggatcagaagggccagcatgggcagcccccaggccaggctccctgccaggcgcgggtgggaggtcttgcaggctgcagccaggtttccttcctcctgtctggctgcagggaagtttcccttgctctgaagtttcctcactctgtgaacattcccacggggcaccctatgctgcctcgggtgctgtcccatcctggtaacttcctggcaccatcgtgatctccagtcgccttcgtttgttagctgtctgtccgtctccactaggcagggactgttctgcattcttgctgatgcaacctgggtgctcagtactcccgtgtttccccaggcttcaggaccaaggccaagctcagccgcacgcgccttctcccaccccagcgggctcccagggtggccgagggctggcacctcttttgcacaaggggctcctctgtgtggaatgatgccctcccactttccacttgggagacaccaactctgtgaccaaaaccagctcaaggatcaccccactgtgactatctccactaccaggtggagacagctgaccgtctcctttggctgccaaggccctgtcctcgctgtgccaaggcaagcaggtggcccccatgagaaaaaagcttgtccaggacgggagctggctggggctcttcccagacatcatgggccgagtgaacaactgctcgcctcgctggtcggctctgatcttctccgcctacgccgagtacttccccgcgtgcgatatctttcccttcccacaccctgcgagtgagtgttatccccgctgtgccagtgaggaagccgaggcacagagagattgagaggctcacataagtgggcatgggagtcagtacagaggctctgaggagcaatttggcaaacctgctgcaactagaaactgtatcccgggacctggccattcagacgtcagcatggacgatggagacacagcctctgtcatagaagcgaaggcataaggacacccagccacgaggagttccacacccacagatagagttcatttttatgggagtctctgagatcacagtcgctttatgggaattcatttagtcacttattcattcaaaagagatttactgagcacctactacgtgccaggccttttccaggtactcagtgaaaaatcaggtgggcagaccctctctgggtccgatacaaagtcacctttgtgggagtccctaaccctgctgagacacaccaccaaggagacccctggactggggaggaagacccaggattgcttgactgcaactcagctccaggggcagcctgggaggggcctcagggagtgagagcccacgccaggtcagcccgacagcccggcgtggcacatcatcgcctctgttcttgtggttcagctgtcacctccttgctggagcctgcacaagacaagctccgaggctgcctcaagctgtcatccgggtgtgtggatggctggccctcctcgtccacagggactctaactcccattctgacaaccatcagttccccgcgggaggccaaggacaggatgctgggaggcttccacatcagctatcaggaggtctgcggaggagggaggagggaggaggtggggagatgtccactggtggggagggtgctgcacatttcaggaggaagcagaggtgagatccacccacaagacccctgttcgagtgttccccacctgctcaccatcactggtctgtcggcctccccagccctgctggaacatgtgctccctgcggtctggatcccgtgctcaccacgacatccccagcacctagggctgctctatccgggtgcactaagggagtgagtgggcaggcgggtgggcctcagaacaggaggacacagtagatctatgcagaagccaaggcaaagcaagaggcagagcggatggcctgcggggagaggcgggtgtggccaggggactccaaatgctgtggggaggtcagtgaggcctgagatgagaacccgcggagcatgctaggggatttgggagctctcgatcttcaggccagacagtaggggaggaccagcacaggggccaccttcccacaggtatgtgactccatctgccgtgctctggccatgtctctctcagtctcagtgacctgatgcaggcaagggaacctcacagggccactggggcaaggtagtgaggtcacaggtgtgcctccttgcacagggccagcacgtgcaaaaccagcaaatgtgagttcccctcctcaggtggggaggggtgtttccaaggatagaaagcataagccccaaacctcctaagagagaggagtctatctttgtagaccacaaatcaacctcgctcccgctctccaagccccacaagctccagcagggcccaatctgcgcactgcgattcacgatgcggccaggcctttgcgcgcgctgtgccaccaccaggagtcctcattagaggcaactgcggtggcccttgtccgaggagccttccctgaccagccgccccaggcacccttccctgatgaaccaaggtgtaatcacgtgtcctgatcccgctccccatactcctgtgctctgagctcccccagtgcagggatgcggaggccaggagtccagggagtgccgaacatgactgaggacagctcccaatcccagcatgctcctcccacacccgtgctctactgagcactttcctggtgttcaactcgagtggtgctcccaacagccccgggagttggcactgaccagcacagggcgcagcaggacaggcagtcgcctccttccttctaggctggaaagaacactcaggccacccacacaccagacttgtcctgcagccgtgttctgcttcacctgtgcagtgtggcttcttaatttcaatctgtggcccacattgaaaaataattagatttcccaaaaaaagtagatttccagcttctcatggaagagcgagctggcagcagtggtctgcttattcctacagaaacacaagcgagtggaaccacgaggagctctgcaggggggcgtggcctctccggtcgcccgagtccccaccactcccaacagccttcagccacctgggcccctcgggcctggctactgtgagcacgtgagggcactgccctcttctgagccttgcgtgcagcctcgcacacaccactggccctcatggctgtgtctcctggtggcacacagggccaggctgtaaggccagcgggacaagcgtgaggaacagaaacagtgccagcaacacccccagggccacagcaccactagcagaccctgaaccccgcttgcctccccccacttaagggacccgtgtttcgtgtccagtttcagagatgttcttctctttcccaggaaccagagccagcgactcgtgaactatgacttggggcgacgccttccgcctggctggtttgcatctctgcggccagtttacgagatttccaccacgaccagctgaaaacactcctgtccgaccactgccttccccaccgccaccatgcggtctcagcactcgtgaaagttggtgagaaattgagcccatatgccttcggattgtttgcaaaccctggcaaggctctggtaagtccaggccaatttctggattaaattagaaatgaaaagaggaaaaatatctgaatcctggcatagagagaaatcattcattcaaaaaaaacggtcgtagaacatactgtacagagaatgttctcgtgctgggaggggtcaaaggttatagccgcgactgaaggcgcagaagatccttggattccacgttctccataggcctaggagcgtgtctgccctcagcagaagagatgctttgggggctcaggcattctcccagaacataagcagttaacacagctgggagagactattctgcatgcccggaaacctgctcctcctgctctgccgttctacagcggttaagagcagttcattctatcctttaaaaagaatccccgaagtagcctcaccggtcctttgagctgataaggctagtgtgggggtgggctggggtctgagcagcccactgtgctcagtacttccctaatacgtacacccacgtgcactgatgtagtgaaaggcacatgctcactttggaggcctggggccatcacagctcaaggcaggcactaagcaagtacatttctgcacagcctggtagcaaaaattcctttagcacctcatagtgaatgttctcagctttgtgggccatatggtttctgttgcaactacccaacccactgttgtagcacaaaaatggccacaggcaattcataaatcaataggcgtggctgtgttccaataaaactttatttacaaaaacaggtgaagggccaggtggccctggggccagagtttgccaacacagctttagaatctccagtttaccttgacaaattcacgtgaattttgctttcatgcaagtaatacgtccaaatttactttaatgtaaaactgatgttttaaaatgcttaccatccaaaaaaggggccacttcagggggagatgccttacatctgtctggtggcctctggcaggcctgagagtacgtgttcctggtagcaataggttgagcgctggccttgctgcaggctgggtatcacccactgcaatggtctgcctcctgtctacaaggagtgcggtgggaccaggggctcacaaagacagttcaaggtctttgtagatcctgatatttaagcaacacattgaggccttaggcttctcgggaagagtaggattgaaattagcgctttagtgaaatgcttgaagccacaaaggaagcttcagccttgggcccaagctttatatttcttgaagtcttggcacagatagattttacttttaaaaatgtatctgtagccaggcgtggtggctcgtgcctgtgatcccagctactcaggaagctgagacagcaggatcacttaagcccaggtgattgagtccaccatgcagcatagcatgaacctgtctctaaaacaaatctttaaaaaatgagtcaggcatggtggtgtgtgcctgtagtcccagctgcttgggaggctgaagtttgaggctgcagtgagctatgattgcagcactacgctccagcctgggtgactgagtgagaccctgtctcaaaaaagaaaaaaatgcatatataaacatattacttccacaacggctctgatcttccaaggcattcatccctgcctcccatttacctgagcctgcagaagagtccctgtctgtacctggggacgaaacttgaggtgccacacacatctgagctgcctcctagcatggcagcctcgcctgtcaggcccaagcccactctttaggggtgcccaggcccacacacatggccacagcatctggtttgtgagcagagactagcccaggcgctggcagagcaagtttttgaaaatgtgagaaataccaaagccccagggtcagtatcaggcatgttcagcaatgtcacctgtgtcccagcctggcagcacccagtacttcagggagtatgtttcccaagcaggaaaggtcaaacatgacagtggtctcccaatgccctcgggggcggggggcgggcctgggcagaggagagccccttatcctcccggctgggcccaggggaggcagcaacgcaaggtggaggctgcaggctgagccagagtagaaagctgggaggagcaggagcagaatgaaggcagagggaatagaagtcactctgccagtgacggggctggggggccagcaaagctggatgggccacacatctgcccacggctctcactccatcctcctagcctcacagtgcttggaagggagacccctctgcccttagacgggggaatgtgggcatccccaaggggcctcagcatctctgaccaggctaagggccgctgagcctcaggagaccagactcatcccagggttgccagcagccaggagggctacagctgcgtgtgctcaaactccagtgtaggccgggagcagtggctcatgcctgtgatcccagcactttgggaggctgaggcgggtggatcacctgaggtcaagagttctagaccagcctggccaacatggtgaaaccccgtctctactaaaaatataaaaattagccaggcatggcggcacgtgccagtagtcccaggtacttgggaggctgaggcaggagaattgcttgaacctgagaggtggcggttgcagtgagccgagatcatgccattgcactccagcccgggcgacagagcaagactctatctcaaggaaaaaaaaaaaaaaacaaaactcactgcagagagcctctgtggacaagggcccgccccctgcctgccacaggctcagcacacacccagtgccctcttagcacggctggcttcgcctgggcctcagaggtgtgtggacatgcccaagcagaggctggggaaaggccacagagaacgggagtctgaggtggcatccagggggcacatgcagggcagcaggtgttccctcaggctatggggtctgagcgcagggctcaggtttctgggctcgccctagggacaggctgacttcatagatgaccagggcctatcctcagaaggccccgaccttggggcttgaccctctgcagctctgtcttgaagttcttcgtcatctcacccttgcatgtgtgttttgtaagtgaaggctcctggggcaatgcagcatggtcccatctccccaggacaggctttcagctgcccccagcaggggcaggatcaggcatgtattccccacggcatctcagggcaggcgtggtggtggccatcccgcccacggctggcaggaaaggggcatgtctggtggatggctggccagagcccgtgtttcggcagaggtgaacctcccgtgagtgacacctgcatagagatgggattggccgtggccatacgctctgggctggagcagtgcaccagtaggaagggggcgtgcctggctctacttccccagacgccctggccagggcacagccaatgtgttcttccaggggtggcaggaagctctcagaccccagtgggtgtgcccttcctgctgggggtgcactcactctgctaggaccccgtacctgaggagcctcccctcggcaggattccactctgtgaaatcctctcttcttcctcccagcctccctgagtctggctgtgcctgtcataaacttctggtcagcctgaggcacccatcagggatcagccacaaaatacacatttgtttaatttcagtgaccccacatagaagctaaatgctctaatatttgcatttaaaatagccatcgcacaatttaaagatgaataagaaattcatgctaataattcaaggttccaatttttgttcacttagaacaatattaaaaagcaaataaaaagaacagcgagttgagagacagagagacagagactaaggaagaaaggaagtggcttaatagtccctttgtatggcaccttcctctgctctttgaacaagcgatcccacattttcattgtgcgttggggcctgggagttactactggctctgcctttaggccagtgttccccactggtaatatcctgacgagttttgcagcagccagatattgaggggaaataagaatgcattgcatgtaatacattggctcctttgaattctctatctccccgccacacctttctttccttttttttttttttttttttttgagagagaatctcactctgtcgcccagactggagtgcagtggcgtcacctcagctcaccgcaacctccgcctcccaggttcaagccattctcctgcctcagcctcccgagtagctgggattacaggcacgtgccaccacactcggcttatttttgtatttttagtagagatgaggttttgtcatgttggccaggctcgtctcgaactcttgacctcaagtgatccgcccgccttggcctcccaaagtcctaggattacaggtgtgagccactgcactaagcctatctttcctcttactttgggagaaattcaggtggagggctgctatggctaaacccaagaacagtcagcggttggtgaggaactggagcttgggaagtacagctgccaagtagggcagaaactcagaagattaacttctggggagggcaggaggcatcaaacacatcacccaagggagaagcttttcccctgggaagggaaagactgcaggatctttccctgtggtcacacacacaaaaatgtaggacatcaaaaactatcccaggcggaataaaacaaaaggtcaacaacaggactgggggaaatatttcccacacatgtgacagacaaaaagtttatctacttaagtacacagactcttcagatgaataaaacacccccaaatcccagcagaatcaagggcatgaataggccaagcaaaaaaataaaataatctctgtttacaaatacacgtatatttttaaatgcaggctcattaacatcaaggaaataacaacttacaacaaaaaaacttatctccgttgtaattaaattaccactgctcaaaaggactcagtggtgtgaggaggtggggagacagtcatttgctcaatgaagcgggaatagatgaaaccataacagagaacattccagtgtagaaagcttaaaaaatgggcatatctgttggccagagacttcgctttcagcaactcagcttaaggaaataagtaagcacgagcgatagattcaactctatgaacgtgatacagttagtggcatgtctgacctctaatggagaaataagttttgctatgtgaatatgtcatataaataataagttaggtaaaaagtgtgtgacagtcatatggtgcgatgttatgcaatcattaaaacaacgtagtagacaattaactgctgggagaagacattcacatacctacaggaatttatgctaattttacatagcaaaaaaaatgtcccggcacggtggctcacgcctgtaatcccagcactttggaaggccaaggtgggtggtcacctgaggtcaggagttcaagaccagcctggccaacatggtgaaaccactgtctttactaaaaatacaaaaaaaaaaaaaaaaaaaaattagacggccgtggtggtgcatgcctgtaatcccagctactcaggaggctgaggcaggagaatcgtttgaactcgggaggaagaggttgcagtgagccaagatcacaccactgtactccagcctgggcgacagagtgagactctgtctcacaataaataaataaataaaataaatcatctgtgttaaatatggactatttcaataaaccaaaaaacatgcttttctagatgtaaggaggaagataagaaaactggacccagcaggggctgctggagtgggcaggtgggtggttgcctaaaccaaagagcccctttctgtgcccaggtggcctcatgaagtgctccatttccaagccgcttcccttctggcaagtctgagatgaaaagggcagcttcatctttcccatagaaaagggaatatcacgtcttgtctttaacatagacaggaagcagcccctccagtgatttccactgctcccggagccacaggcggctcccctccacctctggaagactgcggcggccggccttgccggccccgacttcccctacctgtgccccctgcttgacaggccaggctgcctccattcttccagccggccccattcctgcctcagggccttggcgccgcctgccccctcccccaaacctggaacaggcgatccctatcctacctcttcccacatccttccgttgtcgtgagcctctgctcccgtgatatctccagtgcaccagcccctgagctgtagaaagtggcctgccttcccctacccttcttccttctccatctcctaactattttatttctttcattgcatttgtcattatttgaaatgatcctgtttgtttttcacttcagtatcgtctgtgcctcccttcccagaatgcaaggtagcagggttacgtcctgtcatgctcacagctgcaccccttgcctgacatataatagacgccccataaacaccggcccccgtatgaacggcagccaggggcaccagacagaggaggatggctatgccgagaatccaccccatctcagcagctgaacacaatacaccgcacaccgtgtttccttactcacaccatggcgcggggtgggtcgggagggcccgagcctatgttgcagctgtacctactgggacacatggcttccaaggtttccgtggcaggggagacagagatggaggggactccaagctcttaccagccttggtccacaggtgacccaggtcacttcctttcacacaggccactaggcaaaactggccatgcagctccacaccagctacaagggagactggggaggggagcacaggggtgatcgatgaggctgaactgcctgtgccacccctggaccccatatcccagcccaggctctgccacaaagagatcccaaagggagctctgcaggcagaagtcaccccaaatgatgagggaaactgaggcagtgcagggctgccagggtggagctgtgcctgcactcagcctgccaccacctcacctcctcctcagagcctgcattccctgggtccccaccatcagggcccccaccagctcctcctcccagggctcgacggcctttcccagggcacaggctgtgccaccattctctgcatccagttcagtgggcagctcattgcccagggctggcccccagaccccgggctctggatgtgccgttgcccagccccacctgctctacagctccagacaaacacctcactgggagcccagtcccagccggctgctgccacgtctgtccttccatgcttttgctttcgctccagccacggggagccctgtgaccagctgggacttacaagaggagtgtgacaagccactggccaggccttagagggccacttggggttgtggttcgaggcccccatagcacccaagttcagagacagggcacggtaggcagatcctctgtgcacaggcccaaccctgccctgttcagcacagcagctgccagccacactgcggcttccatccaggtgaaaattaatccaaacaaagtactcttcggggtggctaccgtaaaaaagaaaaaaaagacaagagttggtgacaatttggagagactagaatccctgtacactgttggtggggggcaaaatggcacagccactgtgggaaacagcgtggaaactcctcaaaaaattaaagaaagaattaccctgtgtcccgcaattctacttatgggcatatagtcaagagaacggaaaacagagtctggaacacccacgttcacggcagcactattcacagtagcccatgagggggccaccggagtgcccatggatggctggataaacaaaatgtggccgatccacccacacacgggatactggtcctccctgaaaaggaaggacattcttacacatgctgcaatgtggatggccccgaggatgtcatgctaagtgaaataagccagacacaaaaggacaattattgtttgatccacttatgcgaggtacccagagtagtcaaattctcagaaacagaaagtggagtggtgggtgccaggagtcggggggaggggaggaaagggctgaaactcaatgggcacagtttcaattttacaagatgaagagttctgtggacggtggtggcgatggtggcccagccacatgaatgtgcttacgccaccgaatcgcacgcttaaaaatggtgaagacggtgacttatgttctgtatatttcaccgcaattaaaattttttaaattaaaattctcttggaacaaataagaagttaaattaaaaattcagttcttcaaggacaccagccacacttcaagtgctccagagccccggtggctactgccccagaaagggcgagacgagcatctccccagcaccgcgggaagctctgtcgcacagcagggctctggaaggtcaccctttctcagaagctcccacttgctcaatgcccctcctccccaagaccaccaaagggtccgacatagcttagatctgtcctcaggactctccgggcatgcagaggctctcagtgaggacgcagggcattcatcgtcagggcaatgccatgctccaggcacggccgcgccttatctccctcgcccacgctgcgctcttgcagtgggagctggggctcagatcagaggcagagaccccccgctgaccctccgccgccggtctcccacgccccgggactctctgccacgccccgccgcctctgcaggacacccccactgtgcccatgacaagcacactgtcaacacgtttgctgaatgaatcagtgctcacttctgtgcaacaggggacaacagacacggcccaaatactttctcaacttctgagacttgtctcctaaaacggtttctctgttgtgataaaactcatctcaatttaagaatttttaaatttctcatgcttttctagaaacgaaccttcccattattcaaaatagggggtacggctggatcactagggtttgaataaagttggacggcaaaagtgagagaacgttctagacatcctccaaccagctgttgtgacagagagaccctgggcaccaggagaaaggttgatctgcctctgccagcctcatgaaggactcaccacgggccccacatttggtcagcgcccttggtgggctatcagaagtgacccctcctggactgtcactaaacagtgccactgtcatgataacaaaaccacattttatgtggaaactgaaaacgtgttcaccctactgagagactgaaaagcacattcactgacattatctcatgtaatcacatcaacccccacgatgaaaacactggcccattttacagatgagaaaactaaggctcagaggacgggagcagcgttcccaacgacgcgcctggaaaaggcgaggcctggagtcgccatcggactgtaattccaagcccagtcctttccccgctgggttggaaggcgacataatgctaggggaagaactcatattgtgaaggcagccaagattttatacctgccagtctcacagacctagcatgaggacttcccaagataatttagcatggcaagtgcccagcatgggcccggcacagtcacatagtaggggctcgataatgtagccattatggttttattgttattattattattattattattattatttttgagacggagtctcgctctgtcactgaggctagagtgcagtggtgcgatctcagctcactgcaagctccgcctcccaggttcacgccattctcctgcctcagcctcctgagtagctgggactacaggcgcccgccaccacgcccggctaattttttgtatttttagtagagacggggtttcaccgtggtctcgatctcctgacctcgtgatccgcccacctcggcctcccaaagtgctgggattacaggcgtgagccaccgcacccggccgttattatgattattgcattaaaggtacgtttcaaaaataagatgagggtaagtgtgacaacgctctcccaaataaaacgaattctgccgatgcagcggacttcggccccctgtacggataaggctgggctccagagggctagctgactcacccaagaccggtcaagaggaaagtgagcatgaaggtggtgtctctgtccagtgttcagctcactcacatcccctcctgcccctgaggtatcttttcaccagggccctggggactctgacccatgtgtcagcttggctcctggaggggctcacccctggtccgaaaagcagagctgggcagcagatcctgagcagacctgcacaccctgctgcctgcctctagcccggccccagaggacctcattcatccacaggtgtggacacgcagcacggggttctagaacttcccacctgcccggcttccacaccacctccagccctccctaagccccggcttcctcccacaaatacccccctgcccctagggccccactggcagcatctcacattccaggccgtgccctggtcctccttctcacccccttcttttccctgcaggactcagccaagccagtctgctcccctgggagcctgcattttgaagactggacgcccctcatccccacagtggctctgaccacatgaggcagagagaggaaaggtctgcacagcctccacccacacacggttcagcatcctggcacctcctgcttaggttgttgggggtatggaatgagggggaggtggttctttaatctcttagtgttaggcagaccatgggcaggtgcccagaagacgaaggtggcacatagacacccctttcaatagcccagactcacagggagaaaggaattccctccccaattcctcccactgcgagctttaaggaggggccctgggttggtgtctggccctcgctctaatgcacgtgaatctctactttaaacagaaaaggggcttctgtttggagcgagaagaaggcagggctatccagctggggctgaataacgtcactttatgtcttactattatattagcttttcaggtaaaataaggttgcctttttaaatgattttagttttaaaagtggcaaacatcaagaaaacatatttttcaaatgacgggacattgaatgacattgtcattcaaacgactggagtttgcacaaacccgccttagcctgtgaagagcctcaccaagttaccatcacccacgatgtgcagacgagagaactgaggtcagggatggtcaacttgtctcacctggggacccagcaagcctccctgagactgtgtcactcacctccggctaacaaggaaatcggcagagcctcaggggacctggcccagctgggcctctctggcctgcccagcccctggttgaccctccccgccccaccctgccccctcagccaccccactcacaatgttcatgagtgtcagcaggtacttctgtacgtgctccttcccgtggaactgcaccacagagtcatccacgcccagcaggacctcgatgttgtagtcatcgtccgcagcatgcctgcgtgccctccgcctcgagctgttggcgtgctcctctaggacgcccagggcgcggctgaggctgtccaggctgtccagggaggcccctgcaaggagaggacaccgtcttcagcggcagggcaaacccacccggacacaaacctaccaggcgccagcttggccatcctctcatttaaaactcatagcaccctgaaccgagggtattattccattttacagaggaaagcgaggtgcagaggaagatggcagagacttgccaagctgtctcagacacagcagggcccagacaggcacctctgtgacttccaggaccgctcgttccccagcccctggtggcaaccccagccacagcaggggccacagtggcctccacacgatggatcagacctgctgagactgtgagagacccagcccagcatcaccgtctgccttatggagcccagggctggcattcagccatggagaggtcgggaacctcagcccgcactgcctgacgctggagtgggcagagccaccccttgcccacactgcccgatgctggagtgggtagagccacctcttctcccccgaagggctgccaggtgccaaaggactggtgtcccaggtgtcatcgccagctgttatgactggggaaaccgaggcccatcctgggctgtgcatgttccccagtgtctccttgggcccctcccagaactttctgctaagtcctccactgaagcgaggccccacatctctgggccaggtcccgggccccctccccaggtgaacggtaccgcctctggcctgattgaattgtgcagagaccaagatgaacccctctgtggcagctccgctgcagtcggccctgggcaggcactgacctcctgcccccagggtgtgcccctggccacttggggctgccatcctggggagtctgccccggatatcgtccctgccttctgtgcagtgctgtctctgctgtgttctgtgtcctgcgggcctggagaccaccctggaccaggcttcagttcccagccctccactgcccgtctgaaggccacagcaaggctggccaggctgacctgcagcatcgatggcagccccagaccacactgcccaccgccccccaagccccagtgtcctggaagccccctttcccttgcactggtctctgtgtctaagccaggtcccagccccagggtctccatggcattccccaggcaggtcctcagagactcctggcccgggacagacccagggctgcaggtcatcgtgacatcactgacccacagggcggtggccaggccccgaggcccctgcagctgagggagaccagcgtccctgctgcaccacctctctacaaagagtcttccagaacaacacttttcacccccaacgcctctctcctgctgcctcttccaggcagggacaggcactccctccctgtgagggtggcccaggacaggccctggaggcagaacaaggcccctgcaggcggcacggccactcggacagtgaggcagcctggtaccaggccctcatcccggcacacgcttcctcacccagtgctgacagcaggccactcggtggacgtggccatttccgttttacagatggggagacccatggcatcccagcatggccgactctcggccagaagctctctccttgcaccctgcagcctggctcagacaagacagactgaacatgaagtttcaggcacaaacctgcagcccggctgtgggcaagaccaagacagacagtggaggtgcgaggcggagggtgagggctgggaaagagaagaggagtaagtggggccagggctgagcagctgctggggttccagtaccttcgggggtccttgtgccacccccagctccacagttctgtgtcccctcggcgcacacacacatgcacacacacacacatgcacacacatgtacacacacacaagcacacacatgcacacacatgtacacacacaggcacacacacatgcatgtacacagcaaggactttccagggccactccagggacaggggtggggccggcaggcctgcgggcagggctgtggggagccgagcagtccacttagctgcctggatgactcagggccatccatgccgttcccagaggaagcgccagcaactcaagcctgacaggggggttgaggaatcgccactctatttttgtacatttatttctttgcatttccaacgaacagagacagctcaccttcagaatcaccttgggaaggagagtgatggcaatttccataggaaaactcttcctccctggggaacaggccgggcgttaccctctgcccttgtcaaactaggggtcacacacgggcggtgccctcggcaaaaccagaccacagaggcactcgttgaggtcacgtggtgccatctggttgatagtatttgaaaactgggagatttcatgttttaaaaatctagaacatccagcttctcttgaggaattaagagatggggccaccccaggggtagcccgggtctgtgaattgaggggccacacctggagacaaaacacacagggcttggctcaccaggccacctgcctgccactgtcaatgtcattctggcaccagaaggtatcacagtatgtcctcctggccctaaccccagagtccccatgcagggacccctccagacattccccgtaggagggcatgggtgccgcatcgggacagagctgggctggggcacgtcttgaggctgcttctgccgagcaggcagagtttttaactaaactgtgtgttgcaagcccattaaaaacagcaaaggtttctaaagatttagaatctgaatttcacctgaaatggaattattattgttgccatcattattttaatcgtgataattttggggtgaaatttggaaattatgttctagagcatccctccacccaggaccagtgcctagagagacggcccaaggcccaaaggcaaagtgggtgaggagaggaagacaggggcctgggccacctggcaggtgacagccacgccctgcgtctggcccctggaagcctcagtggtgctcaggctggacaggacaaggggagaagccctaagagcagggggatctgcaatgccctcagacctggggcaacaggagctctggcccagcccccctcctgtcctcctctgtcccaacaagacccggcagtcaggctgaagccccagcttgtcaatcacgagtgccacctcagttttccccacaataagattgaccctgaccctgtcaatcacgagtgccacctcagtttttcccacattgggcttaacccaggccatgaagagactctgaccacatgctggcccttgcagacctgttccccaaatagagccttgctatagggagctctggccagtgggcctggcgtggtcctgagtcgtcttcctagtgatccctttgaagtcaaccttggccttgggcctgcccacctgcactggttgcctacctggtctaacagcccctgttccacttggtccctccaaggcagaagagggctatttgctgctctcccctcctcccctgggagctccctgtgtagcccagccctgctgagctgtggtgactgggagctcacacagcctctgctgtatccctcggcactcaccccgcctggatgagtgatcagcgcacccatctcctgcagaggcaggaggatgacactgcccttggccttcctttcctctgtgtgcagccttccccacaagaaggcactgggccccctgggggtgctgattgaccaagccccagaagtcatacccaggtgggctgcagctaccctgaagggaggtgtctgtggcaggatcccatcttttaaataggtaacacagagctttcgagttcctggcattccctgtgctcagggccccttttggatggcagctggagatctctttgctcacatcgtggccaaataatgacactgtgggaagcactccagagccatcctgttttagagtctctagaatggaacaaaaagactctatcgaagagtcaatcaataaacagggagaggatggaatgaggggaggcagcagttctgtccagggaattccatcaggggaacgggtgggtcacagtagccacgggctcatccacagtgccacagtgcacagggcacgtgggcaagggctgcaactgccagcatcctaggcacaccccgagtctccaggcaggggtgtgtgcacagcccttcacagtggcagctccatacccccagcagccatccaatcccctcgccaaggtggaggcgtgtcaccatcagcatatcgtcctatttcagcatcagggaaacaaaccaaggagcaggaaaattacatgactcggacaagccacaccaccagagaggaggagtgggcacgcgcccaggcctctgagtccaacgttgtccacatgcccggagcccttctgtacttcaccagcactgaggggtgatttgcgggaatgagaattgtagaaacaagtatgattagactagagaagagaaaacctgggactgagtctgcaacctcgggagcatcgtgggatggtgcgggctctgagggtgggtacagtgggcaggtgtgggatctgtgggcaggtgcagtgggcaggcacgggctctgtgggcaggtgtgggctctgaaggcaggtgcagtgagcaggcgtgggccctgaaggcaggtgcagtgagcaggtgtgggccctgagggtgggttcagtgggcacgtgtgggccctgagggcgggtgcagtgggcaggcatgggctctgtgggcaggtgtgggctctgaaggcaggtgcagtgggcaggcgtgggccctgagggtgggttcagtgggcacgtgtgggccctgagggcgggtgcagtgggcaggcacgggctttgtgggcaggtgtgggctccgaaggcaggtgcagtgagcaggcgtgggtcctgagggcaggtgcagtgggcaggcgtgggccctgagggtgggttcagtgggcaggtgtgggccctgagggcgggtgcagtgggcaggtgtgggccctgagggcgggtgcagtgggcaggtgtgggccctgagggcgggtgcagtgggcaggtgtgggccctgagggcgggtgcagtgggcaggtgtgggcctgagggcgggtgcagtgggcaggtgtgggctgagggcaagtgcagtgggcaggtgtgggctctgaggtcaggcaggggctttgcagtgctaagggtggctgggtgttcgctgtcccctgtgcgaagctcagtcctatgccttttctgggctggcctcttcacctgcgatgccctttttgctgctgccgctgtgctggccaaatttaggccccctgaaagacccagaaggaagggagcccgctgcctcccatgggactcagagctcttgaaagacaggagcatgttctgcccccatctgcctcctgcacagccacactgcgtgccactaggggacgacagggacaggggccggggcagggatgcttaaaacctgaggaccacactgttcagtgacacggccgactgctgtcccctctccatgggatggccgccccctcattgctctcttccttcaggtgtctgctgaaatgtcagctcctaagggagaactttccttatttcatcccaaattgaaatcagccctcccctgatttctcccgacagcaccccgtgctcttccttcctgtgacactccactgcaggcaggtcttgtctcatttgtgaatttgcctgggcattaactgactttccctctcagatagagaaccctgggggatggagaccatggggtctggtgtgcctcagtgtccccagtgccccacaggtaaccgcagggctgtgaggggcctggagccatggcagagaggtgctctgggaacagagggcccagcagaggcgagctgggggcctctggggagttgggaactgggatagaaggagaggcaggtgcagcagggccggaggggccacactgggggtggggagccgagaacaggagcaaaagtgtggtggcagttggagaagcatgagatggaacaaaatccagctacaaattacttgcatatggcataaccaagtccaaatgaccaggaggagttaaaacaagtggggcaaagaaacgtaccatgtaattgccaaccaaggcatttaaggagataaactgataaaacaaacaactcatggaaaaaaatacaaaagatacgaaactttatgctcctaaagcttcaacctggtgcaaggaaggagagacaaggccacagtgataggagcactgtaatacatttattccagacaagtctgatacagcattaggtagggatagaaactatttgaattaataggaaaacctaacgttcaaacccaacagccagaacacgtgaccttgtcaagcacacacgggagaagttccacattttaccacattaggacacaactcaaaaactcaaaagccgtgcccacagtcaccattactgagacacattaggacacaactcaaaagccgtgcccacagtcaccattactgagacacattaggacacaactcaaaaatcgtgctcacagtcaccattactgagacacattaggacacaactcaaaaatcgtgcccacagtcaccattactgagacacattaggacacaactcaaaagccgtgcccacaatcaccattactgagacaaaatcagagataacaataaaaccctaaaccctaaacatctgaaattaaaagcaccattctaataggcctagactaaatagaaaatatacattccactcatggctcaagtagaaaacctgaagaaaccaataacctcagaagaaattgaaagagcagtcaaagaaatgcttccatagaagagtttaaccaaatccacaaggaacagatactcctcatctcacataaaataatgcaaagatcaagacttcttgaacataggaataacccgcaagaaagcagagtggaaaaaagagcttatcagctataacagcaaaactcccaagtatctaagaacaaacaaaaactaatgaatgttcaacgactacacaaaaagtagtataatatagtctaaggtctccaaaaacacaaaagaagacctcagtaaatgaagctacatggacataatcctggactggaagttggtcctcctccaaatgaatcaagaaatttggcataatctccatcaaataattgttaaaataattgttaaaattattctccgtcaaataatctccgtcgaataattgttaaaattattctctgtcaaataatctccgtcgaataattgttaaaataattgttaaaattattctccgccaaataatctccatcaaataattgttaaaacccaacaaagtgattccaacattcatccggaagaccacaccagacagaaaaataatgaaaaagaatgacaatgaggaggcatatttttttcaaattaatgcagtgtattataaaataatattaatgaaaacgtagttgtgtcaatgtcatgaaagaaacagatcaatggagctgaataaaacttccaaaaacaggctgggtgcagtggctcacgcctgtaattccagtactttgggaggccgaggcgggtggatcacctgaggttgggagtttgagaccagcctgaccaatatggagaaaccctatctctactaaaaatacaaaattagctgggcatggtggtgcatgcctgtaatcccagctactcgggaggctgaggcaggagaatcgcttgaaccggggaggcggaggctgtggtaagctgagatcacgccattgcactccagcctgagcaacaagagtgaaactccgtctcaaaaacacaaaacaaaacaaaaaaacttccaaaaacagatccaagaatatgtggggtttccaggttaaaatggcggattgaacacagatatctgatttggctcctttctagaatcccattaaaagttcagtaaagaaatttaaaaaaaatttaaagtcacaagcctccaaggataggcagagcaggaggggaagaaacaacaagggaactgtgggaggctggaaacagatgggcaagtggtaacagacttggtacatcaagaaagctgaatcccaggctggccatgaagacagccacattctacaaagtctcccggagaataagaagggggaaaatcaggttacaggagaggtcatagacaaagaattggaatcagaatgactcagagttctcaaaagcagcattcgatgcaggaaaacagtggaggaaagccttcagaattctgaaggaaaatgattgtccaactggaattctgcatccagacacattccccatcaagtatgaaagtggaataaggacatttctagacatgtcagttctcaaaagatttatgtgacaagcactcctctcaagaagctactgaaaggtgtgcaccatcaaaaacaaaaaaggcaacaaagaaagagtaagacacagatatagaaaacggaagcccaacacagatagagaaaacgggagcccaacacagaagacatggcctgggaggcccatggagggtggcgagaagtgaccctgaggtgatggctctgcaccagatgtggagagcgactgagccatactgagcagcgtgacccacggggtgaactgtcttcaccaagaccccacctccatcaggccatctgtagcccggggacaaaatgcccaggagagcctggcctaggttcttggcagtacttggcttggccatgtgccgatgaggggcgctcccctcctctgctgaggacgcacaacattcacagaagtttccagctttccccccaccgagagctggaggcaggccgtggcgagcttagaagcaggacgtacaggtcagccccctccctctgaccgtatttccgctgcaggtccagcgcgtggtccccacctgggccctaccaggtgcctgactgtgctgagcccaagacttcctcgagaccttgctcacgacttccccaggaggggccttgtcagttcccggagaagcagaagtcagaccacgacctggagactgatctgctcacctccgggagcctccatccagcgggggcagtgccgccctctccttacactgccagcgtgtgccagctctccactttaatattaatcgtctttgatattcatttgcatgtaattataaatagttgctcaagtagcaatacagtgaataaaattagtaaatgatacaggtagcaaacggtgctaggaaacggcggaggtggagcaggaggggacaacctggcagtctggcactactgaggggatcatgaggaagagcaccatgcggctcatatcctaaagatacaggatgtctatcggatagcccagtgccctccttggactgacccttggcccatgggccattgttcggccccatggactggcttgcagatgggcaaacttgcacaggtctgtaaggaggcaatggggagctgccccttgcagcattgcttgggtggagtgaggggagctggaaacaacacgggggtcatcagtgggtgagaggagaagcaaatgtggtgggggcatcccacaaagtgctaccaaggttagaagtttgatatctacatagatggatggatcttaaaaacagagtgccaagtgcaaaaggtaagaaacagaatgagacacaattcagagcgacttacataaattatggatacacagacgcaagacagcaacactcatgttgcaaaaatgtacactaaggaaaggatacggtttgatcacctgaaatggttgctcactgcaggagaaaatcagaaggaagagagcaggctggggagataaatggcttttgtttctttctttgttttaatgatgttaggacaactggttagagggaggaaaaggtcaaattttgacctcatgccttaagcaaaaacagattccaagtggatgagatgatcaaaaggaagtcatggaagtgctagaagaaaatgtagcgaggcacctttttatcatcttgctgttgggcgggctttgggttccaagcctagggctctttcccagccctctccttagctgccccatcccctgtgagcagtttcccactctgctggactctgctggctgaatgcaagggcagatggcacacttgctaggggatggtgtgaggggggatgggcacactcactaggggatggcgcaagggggggatgggcacactcactaggggatggcctgagggcagacaggcacactcactaggtaggggatggcctgagggcagacggcacactcactaggtaggggatggcctgagggcagacggcacactcactgaggcacctgcacacagacagaggtgctgtgctactgcctcaacctgccaaccatgtggatgggaacaagtcatcctttttccagtgcttaggagtccccaaaacgtaagtcctaatgaccgccctgcagagccagaactgccacactgcccagaagaggagagggaggctcagggaattagactaaggccatgatgttggcaaatggccaggccagaatgccagcccagttcctgcacacaagcactgccagggcctgcaggggccaccaccaggctcaggaggaccaaagcctggagcaccagcagcctctcctccaacatgaggagccccacccaggggaggtcaacgggaacaaggtcatcccctccatttcttactaaccaagagagagtcgctctgtggctgtgtattcccctaaagataatcattaagatgaaatatgtttatgtggaagtgtaatcaggacacagcagaaagccctgcttggaagcaggcaggctctttggaggctctgggaagcagaaggcaggctcagccccacgggggccatcagcacagagccccactggtgtactttattaaaagatgctcattaggattattacatcccagccctttataactttattactgactttgaattaatttttgcaacttcaacagacacagctcatccaatgccatttttatgacctgaggtggatcggagggtggggaggggctcctggggccggcctggccatcaggagcgcatcaggaaccgctgtgccgaatctcaggggcagtcctgacagttctctaaactcccacgggatgggctgccccgcggacagatggacgctccagcccaggcctgctcagcctcagccatgcttcagggagaaaaaggaagcactaaaggagagaaggcctctccgggccagtcctcagaacatacccccgcacagcagaggacaaaggacacccctcagtggtggacacagaaggtcctggcctgcccagcacctgcacaccctcacagagccacctggggttgcacagcacggtggcctgccctgtctggccattacaccttttctgctagtaaaccaccctcccctatttgcaccccatatggctcatggggagccaatcccactgcaccccagctccaggagtgcccaaggggtcctgttaggccactggaacctgatgctgtgtgttggtgtgcacaggaagactcccgtgctttcctctctgctgggaaaatgtgactctgggactgctaagtacctccttcccccaggagcagcagaggcgagagatgagggcagccccgtgtgctgctgacactgttcaggtccccaaatccagctatggctgaaggtgatgcacccctggacatcctaattcttcaggtcaattcatttagctctctgtctcttgcaaccacgagagtcctgtgtgcccttacaaacacagacacagccaaatgtgctggcctgagagagacaccatggtttggctttgcagccacagctctcttgaacgattgaggcatcagaccaggccactctcttctgccctgtgcctgcacctcccagtgtggggcgaggagaaggtctgcagtatttaaggtctatgaccagaaaaggggccaggctctggtccggctcccagatacgtgtccttgggaaatggtgcccagcagaggtgtgaggctgctgaggttgagcccaagccagcagggccatgctgagtgaccagcagctgtgcgagcccctctgaggtgtcctgcagcagggctggggcttcctgtctacagccctcacagaggttcccaaacacaacttccccctcttcaccccagggctggggcctcctgtctacagcccccacagaggttcccaaacacaacttccccttcgtccccccagcacccgccgaactaccgaggctcctctgcacctgccccgtgccactctccagcggcctctgcagcccactcacctccaaggattcacgggggtctcggggccttcagaggctggggcgggtgacaagagccagcaagccctgcccctgcctagcatctgcttaagccagggagggtccccaggactcaccacagcccccagggctccaagccttccctctgctgggcagttggcccagggaaggggagctggcctgggtaatgtcacgggggcaccgcagcacgcggcagccaagtggtgggggccgatggagaggccggcaggtcttttattgaaaatattcactgtgaacttcagaacaaaacgaagatccccacgggtcccaaaggaagggagaattcccaggggttgtgttctgaacgcagaggaggtgggggccggcaagtggggtgctgacagccagtgccacgggacccatgtggccggaggcttggccagtggctcagcagatgacaggcggaaaatccctgtcaccagtccggtacatgctccagagcccctgatttggacatcatctggaagcctggcattgctccccggaaggcctcaggtacctcacactcagaaggtccagggcctgctgcctcctctgcccgcacgtgcacctccggctgcactgccagctgcatcgtccacctagggagtggggcccgcatgcagccaggtccatgccaggagcagaacctgcctctccccctccctcaaaggcagctccctcctcactcctcagggtctctggaacctacccctccacgctctatgccctctgtactgcccacgctcctgactccagcagcatctgcgcctcccccatctctgcactcttcaaatccaagttccaaggcatttctttacctgccaacctcagtttcccttgttgtggccttcacgtcctttgatgttgagccctgcgttcatgcagggtgggcgtgggccctgcaggggtgaggtcctggtcccctgggaagagcttgcagccaacacaagcgggaggtctcagatgctgcccgaccctgtgcaaatgaggccctctcctacccggccatgagccacgtgcagggactcagcacctgcctctgctccctcctccttcctgacccctctaggtcaggagtccaggcacacagcagtgctggggtgctgcagccaagcacaggctcttcctagctgattgtgggacctggggcagccctgcacggtgggccacactgtgccaccaagctgccttcctaggaggaagagttcctcagatgcccaggcaccagggacttcacacacctcctgtttcttcttcatggtagccggtggagtgggcacgggacctctcttacgcaaatgagggaacaagccctgggcccaggcaacaggcacccctgcgtgaccccagcatctggctctgtcccccgcatcccgagcttccaatggcccatggtggtgattgcacctggtccagcagccaagagggagctgaaagtaccagggccctggcccagctgaggaccttgctgccatcacccaccatgacccttgggcacaaagaccccccactttcagtcgtggcaccaagcacagtccatgtctgaccaggacctgctcaaggagcaggagtgaccgaggacaaccccggggaccaccccagccctcccccatgctgggggtggaagggtggtgaggcctggggcctcttgatgctcccatgccctgatgtcccatcctccaggacgctcccatgcccctgcgcctcctgagggggcagggaaaccccatgtgggcgggcagcagccaggctccctggatctgcccagagaagagccccccgcagaggtgatgcaatgctcaccacgcccccctcagctcaagaccctggaacttgccagaccctcagccctctctcccagtgagtgtcagggacctccctttcccctcaggctgctgggcccccaaaccacatgtcctccttccctctgctccagccccccatggggctgaggagcaggcctgcccaacctttgtttctggtctctcctgtccttcacgcctggctgtgggatcttctctcagacctgcctctcccacgggtaaatcccaaggtgcagactcagagacagcaccgagaggcccccagtgcagccgccactctgagcccagaggccaggccatccaaccctgcagggacgggggttcctcccatttgtcttcctgtgtgaactccgtgggtccagaagcctgagtttgggggtggtgacaattggccctggtggaccccacacactcctgtcccatgatgcttcctgccctagaatatcccagctgcagttgaggagggaaggggctcctcatactccccacacagcacccagaccacggtgttgacgaggcttaatttgatcagccctatttcgagaagggaggaaatcagaaatcagagtgagtgctgagtcctgaaaatttaatccccaaggcagcctcacagggcctttcctccccaaccggggcaggtggcagggatgcactacaagcccagatcccagggccaccctgagaaccaggaggggagggagggccaccctgcctgcagagaggatggcaaaggccctgcttgccgggccccagctgccctcaacactgcaagggctcagaagactggaccagcagctggccgggcagaaactatagaaatcatcctaattctactttaaaaggctggggtttcctcttcttgcttaaaagctggtgtgacccttccaggtagcagccagcggcaggcctgtggctcactgagatgggctgggtgggtggccctctggcctgtgctcccaaccagctgcccatgtgctcctgcctgccctgcagaggtgacgtggctgccatcacagcattgcatgttgtgaactgactcctgccaagccctgagagggcatcaagtctggcagcagcccctgcagggcccagctgcctccgaacctccagcatgcttctcccagggcaggagcaccctccccagagcacccagtcctgttgccactttctgccaggcaacccctccccctgcttccaggtccagcctgactttcctcctgtttgcaacagttcctacctgcctgccctgggcccatgccctccaccaggacaagtcactgtctccttctctggctcccaaaaccttcattttcattcatttgttcattgttcattcactcgtcaagtattttgctaactaccatttgccagccttgcgtggcaccacctctaggagagcgctctggggtgtcaccatcacaggctggcctgctcagtgatcactcctcagacacatgcacacacacacatgcacgcagtcacatacacacatgcacactcacacgaatgcactcatacacacacacacgaacgcactcacatacacacatgcacactcacacaaatgcactcatatacacacgaatgcactcagacactcacaaacacgcacacacgaatgcactcacacacacgcatgcagtcacatacacacatgcactcacacgaacgcactcacacacgcacactcacacacgaatgcactcacacacaaatggactcacactcacatgcacactcatacgaatgcactcacacacatgcactcacactcacacgaatgcactcacacacacgcgaatgcactcgcacacgcatgcactcacgcgtgaatgcactcgcatactcacatgcacactcacatgaatgcacacacacatacactcacagacgcacactcacacatgaatgcactcacacacacgaatgctcttacatgcacacaaacgcacatgcatacattcatcacatgtgagtgtatgtgagtgcatgtgcgtgtatgtgagtctatggatgtgtgtgcatgtcacacgtgtgtgcatatgtgacatgcacactcaggcacacacatgcacacacacaaacgtgcacatgcacacacaggctctacagtgaactcctggaagactgaggtggcccttgacccctctctaagtccccaggtacccacatggggcttggcaaaatgaataaataaacgggccaaaaacgcctattggataaatggaaaacttagttatccttatgctacttctgagcaggtggagacaggacagggtaggacgaggcgcagcgtggatgcgggcggattgtctgtatctccttggtgggagcagttggccgtggagtctacatcggtttccttcctggccgtcatttacagggagagcatgagggcggcgtgaggtcagcggggcaggtggatgctgtgcgcttactgcagccatgcggtgggtgcacgctaccaccgtcttctcctctttttcttgggagctgtcgccatggctcccggcacaccctgacatccgtaggcgccatcctgacaacacgctgccggccgcaggcctcacaccacagcaattctcactcgggcctccctgaccctcgacctgtgggtccctgctaggctgggcgtgtttcccgatgccccatctctctgacctagacatattttgttcacatgttgaacagagagaaacggtctgcatttccagaaagaaatatactctcccaattttccttggagcatgcggccctcttggcttgtcttttgcttattccctcttcactgagaaatattttgctcccgtgagaaaagccatgtgggcagggggatgagagggcacactgcctccagcccaaggtggccagtggtgactaggagggtgcaggtccatgttgctgggtcttatttttgtaaggaagtgagaaatctggatttgcatgtgaagtctctgatctctaaatactggcaaaaagcaatttaagaataatgtaggtgctgtgctgcttgtgaaatgaaccaaagctgggtccccaggtctgtctgccacctcagctccacgcccagaccaaagctgtgtcctcaggtctgtctgccacctcggctccacgccctgagcaaccgtttccctgtatcctcctccgtctggcctggagaggttttgagcacagtaggttctggccaaccagagtgagtccacctgcctctgcctcacagtggctgaagcttcccgggccgcagttcacgccccacttgtttctccacatccctttcccaccttgaaggacagctcctgatggatgtgttttatggtggaatcctcacgcaggggcctgaggaacactccctggttatccacacggcaactaacactcagcacgcaccaggctcctcctccctctcatggactctcaattcagccccgcacagccaagggctcacccacatcatgtgcgcttcagacaaaggactaatttccttaatacataaagcgctcttacaaatcaacaggaaacaatccagcaatccaaaagggaaatggacaaacggtattgatacaaaagtgctgggtagagaagggcatgctccctttaaatgatatggaagcagggaagtgcatggtccctggctaagggctccaccctcacggacctatgtgaggacaggcactcttgcctttgtgcccaaatgtcacatttcccaagaccaccctggtccaccatgtccccatcctgtgcctataaaaacccgagaccctaacaggcagacacaggcggctggacgtcgagaggagcgcatgaggggaggaacacacaggcggctggacgtcgagaggaacgcaccaacgagcaccagcacgctgcaggccaccgaccggcagaagcagaacgacacggagtttggccggggcagtcagaggagagcccaggctgcttagcggcccgactccagggaaagccctttgcaccccatcctccttctggcttcccccatctgctgagagctacttccactcaataaaacctcgcactcattctccaagcccacgtgtgatctgattcttccaggacatcaaggaagaacccgagatacagaaagccctctgtccttgcgacaaggtagagggtctaactgagctggttaacacaagccgcctacagacagctaaagtaaaagagcacatgcagcacacgcccactggggcttcaggggctgcaaacattcacccctagacactgctgtggggtcggagccccacagcctgcccgtctgtattctcccccagaggtttgagcagagggacactgaagaaggaagccacacccccatagcacgccctgcgaggaggacaagagaacttctctcatttcaatatgaggggacaattgtcagaaaagaaaagacagcagcttttcttttcttctttatctctttctttctttcccttccttctttccttccttccttcctttctttctttcttctctttcttctttccttctttcttttttttttttgagacagagtctctgtcacccaggctggagtacagtggcgtgatctcagctcactgcaaccaccgcctcccggattcaagcagttttcctgcctcagccttccaagcagctgggattacaggtgcctgctatcatacctggttaatttttttttttttttgtatttttagtagagacaggatttcaccatgttagccaggctggtttcaaactcctgacctcaggtgatccatccaccctggcctcccacagtgttggtattacgggtatgagccaccgagcagcttttcagtgtatgagaagacgctcgacctcacccttaattaaagaaacaacctgcatcagattgtccaaataaaaatgtacggatcaggggtacatgctgagagaaacggatccagccaaccatcctagggttgtggtcatccttatcaaagttgaaaatgcacaaaccttttgaatccacaattctagttatcaaatttaatcctacaaatgtcctcatacaagtagccaaggaaataagtgtaaggatatccacggctgcattataagaaacggtgaaaagaagtaacgtccccatcagtcaaggtctggttaagcaagtgattcacaggatggaatgcctgagcaggaggaatgggcaggtctggaggggctgctgtggacgacgtccaagacatgttccctgataatcgcaaatgcagggtagcacacggtgtagtctacagtgtgcaggaaaaagtcagaaaaacgaaaacacagtatctacaggacacaaaatcccttgagccagagattctaatcctaggatttatatatgtgtgtgtacacatgtgtatatatatatacttgtgtgtgcacaggacatcctgaaaggacacagaagaaaggtgtgcagtggctgccctgcagaaaggagctgagttccaggacagccaatgggagggggatgaggacagcaatgagcatttcatatggctgcaatccttagtccagccaaaaagcaagccacgcacatgcaggagaggccaggactctcccagcagctcccccaggggtcaggggcagagggagcccccagcctggcctgctccctgacgactctacacttggcagctgaagggggccaccctgacagtcaaggcccagctgtgatctggggtggaactggtctggcaccgatctgcttggcctggctctgggtgctggcacggcagtatctggtgggctgcagggcccccagctggggccctttgagtgatgatgagcctgctgggctgggaccacagagtgagcaggaccagcatcccctcaaccccagatgccctctaggactgcagggcccagacacagagagggaacctgacgctcatggggagggctgagaggcaggcagagggggaagggtgttcctgaccacggcccacaggaccagcagtgcagagggcctgggagtgagggaagcccctgctgtgccaaggagggagggccaggagaggagagatggccgaggccgggaggagggcagaagtgcagagagactagagggggcagggcagccctggcttggggctggagagggagccaggaaggagggtggaaggcaggggaggcagcgtgtggacaaagactgagagggggagtcacagcttgggtgcagaaagtggggccagggaggattccgggtttctgacctgggcaaccggtcaccctgggaagccttccctgcaagggaccctcgggaggagccgcgtgggaggaggagaaggccgtgtggggcgtgttgggctgagatttctgtggggacacaaggacagacacccatgagacactcaggcaggagtggtctggagcacagagagagggtgggccggaggccccaggtgtgggcggcctccaggatgaatcagctgcagagcaccgcagtggcgcacacagatcagtgtcctgatctgaaaagtaggcataacgatgctggccacagcccacaagtaagacacatagaaaacctgaggcccacagaggtgacaggaacgggccaggtgcacggacagggctgttcctgactcagctcactccaccagaacccagtctgggcaccagcctgttttcttgtcctctccagccagcagggcagaattgggggtggacttgccccagcctgaagacctccggggccctggctcctccctgctccacctgccatagcccaaaaccagtgtgggtgtgaagcggaaggagactctgcagcaaggcccagctcttatgccggccactgccttgcctcctgcctgatgcagtctctcggcagcaaggcaggtgccctgagacctggaggtgcccccagccccagaacccaccatgcgcggctgggccgactgtgcctgcccttaaggcaggcagaacactaaccaaagccagcggacatccactgcctgcggagcatctggggaaggctcctgtggggctccagacccggggcggtgccttcaccacggcctcctcatccagcatccacaactctggagctaggaagcccggtgctccttcccagaggagggagccgaagctctgccagtctgcactgaagtctgtggtgtgcggtcacctgagaacagctcagtcagtctggctggatcctgagctcctcccccggcctgtgcttgagaggtgacagccagcacgtgagcaagtgccctgggttctggtcccagcaaagctacctccagctgtgcacctcggtcaggcacctccagctgtgcacctcggtcaggccaccctctctccgtcagaccctcagtgtcctgatcagtgtccacaagtaagacacatagaaaacctgaggcccagagaagccaaggaagtccttacaggcttctgtcagagaatcggaggaaaggaggggacgccagagaatctgggcttaagtgacttggccgtgatcaaaacacaggcagagtcacaaacacgagaccccgctgcccactcccgacggagaggtaattccacaaacacgagaccccgctgcccactccacaaacatgagaccccgctgcccactcccgacggagaggtaattccacaaacacgagaccccgctgcccactccacaaacacgagaccccgctgcccactcccgacggagaggtaattccacaaacacgagaccctgctgcccactccacaaacatgagaccccgctgcccattcccgacggagaggtaattccaggtcagtggcatccagccttccccggcccccaggcccccagctgccaccaagaaacactctttgtaggggtcctgccccactggggtgcagaggtacatcccccaaggcccagccccgcaggaagcccttcctctgcagccattcttgaaatcacctccaagaaaaaagaaatgcttcagcttccaaagatatccccaggcaggaaatgggccgcaggcagcatgaatgtttaattacgttaattgtccaagtccagcgcacatcatccctcctaagtaccttatgggaaatcgtaattaggcgtgaaatggctcattttcacaactcccctttctcggggttctccagggcgcatgcccctgtcagctggccggacaggcctctcttgccaaggcttaccctccttggttctaatttaattttgtgaccttttctctcgacatcctgaccccgtacatccctgcgccttggcacactgcaccaaagcaccatagaattactgagctataagcctctcatggaaatctgtttttgactttgttagaaaacactataatcaaatccctgagagtcaggagggatgggcttggcctgccagaggaaacatatcaccggattaagtgatttagcagaggtggtcccggcgggaggagggcagggcaggctgggcagggctgggcgtgaggtgggcaggcagggtgccctcgggggcaaggggggaggggatgcgcagaggcagaggatgggcaatgtgggattaccagaaagtgcggtctggacatcccagggcctgcaggcttcctgagtgcctacctggccctgggcactcacagggcattgatgccgagatgctcagctgtgcagagggtgtgcaggtctggtggtcacttatgcgctccagggcctgcttctgctgatgccagggcaagacccagcctcaaacacacatcaaatacatacgcttgacgttatgcccgggagggctgtgcacacaggcacacagagacggtgagacttggggatacttgggtccagttactgtcaccttgggtctcacttctgggagcgtggatttggctggcaccactgcactgcggtgtgtctgcgtctatacagacttcctccatttcacgcatgtacctaaaacataccaccattcatgtactgtcaggcactctttcattttgtaaaacaatagggttatcaaggcctgcgcagtggctcatgcttctaatcccagcactttgggaggccgaggcaggcggattgcctgaggtcaggagttcgagaccaggctggccaacatggtgaaaccccatttctactaaaaatacaaaaattagccgggcatggtggtgggcgcctgtaattgcagctactcaggaggctgaggcaggagaatggcttgaacccgggaggcggaggttgcagtgagccgagatcgtgccactgcactccagcctgggcaacagagcgaaactcagtctcaaaaaaaaaaagccgggggggctaccaaaagatgagagggacccaggcctgtattgcacatccacatcagtgacagtgtaatggtacgcagaccccctccccacatgcacacgcattctgaaataagccaggcccagaaggacaaatacggcactcgtccactcacatgaggatctgtaatcaaacgcatgaaagcagatgacaccatagaggctgccagagctgggggagcgggaaatggggagttgctgttcaatgggtgtaaagttttagtgatgctggacgagtaagtactagaggtctgctgtacaacgttgtgcctgtagctgaccatgtggcactgtgcacttcgaaattctctgagaggtctgagctcacgttaagtgttctttccacaaaagcaaacaacaacagcaacagaaatgaagggacagaaggaaaccgtgggagaagacgagtgtctaccgcctcgatgtgctgatggcgtcccggtgtctgcacaaatccacacttgctgaactgtaaggggccggtgacctctacagtcgcctaccatggcgagcataaacttgcagagaagaggatgagaattctgataataggacaaatcaaagcttaacaagtaattaaaggacaaattggtgcatataacaagtcgttccctgtctcgcagctgacatggatcaatgtccaaaatttttatccaaattgttataaatacacatgagagtcttctcggtgcagtgaatagtgaagtcagcagaggcagtggctcacccctgcagtctcagcactttaggaggccgagggggtaggatcacttgagtaccagagttagaggctgcagtgagccatgattgtgccactgcactccagctggggccacagagcgagaccctgtctctaggaaaaaaaaaaagaaaaaagaaaaagaaaaaaaaaaagaggaaattagccaatatcccagagagtgaaggcagaacccgtatcagcttttgccaaaaatgagaactccacagttgcctccgcattctgtcttttaaaaagtgtcaattttacattatgaaatagagtgcatctttttaaagtaaaatcgatgctccaggaagatattccacgtttatcctggactttggtgccctctcgacacttggttttgattaaattaatccaaactccagtttgctaagccagtgcacctgtgtgcggctgttacattgcaccaatgttttatcaaatctccgactatgcccaagtgcggcgccatggaagccacacgggatccctgacagacagaaacatccatactgctcttaaggtggctcaggcactgttccaagcacctcgtctatagttgcccactgattcttcgcagcagctgtgtgagttagctgtgatgcttatcttcattctgcagatggggaaactgagaaaggctatcccaatttcacactgctcggaagtgtcagaaccaggatatgaaccctggcatggctaccaagagtctgtgctcttgaacgctgtgctaggccactccttctggggctgttacattttaactctgacatgtcaagcaaatcactataagtttattgagtcatttcttagctgcttcatctgtaaagtcgggtgacaatggctgcaggtcctgccactcagacgattcccacgcgtgtctgcatcaggatgaggatgagtagatcggtaaagtgccttgtagactgtgatgatcatatttttgtctttgattccactgccagcacaatacctttttttttttaataaagggctgttgaactgcaattcccatgtttgtatacattcttcttctgtttctttggttaaagtttcaagattctcttagggttcaaatgtttaaatttcaaatcctttggctcatctgactaattacaagcataaaatatggcatttccaacaagtctggagaatggaagcacatgaaattatgcacgaccatgagcatctgtgtcgggaggcgggaaggcgttcacccttcaaactcaagtgaaaaaggtttgccgtagttaaaggctgctgacaaataactactgttctgagaaatcaccactgtttactgggagaatcgtttttcagcaaatatatcaagaaaagtaaatatcaagtataatttgcagagttgcagataactccacattttggaataaaaaacttctgtgtctgtgtacaagtgtgcaaaacacagcagagacatttttctttccaatcctgcctaaatactgactgaacatcatcagtgccatctcccatgactgtgacagtgtatcttgtgtgtatgtgttgtatcatattatctgctttgttaaatgctatgcttgttaaaatgtgtcacattaaaaaacaaaaacagcccgggcatggtggctcacgcctgtaatcccagcactttgaaaggctgagggtgggggagggtggatcacgaggtcaggagttcaagaccagcctggccaacatggcaaaaccctgtctcctctaaaaaatacaaaaattagccaggcgtgttggcaggcacctgtaatcccagctactcgggaggctggaggcaggagaatcgcttgaacccggagggagaggttgcggtgagaggagattgtaccattgcactccagcctgagtgatagagtgagactccgtttcaaaacaaaacaaaatgaacaaacaaacaaaacaaacaaaaacaaaaaaacagaaacacacactacactgactacactgaagccctcaagccgctgagcagccatctccaggtccccaaggaccaggcaccaaggtctgggggtggcccagcatccattctcccctttctcagagcagcagcccagtgttatttcctggaattcctggaaccctgcatgcacacagccctccccaagccaaacatcctctccctcacagagtgtgggatttgagccgcaggagccagaagaggaaaaggtagtggtgtcactaaacacctggtcacaatggttaagaccctcctgtgtccaggaccccgactgccaggcccttccacagcccgactccccgtggactctgcaggtttcctaatgtcctcccagtaactcttcctggctcagggcagctggacttcatgcaagctctctgccagaagagaccctctcctgccacaggcgccctccccatcagatgccagagatatcaccagccctcgaggcttaacccctgctctgtgggggattcctgctgctctgcctgaattcacccaggtgggcagtcctcaggtgacttctccagctctgcatggagaaggcctcaccatgcatctcagagagaagtggaggctgcacccccacaggaagtggggcccagtccaccgtgccctggacgctgctcatccactaggactgggcttccgtgtgcagggcttcaccctcgctctcctctctgcctgctccacacctgctgctttgacctccatgaccatggacctgctgacaggtgccccccgacccacctccagcctgcacctccccaggctccagaccccgccccctgctgcctgcaactgcccctggggtgtcacaaggcaccttcatgccaacaagtcccaaacaaacctgtcacctttccctaccccaacccatcagccattgctgctgtgcccatctcatctccacatccaaggagtcaccgcatcctggcaccttccccatctccccgtccatgatgagctcagcccctccctctacctggatgcagcagcctcctcccagacctggccccatccgctgctgctccctgcccttcactccctgtagctcgagtcctcacctgagcttgcccccattaaaatcctctgtacctccctcttcccaagcctagcagacccgtgcgggagtgcgagcacactggctagggcctcctgatgggcctgacctgcctgccaaccctcccagggacctgctcatgttcccgcaacgcccttacagccatgggtccgagaaaacactgctcactctgcccagaatgcctgccctgccctttctggcagactcctattcagtcttcaaaacccagctcccagctcgttaggcccgcaaagagagcaagttactctctctcctagactcaagcaccctgtgcttccttcttttaaaccactgatcatgcagaagtataagctcaccagtttccaagtcccctaaccagaccatgagctccaggggtaaaatcatgcatcagattcatctctgggtcacctgccttggctgagaggaggctcatgaaggtttggcacaatgggatgaaggaatagacaaggagcaagaatacgagctcatcctcatgcctcagaatagcatgaaatgctcagggtgtgtgggacagaactgacgccttcacaccaatggagccagatgccagcctatgtgtgtccaagtcctaccaagtcccaggctgcatggaaatcagagggaccccaaatcgaatgagcgaggggcccttaaagaaactcacctggcccctttgtctcaggtcctaggggttggtgctgccaggaactctcataggagagggccttgttcccacctagtcccaagcatctgagcagggccaacgaaagtgctggtaggccaggccttgccctggagaggaagggcagagaggaaggagaggggaagcggggtggaccacctctgctcagaccaaaggcagaatccagtgctgatggttgccaatagggtcctctctgttgctgggcccccatgaaccatgtgagccctgcacagagctcctgctagatcctgggggtctccctgcactgggattgctccaacagtgcccccaccctcagggcatgggttgccctctgcatctggccaagtgccttcccagacaccctgcagcctcagcctcctgtgaccactcatgtccacctagcctggtcctggtcccaggtgccctcctggtctagctgccactaaacagatgagaagctccctcccatcccagccctgaaatatgctcagcctcaaagcctcttggcacatctcagcttccagatgtcctgtgccttgtgagatattaaccacactctgcctagccctctgccatgaggtcagctccgctcccaggcagggggaagagctgccttgggagcaatgatgggcatcgtccctctgtgctgtgtttggggtcttccctccctccaagtcttggactttgggcccagaaatcactttccctccctcctctctgagcacacaaagggcaggacttgtcttcaggtgcttggggaagagggacgccaattgttccagccactcccgtaagggtgaaccaggagactaaccatcaaattcaccaggaaatcccaacctccaggccctgactgaggcactaagacccaagcaagcaatatcaatgaaagccagaggtgcttaaggtggggaacaagaatgagctgtcagaggcctctgataaagaatcgtttaaaaagactttctttgctgcggctcatgcctgtaatcccagccctttggaagtctgaggcggtaggatcacttgaggtcaagaattcaagagcagcctgggcaatatggtaaaaccctgtctccatacacataaaaaaaattagccaaacgtaatggggtgcacctgcagtcccagctactcgggaggctgaggtgggaggactgactgaccctgagaggttgaggctgcagtaagccgagtccatgctgctgcacttcagcctgggtgacaaagcaagacctggtttcagaaaaaagaatttcccccttcgatgtatgctatggactgaatatttgtacccccaaaattcatatgttgaaacctaatccccagagggatgattttaggaggtggggcctttggggggtaattaggtcatgagggtggggcctcatgaatgggattagtgcccttatcaaagaagccccatggccaggtgcagtggcttacaccagtaatctcagcactttggggggttgagacgggaggatagcttgagcacagaagtacaagaccagcttggttaacacagcaagccctcatcactacaaaaactaaaaataaaaaaaaatatgttgcatgtggtggctcacatctctagccccagctacgtgagaggctgaggcaggaggatcgcttgatcccaggagttcaaggacacagtgagctaggatcgtgccactgcactccagcctaggtgatgagtgagactctgtctctaaacatttttttaaattaaaaatgtagaaataacataaaagaggccccagagagctctcttgccccttgcaatgcatgaagacaaagtgcaagaaggtgccatgtgtgaaccagaaggtaggccctcagcagacacaaaatctgccagcactttgatcttggacttcccagcctccagaaccatgagaaagaaataaacactatgtaagccacctggtgttgggggtgctttttgtggtagcagcctctactgactaagacagtgtcacttcagctactctcaagaaaggcttcgtcacctggatccagtcgcgtcagttaagcggtgctgcccagctctgggaggctgggggagatgaggcgatgtgtgattctcaaggtcagcatgttggaaagtctagcagggtttaatgaggacggaattaaaggagacggggcctgatgaggggctctgggcctctctgtgtccctgtctgctttgtctggaaaatggtgaaaggaaggaggcatcttggagcatctgtgtcctctggttttccttgatccctggattcaccaggacacaaaaacccagtgcttcttgtactgcaaggtgcttgagaaaggaagagcaaacccacaagctgaagagtcccaggcagccatcgctcccgacacgcacgccgcagtgtagctgtggctcctgagaacggcggtgttaaaggacagttacttaaccagaacttggggtccccctgccccgccccacggaggccttgaacatcctacaataaacacacaccgaagccatgttcttggagagactttggggaggctgtgcactctggaaacagccaagctgttctgtggcttggaagaaacaagcagttccatccactctgggctcacagatattcctcctgagcttgaaggaagccacagcggaacttggagctgctctagttctctggaacatgcagcaggtggaaccgcagacgtctctccagggagctgagtcccggttttcacctgctgggtgtccacggattcacccccagctactgtgtaggggccagctcccctcagggactgctcctgggagaccgtgggagtcaccgcagctccctgctctgtggagcggccacgctagcagaaggaacagagggtgccagtgctctgagtatgccggagggcagtgagtgctgcgggaaggggctggagggcacagggtctgcgagtgccagggcaggtggtgcggggggagctgtctacaaagccttagagcgccagggtaggtcccactggaagggaacatgcaagcaaagactcgaatgaggtgggagggtgagctgagggtgtctagaaagggcatccaggcggaaggaggaccccatgtggggttttgaaaagaagggcaaggaggcccaggatggcaggaatcaagtgagtgagaaggaaaatggaggccacggggtcccagggcgaggcgctgggtcgtgtggggtctggtaggtggcccgggtgctgggtgctgacttctgagctgaacgaagcaggagccactgtgggatttccagcagaagacagacatgatccagcagaaggcatcaaaggatccctgaccacggaccgccccaggacccttccaccatagtgcaggattcctcttacaggaaatgccccagtaggcagatctagagaggcaggaagtggatgaatggttgcctggaaggtggtgggggaggaaggacgacagctaaggggtgtggggtctttggggagggagaagatgttgtgaatataataaaaaccattgaatcgtacactttaaatgggtgacctgtatagtatgtgaattatatctcaataaagctgttagagaaaagaatccctgctgctgtgttgaggacacatgggggtggggaggcagggaggtctgctgggggctcccaaagtcatcagaagaggacaaaggcttgacgcaagtgacaaccgtggagatggtgagaagtgatcagggtcggggtggattttgaaagaaaacctaaaaagatttctcaacaggtttctcatcagtgtgagaggaagagaggggtcaaccctaactgcagagctttggctgtgcaaatggaaggaaggatcagccgtgcacagagctggggaaggccgagggtggagtgcggagagggtgagcgcgagttcagtgaggggcgtgctgaggtggtacttccaaattgaggttggcaagtagagaaatgccttggaacttggatttgaagagtgcagagacagatgaggtgcagattctgctggagtcaggagcgtgggcaatacagagagcatggaaggtggaggggcagttggaatatgagtcttgggtgcaggagagagatctgggctggagacgcaaatctgggagccatttcatggtacataaagcaacaagaggaatgagatcgcccacagaggggtgcagagggagaccaaggagcgtccaggacagagccctgggcgcatcaaccccagagggtgcgggaagaggaaggatcagcaaaggaaacggggatgaactgtgagtgctgtgattagaccaagaaagtgggtgtccggtaagccacaccaagggagcaggagggactagcctgccacgtgctagggatggcgactgaggattggcagggagatgcagcagcatgatgacctcggggagggtgcctctggcagagtggcacacacagaggcctggtccaagtggggttaagacacagtgagaggagaggaatcgaagatggcgtctccacctagggggtgctgctgagagagcaaaaagctgggagagtaggtgacagacgagggaagccgtcaggtgtgaatgcggatagggagcagatgttggaggtgttcagaggacggaagatatgaaaagtcatctggaaggaggcaaacagactgaggggagcagtctggctgctagcggcaccttgctggtgaacatcatcgtaagcaagagcagaagcagggctgagctttgttcaggggtacccgtgccagcatgaagtaggtagaaagtttcattttaccaggactagggcattgttcagtagatgttacaaagcaagagtgactccaatgagggaacctgcagtttaagagaaggaggctgggtaaggggtggagggaaggatcagtggtgtgagagaccgtgacaaggcggcagcatcaatggcctgcaggtttgctggagcacaggtcggagcaaaagggaaccgggaaaatagaaggtcatcagaatgcaacactgcaacggattatgcaggtataggggccgctggcaaaagaaggtttaaggtatgaccaaggccaaatccagtggggagtcctttttggaaaccttgacagctgtggtcatggtcgacctcatgggaaattttgcaaacttgatcctgtgtcaaatgagttcccgtgacgcgtgtcagtgcgtgtggatcttgctgtttgggggagggcagaaactctgcagaccccatgccttgccaccctcgaccctgatacgcgatgccaatagacacactgctgcggaaaccataaacgtcaccagattcagagcttgagcccacctctcccagaggttttgtccggtaaagggaagaggaacagggttcaactctcctggcagaactctatggatgccgcagaagacaacgttaatgagcttggcttaacttacaagggatttccggtcttgtgaaagaggaggaaactcaaatctcaggagagtttaatggcaggagtgagcttgagtgttggtttccctaatagatgggtttagctgcatgggtgaggtagaccaaggccctctgtagaatatgctggagaacaatgattcaagactacaaagaaactgaagtgtgagcggaagataggagtgaaccttcgagaaccggaggccatgccactgccttgtttcgggtggaggaacaaagccttgtcactgtgttgccagggacagagtgcaaggtgcctggaagctcctcgggaacgttagctgtgtccctcatcgcaggcaatgggaccctgcaccagtggccagtacctgctgccccagccagcctctgtgaggcacacactgccagagatgacctcacgctggtggaaaacgaggagacagcagatcaacccagccgggcttccacgtccagcaaaacgaggcgagttcgggttgttattctgctctttcatgagtcagggctttgggcctcactgccttccaaacagagtcaaaatcaatttgacgttcaaaacgacatgaaaattgccatgtcaaaggccattctgtaatttcagtgtattaaaatcaaaagagcacagccttcttgaagaagtttcctttgggcagaattcaagtttcctctttcttttacttgtgcaatttgaatttatttcactttttcaggaagtgaccatttttgcaggaaaagtgtagtcaaaagagataatgcacatgaagtttctttttaagttctgagtatgtcgaagagatttacagtgcattaaaataaactataggcaaaatagtgtgtgtacctatctctacgcattttttaaaaggggcaagtgggggaccatcttgttgatttttcacaccagtagcccctttccgccagcgggaagggccttgccccacccaatgtgtctctggtggatgggtaattcatgcccatgctactccccagtggctgtggtgggggggcacatagcccacacctggtactcaatgccctcagcacagtgattggtccagggggtgaacacatgactggagtgagactaatcatgggtcttccatgagatctgaacattgggagaaaaaaatattcccttcctggctcagtaagctcacagcgtaggcctggggctgcgtatgtgaagagccaatctgagaaggaagtctctgcagaagagagccaagtcctaggaggaggagagacgctgagccttggcagcctcgtgtgggccagcggtgcctgctgtcttgctcgcgtgtgccagcaaatctccttttcttggcttaattggatttggatctctaattataccttgaatgaccctgacatatccagtgtcttctaccttccttattgctgtggccctttaaaaaaagattaggaatcatctgccatgagaattccacttctggaatggtggtgagaggagccccatggacacattcccctcagaacaaccataactggtgaaaagtattgaaaagtcaccatcaacaacaatttaaagtctctagaaattatcctaagagcacacaacaaactaagcaacatcatctattcaagaaaatcaaccaaatcttgggaagaaaaatcccagtaagaacagcaagaatcggtggcacctgagccatcacttgctctctcttccccgcttctagtccttccagttcagcttatggggagttccactctgggggtgtgtggccaagaacacagggctccctcttccctcagatcccagtcaaggaatacagtatttcaccaggatagatgggccaccagcgtttctcatcatctccaactcccagtgacagagggtaactccctgctgagtgtgaccgaaaggccggagcaccttcctccacccagccctaactcagggcaggagctccgtctcaggtgcagcagggcgagagtgctgggctcctaatcaccctaagtccagcctgcttgctagaaaaatattccatgctagggggaggcaaaccaagaagatcagaggctacctcctgcccaatacctggagtggtggcttcagtgaagattctggcggcaagaatttaagaggaggctgacagctctatgagaacaacaacctgaaccacagaccagcttatttactggaaaaaaaaaaaaaaaatcaggagaacagatcgttatgaggatctcttccagggggagaatgaatttcaaagactggcctcaaaatcatccctacccaaatttaattggatcaaactatgtgacaatttatgtctcaggacattgttgaaaataatagagcaatcatccctcaattagtgaagcctagtagctgggtgtgataccaaatgaagcagagagtgtaacagacagatcagagaaagggacagtcatagggagccctgctgaaatcactgtcatcccgggatgaccctgcacacgctcaaggctgtgccctccaacagctgaggcttcccactgtgaagaatacagactttgtgaaaacagtctaaccaaatcaggaaacaaataaatacacaaacaactgcaaacagcctcagagatgggggaggggaatcagtatgcagagctgccacatgacccaaaatgtccagtttcacacaacagaaacacaaatgactcattcacagaaaaaaaggcggcaacagacactgctggtaagaaagcccagatgtcagatgtaacagctgtcagattttgcagcaaagatttcaaagcagccattggaaatatgtctttgaaaaaaggaaaccatgcttatgtaaaggagtgatgatgacaatatctcatcaaataaagactatcaataaagagaaattataaacaagaaccaaatggaaattctggagttgaaaagcaccataactgagaggcttaacagtagattggaactggcagaagaaagaatcttgaaaacagatcaatagacattatgcaatttgaaggacacagggaaaaaagaatgaagaaaagtaaacggaacttaagaaaaatgtggaaaccataaagggcatgaacatatgcacaatgggagtcccagaaagaggcaagtgagtataaaggagcagaaaagatggaagaaacagtggcaaaaagctccctaaatttggtgaaaacattaacctacgtgtccgagaaactcagcaaacttcaaacgggataaatgccaagagatccacacccagagacatcatagtaaaaatgccgaaagccaaagacaaagagaaaattctgaaagcagcaaaagaaaaatgacttgccacatatgtgggaatcccagtgggatttccagccgacttctcctaataatggaagccagaaggcagcagaatggcatatccaatgtaaaaaagctgtcaaccaagaatctttctccagcagaactatttttcaaaattaaggtgcaatatagacagtcccagataagtaaaaacagagaattatgagtagacccattttatcagacatactaaaggaagttcttcaagctgaaagcaagtgacctcagttggtaacttgaattcacacccacacacatacagtaccagtaaaggtaatcacgcaactttaaaagacaatataaatgggtatttcttctcttttcttcccttaactggcttaaaaagcaataatatagaagaagatgtatataattgtattattgggcccatataatatataaatgtaatatatttgactaacagcacaaagcaggtgaacagaaacacagctactggagtaaaaaaatgacaccagatgggaacttgaatccaccgcaacaaatgaagagagccagaaatggtcaacaggaaggcaaactgttgatatatatgtactctcctctcttttttcagcttctttaagcatgaaattatataaagcaataattacaacaattgttaggtttgtagcatatatagctgtgtggtaggcagaactgtggccctccaaagatgttcacattctaatccccagaacctatctatctgtaaggttatatgtaaaggaaaattaacattgtaaatcagatgactttaaaatattgaaattatcctggattagccagatgggcccagtgtaatcacaagggtccatagagggggaagggggaagcagaagagagaaactggagggatggctgcacgggaaggacttggcctgatgttgctggcataaaagacgaaggacagaagtcatgagccaaggaatgcaggtggcctccagaaactggaaagggcaaggaaacagatcctccccggaggaggacccagaaggaacaaaaccctgccaaaaccctgatttaaactcagtgagactcatttcagactctgacttccaaaactgcaaaataataccattgcattatttaagccactaaatttgtggtaatttgttaccgcagcaatcaaaaaccaacacaagttgcacagcaagaacagtacaaagatgggggtgggccgggcgcggtggctcacgcctgtaatcccagcactttgggaggccgaggcaggcggatcacgaggtcaggagatcgagaccatcctggctaacacggtgaaaccccgtctctactaaaaatacaaaaaattagccgggcgtggtagcgggcgcctgtagtcccagctactcgggaggctgaggcaggagaatggcgtgaacccgggaggcggagcttgcagtgagccgagatcgcgccactgcactccagcctgggcgacagagcgagactccgtctcaaaaaaaaaaaaaaaaaaaaaaaaaaaaaacaaaaaaaacaaagatgggggtggaagaatagagctatataagagtaatgtttctatagctcacaggaattaagttaatataaatctaaagattctgataagatgcatacgacaagggagaggacatcaccaaagtgacagaatagaggactccaaaattctgcccctccacaaaaacaggaaataagctagtaaatctcagaatcgacttttttggaactccagaatttaaccagaaacctacaacaaccagggaatgcttaatgaagaaagcagctactgaattttggtgacagtgggttatggtgttttaatttacttgcttaccattatcttattctccaactcagcagtggccatgaagatggcagaccacattcctggtgtaggttgctgataccaacctacacatccaaggagctcaatgactcccagtttgaaaactcaaaagaaagaaatatggaccttatatccagagaattgtggttgtgggttttaacccatctgctggcttgcctttgtttcaactgtctcggagcttccccaggactgaagtggtttcccagacagtgtttgtcaaaagtatttaaaggtaaatgtattagctgcagacacctggggcacaggacaatagttggggcaagacgcacaataaacatatctaaaggcttggggaggaagagggtagggaaggagatatttgaggaaataaggtttttggaaagctcttgtgcataccagagaatctaggattctaccactgacatgtctagggtgagatgcatgctcagaaaaggtctaagaagactcaaaagttttcacctctggctgacatttagggtctgtacaagtaggaagtgaaggctaagacagagttgtaaacagtctggctaagcatcaaaggtgtgctcaaacacagaaccaatctacaaagacgaggagagtatttcttcctaccctggcttttaagaaagtctctgtcaaatcactagctgaccactaagctaacaaaacagagactttggtggccatatataatgaacaatgcagactttacaaaaatagtttagaaaaatcactaaacaaacaagcaacaacacataaaaaacaacaagccctgggaagtggggggcatctgatttccagagtctccacattcaaaatgtccagtttccaacaaaaaatacaaagtatgcaaaataacaagaaaggatggtccactcacaggaaataaaaaagaccttccctgaggaagcctagacacctcatgtgccagacaaagattttaaataaattgtcttaaatgtgttcaaagaactaaaagaaaccatgggcaaataacgtaagtaaagcaagaacataatgtatcacaaaatagagaatatcaataaagaaatagaaattataaaaaggaaccacaaacaattttggagctgaaaagcataataactgaaataaaaatttcaatagatcagttcaatagcagatttgagcaggcaaacaaagaatcagcaaacttacattatcagcaatcatccaatctgagaagtagaaggaaaaagaatgaggaaaaaggaacagaacctaagagatcaagtacaccaaaatacaaaaaatgagagttcaagaaagagaatagagaaacaaaggggcataaagaatgtttgaaaaaacaatggctccaaattccccaaatttgataaaaagaacatgattctacacatccaaggagctcaatgactccaagtttgaaaactcaaagagttacatcaagatacattgtaatcaaattgtcaaaagacaaagacaaaaagagagtcttgaaatccacgagagaggagcagcttgccacatatacaagggctctcaatgagcttaacaactgatttgtcatcagaaacaataaaggccagaaaccaacgggatgacatatttaaggtgctgaaaaaaatactgtcctgcggctaaaaattccaacaaaactatccttcaaaaatacaagaaaaattaagacactttcagagaaacaaaaactgagagagtttgttttctagttgacctgccctccaataagtgttaaagaaagtccttcaggttgaaataaaaggacagaagacagtaactcaaagccatatgatgaaatgaagaatactaataaagggaaccccaaaatcttcgtttgtaactcttctcttttttcctatatgatttagtctatagatgcataaagcaataattataaatctacattaatagacacacatgtatgaaatgtaacaatattataataaagggtggggaagacagagctgtataggagcaaagcattttgtatactattgacactaagttgatatcaattcaaacaaaattgttatgtgtttaagataatagctgtaattcccaggataaccaataagaccatagcttttaaatatacagcaaaataaatgaaaacatgaatcaaaacagtacactaaaaaacaatgtgttaaacacaaaagaaggaaatatttgaggaattgaggaataaagaatatgacatatacaaaacaaatagcagatagcagaattcagtccctccttatcagtaattatttaaatacagatggactaaatgctgcaattaaaattcagagaatgggagaatggattaaaaaatcccaagatataatccaactatatgcttatccacaggggaccaaatttagattcaaaatacacaaatagtttgaaaatgaaaagatggataaagaaatgctatgcaaatagaaaccagaagagacctgggatggccatactaatatcagacaagatagacttcaagtccaaaaattttacaacaaagaacagcattatatattgatgaaagagtcaatccaccaagaagatataacaattataaacataaacacacctaacaacagaatcccaaaatctatgaagcaaaaactgacagaattgaagatggaaatagaccattttacaataatagctgaagacttcaatattccactttcaaaaatggataaaacaaccggcacatgatcagtaagaaaatagaggacatgaacaacactgtaaatcaactagacctgacagacatacatagagcaccccactcaacagcggcagaatgtgtattcttctcatgtatgatgatcattctccaggataggtcatatgttaggtcacaaaacaagtctcaataaccttaaagagactgaaaccatacaaagcatcttctccaaccacagtggaataaaactagaaatcaatgacagaagaaaccctttaaaaattcacaaatatgtagaaatttaacaatattctcttaaagaaccattaggtcaggtaatatgttacaagataaattagaatatataataaataataaatcttgagacaaatgaaaataaaaacacaacatacccaaaacttaaaggacatacaaaagcagtgcccagaagaatatttatagcttcaaattcctacattaaaaataataaagatctcaaatcaataacctaactttacacatgaaggaaccagaagaaaagcaacagaaactcaaagctagcagaaaaaaggaaataatcaagattatagtgaaggtagacaaaatagagaattgaaaaacaataagaagactcaatgaaaccaaaagctggttctttgaaagatcaacaaaactgacaaacatttagccaaactgaccaagataaaaagagagaaggctccaattactaaaatcacaaacaaaagtggggacattactaccgaccttatagaaataaaaatgattataagagaatattatgtacaattgtatacgaacaaattaaataacctagaagaaatggacaaattcctagcaacacagaaactaccaaaattgactcaaggagaaatggaaaatttgtacagatctataacaagtaaagagcttgaatcagtcatcaaaaactcccaataaagaaaaacctaggaccagatggctttactgggaattctacctatcacttaaagaattaatatccatctttctatgaggccagcattaccctgataccgaaaccagacaaaaacatcataagaaaactacagactaatgtctcttataaatataggtgcaaaaatcctcaatgatattctagcaaaccaaattcagcagcatattaaaaggcttatatacaatcaccaagtgggatttatccgtggaatgcaagagtggttcaacacacaaaaatcaatccatataatatactacattcataaaatggaggaaaataaaccacacagtcatcttggttgatgcagagaaagcattagacagaacccaacaccctttgtgatcaaaaaatactcaagaaacaaggactagaagggaaattcctcagcatgataaagggtatttacgaaaagccaaaagtactcatcatggtcaactgtaagactggaagcctgctctcaccacctgtattcaacatagtaccggacattctagtcagagcaattcagcaagaaaaaaataaataaataaaaggcatccacattgcaaaggaagaagtaacacttcttgagggaaaatggggaatgatggctcgtgggtacagggtttcttttgggagcaatgaaaatgatctaaagttgactgtggtgatggttgcacagctgagtgaatatagtaaaaattatggaattatgcgcccgaaacgctgaactacagcatatgtgaattacagctcaataaacccaccataaaggaaagattaaacaatgatctactccttacctctgttctcagagccatttccagcccagcccaggccccaggcaaccctctgtgggtgacgcagcattacctgctttctggctgtccagtgttgtgtagcgcaaggccctgggaggccactgggttggtcatgcggtaaccaagaaggggagcaagtagttgggtgacaaaccctgtacatctgctcctaactttcgaaacctggctgatgggaggccaatgtcaccctctaacgccctcccatagcagcctcggcttgtcttctgacagtggcactgtccacccacaggcatcacgcatcctgcccgcacattgcttccgccagtggagccccagctgaaacactagacaggagagaagtccagagatcctgctcactctagggaaggagaaagacctcttcagcttgtcctgcctcggcaaaggcaaagcctcatgcatttgctcactcctccctcccagggctcagccggcacctgaagctagtgtagcagaaagagcccaattctgcatcaggcgggcctgggttcaaatcccagatcctccactttctaattgtgccatctctgagccttccatcccttacctagaaacagagttctttccacccatgcccttgtgagacagcgtaagtgaaaatgacatccacacggtactggaagcagagctgctagaaacccagccaggcagggtttgaacttgttatctccaaaaagtctcaggaatcgtatttctgcctgatggtgacctacttcagcaaggacccaatgtagaaattactctgccaccaaaaaagcaggcctcagaccccctccatcacctccccaatttatgaattaaacaacgaggccagtgcctgaggggtctgcagatgagagtcagaaaccagcagccccccaccccacagagacaggtccctgctaactagacacaagaattggccttctggggtgtctctgcgtgttctgtgtatggtgacctagccccggccctccaggagggacactacgtgcaggacattttggaaaacagtcttggtgtttcctcaaaaagtgaaacactgtgttatcatgtgagccagcaattctcctaggcatatacctaagagtaatgaacatatatgtacacacaaagacttgtccacaaatggccatcgaggagaagctggccacagagaagatggcccagagaggaggtgctgtgtgcagaagcagctctgggaggaaagacgtgcacaggccaaattcagattactgacactttttttttaatgcagagattgtctgcagaattacctatttttgacttatcttgaaaaactgaggatctggcaacactgaccccgaatcttcctaacagcaacaatgatcagaactcagaggttttgtgtctcactgatttttttttctttttcttttcttttttttttttttttgagatagggtctgactttgtcacccaggctggagtgcagtggtgcactctcagctcactgcaacctctacctcccaggctcaagcaattctcctgcctcagcctcccaagtagctggttccacaggtgcatgccaccacgtgtagctaatttttagatttttttggtagagatggggtttcaccattttgcccgggctggtctcgaacccctgagctcaggtgatccatccgcctcagactcccaaaatgctgggattataggcactttgctgcacctggccttgtctcactgatttctgatcttattttgtattatctttttccttctattttctttggatcaatgttgcctttttctaacttctcacactggaaatttatctctttaatttttagacctttttcttttctaatgtaaatttccatccacgttttgatatttagtgcttttattatcattgagttgtatttttgaagttccactattatttcttctttgacccatgaattatttaaaagtattttttttaaatttccaaataatggggatttttgctttgggggctattaatttctctctcacaggcatgatggtcagggaacaagacctgctgacactattcttttagtttctgtgagatttgcacttaattgaccagttgttacaagtgtttcctatgtgcttgagaaaaagaaataacctctacttgtcagatgcaaaattcatcaatgtcaagcttattatttgtgttatttagaacttccttatctgtgctgggttttttgtctacttgatccaacaccaattggaaaaaaatggttggattctctcaaaaatgatgataaatttgtcaatttctctatttctaacaaagttcacgtcaaatatgttgaggttattttattaagtgactctacctttagaactgctttatcatcttggggaaatgaaccttttctcattaaacggtgacctgtctttccccagcagcgtctcctgtcttgaggtctgttgagtctgagattgatacagcaatgtcggcttgcctttggcggcctgataggtctgtttccatactttactttccactttttcttgcctttacactttactctggtgatagcgtccagccagattttgaatttggggtttgtctcgtttgtcagatatgacagcctctgtctttgaatttgtgagtttaatccatttacatttacctggattattgataaatctgggcttgtttctcccatcttactctatgatctcaatttgtcttggtttttctgtccttttttctcctttataatttgtcttataaaaaaagacatcccggccgggcgcagtggctcaggcctataatcccagcactttgggaggccaaggtgggcggatcccttgaggccaggagttcgagaccagcctgaccaacagggtgacaccccatctctacaaaaaatacaaaaaaattcggggggtgtggtggcacatgcctgtaatcccagctgctagggaggctgaggcaggagaatcactggaacccgagaggcagaggctgcagtgagccgagatcgagccactgcactccagcctgggtaacaaagtgagactccatctcaaaaaaaaaaaaaggcatccctttttctctaatttgtcctgtcaccactgtgctggctgccccagccaggctgcaaccctggggacacacatgcccctccagcagtgagttcagacccttctcaccctttggcctcaggctcctcacttcctgccccctctcctgagaggtgacacgccatgtccacaccaactccaaatctgatcatcggctccagtccagtccctgcaccagctgctcatgggcctttctctctggggtggggctgggagctgtggttcctgctgctgtgtcctgcactactccacatttcccagttcagaggtgatcggagccccctctaatatatgccatcccagggcggggcagcagggcacaaggccacttcagtgtcaacacggatctcactgcaggaactaggaggggcctcccttaggaagaggcactctggactgttttaaccacagtccccacttctccctcctgtctcacagtcccgagcttcatacacacacgctgctgcctattctggaattatgcagtattattattttatattcatgtcgctgggcatatgatgctcccatgacaaggggccctggagcttttagatcaatccttagaaggactccagccagaccccaaaggccacatattatcaattgggtttctatgaagtatacagaataggcaaatccaaagacacagggagtagattagtggtcactatgagctgggaaggggaatggggagtgactgctctgggtgcagggttcccactggggtgatgaaaacattttggaactagatggtgatgatggctgcacaacactgccaaaaaccactggattacacactttcatactcatatgtattatagtccattgatttttaaaaggtcagaggaagcaactcaaatgcttgtaggaggtcagaagaggcccagatgggtgaagtcgggggggcgtgcagattaagcccacaagaatattctctaagctaccaggtcacacacacactccctctcactgtccctgaagcccatagccccctctgcctgactctcctatcaactgttgatggcgtcaaagatgcacagaaatatattttggctgaaagaaacacaacagggcacaatgaggaagggctgccaagcagcctattagcagcatttgtcatggttcatctgggagtctgccttttcccccagccagactcttcagggacagagaccagattgttcatactcagtgcccagcagggcgctggcctggggtgcttgcagacactgactggatgaatggatggatggattgggtggatgaatgagtgtgtagatgaatggatgatgaatgatggatggatggatggatgatggatgaatgaatggataaataattggatggatggatgggtagataggggatgggtagatggatgagtaagtagatgaatggagatcaatgatggatggatagatggatggatgaatgagtgggtagacgaatgaatacacgatggatgaatgaatggataaatgattggatagatgaatggatggacggatgacagatggataaatggatgaatgattggatagatggatgaatgggtagacagaaagactctgatactggaaagtgaatccttcacatccatggcaagtgaaccgggtaacaaagtcagaggcaagaccatagcagcgtcatttgtcactgttgccatttatacacatttttggggcagaatcggtcatgcttgaccacaggtcatctctagagggtgaggattgggggtcaggaactgtggggtgggctcagggctagggctgccgatgtggcctttgtgcctgtgagcagactgcatttccatcagcctcatccccatcttccctctctgcctccaccagtgagttcagatccttcctacaattcaatcttggggtcccctcactttctgtcccatctcccaagacctggctggggcctgactcagaatggggtcagcaaagccctgaggtagagccgtctcccaagattatggcctggctggggcccgcctcacctccattcaaaggacaccatgtggaaaaccaatgtgcccccaagcaggggtggcacggcacagacactgatggcacaggggccacttcttgctccttcctggtgtcttcatcctcggggatcaggggctctgcagcagcaggcagggctgggcagccctggagtgtgtgacacaattcgggcactgtgaccctactggacccctttgcacagatgctgctgggcctaggaactggctgctccccactggctgctctggtaggccctggggtctgcctacacccccaacacatgagcatgggcaggtacccaccagtctccttctctgtccccagcctctcccgcagcttggccttggtccaccgtggacagcgtctctgacacggtccttcttcccacagggagaccgggagggtcttgttctgccctcagagcagaggccccaggctccttcaggtgggagcacaggtgcctttcgcacagggcccagcagccagctcagcccacagaacagtaagccgccaggtcccaagttgtcatcttgtgacccgcccctggggacacgggtgcccaacaggaaagaggacgggggcttattataaggaaaatagtgtcaggcctgccatggagctttgggcctgaggcctcagctgaggccaaggcagcaggactcatccagagacaggacagaccctgggctcctggtgcccagctcagggaagctcctgggtgcggctcggttcactccagcatttcctacatggatgaagatgtggatgtgtctgctctgaccatgggtgtgtgcatgcctgcgtgtgtgtgagagagagagaggagagagagacggagagagtttatgtacgtgtaactaccaaccagagtccaggagtctcacactccactgcaaaccaggcaggcggggccagcatgagtgggggggccaggcacgaatcggcagggagggaggggttgtgttcgcccatccagaggaggcacagagcctcccacccagtgctgctggcaggaacacgcccagggtggccaggccttctgaaggaactgaaaattgagattttcatgtgaaacctcctgatttttaagtgtacactcaacatttctgaagccgttgtacgagtcaaataaaacattgcggggtggggcggcgaggccgcccaagagctgcagggctgaggcctggctttagtccagcaccccgatgtacatacagacgagaagactgaggtcaggccagagcaaggactccgcaggccaggcccacactggcggccccggctgcctggcccatcactggggtcaccacagcccatggggagcaccaaggacaccaagaaagggaggcccaggcctggtccccggggtctctgtcaccaagggcccacattgtgagtttcaaaggtggccgaggtggttcctacaggcctgtgagtccccacactccttcccagttcaaggcctcgggacaaatccaagcccagctttgtcctcgtggtgatgaaggccaagaatgctgggagctcccgggatattgcctagaacaaaggagcacaggcacctgacgttctggacacaagggcagaaccctcttgagaccatcatcggccgtttgctctccaggctgcgggggcctggaggacatccaggcacgggtataggtgccgggagcccggggaacagaacctcagacccggaactgggcaccagatgcaccagccgggggtctgtccgcccagcccggggagtccaggggctgctccgaacccggcgccacgcctgctccctcagtgccgcatccaacagctctgtctgcctgggctggggccctgcgccctccccgctgctggctcccgctgatgcgctacagatgggcttcatcgctgcctccaagaacaacaggacgaccgcaggtttcgcctcacagaaacggaaccgctggaaaggcctctcttgacattcccgaaaggaaaataaaaattcctctgaagtacatttcaactccgaggcagccctggccacatccaagaagctcggtcctgagcgccgtgggctccagtgaaggtccccagcactgaggccgcctcctgacccccatcccggccactgccccgggctgctcaacccttacacggctttcacaaattttgaattagctgccaacagtttaaaatgaagagattgtaagtaaaatcaatttccagcttctcttataaaattggaggccctcctgctgctggccgaccccgtgtctacctgggcccagtgatctctgctggcgtcacctgccaggcccccatcagtgtgcccatacgagaccactgtcctcagcgaacgcctgacccccaggctccaggcaaggttgagaggacagatgctctcatcctgggggctctggccttcctggggccagtgttatccagctctgccctccagagccctctgcacacgctggggctgggactgcccatggctgtgggctctgatttgggtgggcagacctgagcaggccatcatgcttcttattcccagcctgacccccccagaccgccccccgccaacccagacaatgtgtactgaactcctcgtcaacttgacccctgagctcctccccgcagcccaccaggtgctcctgctgtggtttgggcagcacctagtcctttttgccctgctggacgtcgcctggccagacttgcagagccatctcagccctttgttctcctgactccatccctccaagcctggccaccccagcctcggccccagctcctgccacgtgaattgtcaaaggcagagcatgaggaggctgaaggcagcccccatggcacaccccacggagtccctgcagtcgtccaaaaaaggctcaagcctgggcagcattgctcgcagctaggaatctgcagctggactcaaatatgtgtccagaatgatctgggaaaggtccttgagaaaagggccagacacagggaccttcccaggcccggatcccacagaggaaatgattctagcgagcgccacctcgacaggtctgaggtccagacaggggtggagctgtcacaggcagccgggtggggctgtgatctgggtcctcccagcctcacggtgatttggaatgggaatacggttctgccaggcaaggagtatccccctctgaccaacctgtggactgcctaccaggactcccaacacccttcctgcacgatggcgctgaggggctgatccggccgctgctctcattcccatggccacctgatccaggccgcagtctctccctgcacacaggacagcagcctcctgccggctccctgcctcttccgtgctcaccctcctcggaaaccagaccatgccacctgctgcatggcacagcccctcctccacgacggagcccacagaagccatcgtgatctgacctccagtcccctcaggccctcaccctgcccctcctgccacacccccaaacaagccccgtcctcacccctcaggtacttcgcatctgctgccctggccccttttcctcctggggaactgcaacccacactccaggcctcagcccaacgtccagtgactgcgggctcactctgtggcacttcccaagtctttcattgtgcaggtatttgtggactgactagtgcactgtgggctgtatgaggtcagggctgtgcctgtctggtcccagagcctggcccagtgcccggtcctgctgtgcgtgccgggtaaagatctgttggatgaatcaagggagagaggaaggggagcagccctgggattccacaggtgctttatgtccagagacaaccgcgcagggaacagtggccaaggcacgctgggagcagtgctccagcccgacggcatccccagggcagaggctgggattcacgcattgctgccctcaggcaccaaacaggcctgtggcagtcacaggggcacattcctgataccgggtctgtcgttccagcatggacagggccatcttcctcgccatctgcagtctggcatcagacattcccaaataaaggacagacagttaactgtcagaaagtgctggtgcttgggcctggaaggaagggagcccgtgtctactgggcacccccaattttggccactgtgcagtgccctgtgtcctcaacctcggggcctggaccacagctccatgagaccacagggaggaagcagagtcacagaagaaagagtgatgaacagcactggccacttgatttgcagggcacagtgcaaaatggaaacgcacagtcccttgttcaaaaagtgattacgacttctaaggcaggaatgacagagtgttaaagtgggcatagggccctgccggatgggtcacaagccggcgaagtcagtcctgctcaagtgtgaggaagtgggactagcaaaggcccagggccacccaatgtcccatgggcccatgggaccagtagccacccacagctgccaacctgagtctgcagccctgacactgtggcaacaacaggaggcgtcagtgccaagccctccaatgcctgcagggagcaactgttgctcccggagtgagctcctgggcgaccgggcttcctaggcactatgcttattctttcttttcacggatatttacgcaccaaccgtgtgccaggcattcctcaaaatgctgcaaattccactgtaagcaaaagattctccccgaagctaacgtgctaagtgacctggagacacatcctcactcaccctcgctgggccccagtttctgcagccgttaagtggagttccaggccttggtgcttggaaggccctctgtccaacaaacagatggggtcacaggctaccgggttttgccagcccaggctctgagcggggacaggagggcactgcactgggtgtcagcagccctgggttctaagcctgctcctccctcctgatgcaggagtcaaaaggcctggctcccactgtttctacagcttactatctgtgcgaccgtcggcacctcagtttcctcatctgtaacgtgggcacagcaaaagcaccaacccaccgtggggctcattacaagaatcctaggagatgatgtacctgcagcgtgctggcagacgcggtcaacggtaagtgctccaggaacgcgtcacgttcttcttgctccctgctgttcccgctactgcttggacagtggtagccctgcaccttagttttctctctgcttccaggactaccgtgcctattaaatgacaccatgaagagtgcccaccttcgcgcaggccctcggtgaatgggcatgtccttgaacgcaaacttggctccaacggggcaggagaaggatcattcagactcagctacagaaaaacagacttttgtgcaactaacgctaacaaaactggaaaggaaagaggaactacggcctggggaaaagcttgtatcgaacatgacagaaagtcaatatctaaaaagagataaagggcttatcccaatatataagaccccaggagataaacaggcaaaggacttaggaataggagacatgcagagtaatcaaacccagggaagatcactcatcctcgccagtaaccaaagaagcgcaaattagcgcaaaaagcaacgccgctttgctgccggagcagcaaaatattaaacactaaagcccccgtgctggtgaggatttggagaaaccaggagctgctgtgggagccagtctggctctgccccgagtggtgagtctgttaagcgctgggatttcctaattcatttagtcactcagtaggtgccccctgatggctgctcagggccagggctcgagcgcgtctgggctggctcaggccgccatctgccgggtcagcaacagatacctatttgcaggaacagaacctgaggtcagctcccaggatgtccccacccctgagtttcaagagagtttgcaccaggagcagggagcattccagctgtctcgggcagcttttgtgtggggaacagctggtagcgctgcctgcggccccttggggtggacaggaaggctctgcctgcaaaggcctagaggcagccacacaccctgccctgcacactcctaagtacgtgcaggccacagttcctgcatccattcatcccggccagtctggggtccctccccacagtggcaggcaaggggaagctggaccggtcctgctagacaaacaaggatgcacacacgtccatgggaccccaaacctcacactgtccctgacagcccgccccacagagcacagcctctgcctcccggagcaagaggaggtggcagtgcatcccagggcctggctgcctgtggggctgcattgggggctcctgcccccgccccgtgagtctgggaacacatgggtcttggccttggcaccttctttcctgggaaaacacctccctctgggccagggcagtgcagagcagtggaagcgggcagctgtggagtcagagtgatgggtgccaattctgactcctgcacgtggcccagaccacctaacctgccacccccaccagcacacctgcccggccacccccaccagcacacctgcccggccagcctcaggccaccagccagcctcccagccacgtgacctctcaggggcaggatgtgtccttgattccttccttcacaccacgtcccggaagctccacctcaaactcatcctgaacccactgcctccaccgccatctgtcaccgggactcctccctgcttccacaccgtccaccgaaaaccctccaaaggcctccaccgcacagggaatgaattctcaccccgtaccgtgaccgtcccttcaaagcgatgagtgccacccatccctcccggccctgcacgcctcccactcccccattacgtcctcagttccaggtactagctcttccttctgccccttggtcacgctgcggtaactccagcctcagggctcctgcatgtgctgttccctctgcctggaacacccttcccagggctgggctttcccatcatcaccaacctggggcgcctccctcccttacctgccttctcacgctgccctttcaccccgttttactttgttcacaggattctccactgtctgcgagcatctgctcaccaggtctcccctgcggggctgtgagcccagagaacagggactcgatcgggttcctccgctgctacagccccagcacccagtcctgtcagacacatggtggacacatagcaagaacgtgacgagtgaatgcaggaaaatacacttgtggcagcaggcaaggtgccctctctgagcctcagtctccccctaagcagtagagctgctaatgctattattcccccatgatttggggagcagtattattcccccatgatttggggagcagtattattcccccatgatttggggagcagcattattcccccatgatttggggagcagcattattcccccatgatttggggagcagcattattcccccatgatttggggagcagcattattcccccatgatttggggagcagcattattcccccatgatttggggagcagcattattcccccatgatttggggagcagcattattcccccatgatttggggagcagcattattcccccatgatttggggagcagcattattcccccatgatttggggagcagtattattcccccatgatttggggagcagcattattcccccatgatttggggagcagcattattcccccatgatttggggagcagcattattattgagcattaatgaacccgcatggcattcaggtgcccggccttttcccaaccagaccagcgcaccagccacctctccacacaggcccagtgcccaggtcacctcctgtcctgtcctgcaggctctctctgggtgtgccgacagtttgggatgggaggcgtgggaggcgtgagctgcgctcctggccgggttctctaccagctgtgctcgtggcgcagcccacacctcacggcaagccccagccaaagggaccaagtcaagagctctgagagacatcccagccgaagaatccagcccttgtcccaaacgtgtgtgtgcacaggcacacgaaagaaggtgagacagaaggagagaaaaatgaagccagagagcaggagagagagaagacagacgccagcacgcccatctgactgcgcgacctttccccgctcagagctccttcagggcccagagcacagcgctgcctaggattaatttcaaagagaaacgggtcaaagaaaattggaaatttttatagaaaatatttcaggcttggagctggctgaagtgtctgccaacctgcagagaattctgagaggagatggggcctgtggtcagaggcctccggctggcacaaactggcagagtttggacctcggacccaaatgcagtttctgagccaggcctgtcctcgctgctgctggggaagagcttcctgtccccttcagatgtccctacagctgcctctgcagccctgatgctggtacccaacgcctctcacctgtcgccccacccctctctatccccaagaggcctctgtctagggacccactatgggatgcagtccctttgtccccattatgcagggtgcccatgtctctttcaccgtcatccatggggcagccagggcatgaaggaagcctcacctgggtcccaagcaggtcccactgctccttgcccaaacttcaccccagccagcaggctcctacatccaaggcacagatgtcacagacatgaaaagatgccctggacacatgcctctctcccagaagcctgcctctgccatgctggggacctgaaaagagggggcatgcccagcccacagttgctgatcaaacgccagatgcccccgtgagcagatcacagcttcacccctgagccgtgtactgtctgcatgccagggactgttaccttgtgcaaaacccgaaaagctctttggaggacattcccaacacagatccaagggaaggaaagaaagtatcaattcactgtgtctgtggaagatggcgaggcagaggagggaaaggggacggagagcaagtgtcgcagtgagcactgggcaggcgccctgtgccctgcgtaattccagcagcccctgtgccactgcacccaggtacagtggagatctcagcacccaggttctgagatcctgaggggctgggtgagctgctctgggccccttagtgagccagaacaacagcatgtcgggtggagctgagcacactgacccctgcaccaacagcagcatgctgggcggagctgagcgcgctgacccctgcaccagcgctgacccctgcaccaacagcagcatgccgggcggggctgagcacactgacccctgcaccaacagcagcatgccgggtggggctgagcacactgaaccctgcaccaaactgcccgctgcccaccccactcacccacctagtgctggaagcatctgtgggagcagccctaatgcagctcctcagaaccactggccggtcttccagaactgtcccctgcactcgagttggggctgcagccaagccagggccaaggccaccatcctccgggtcaggcttgtcacctgcccacggtgctccaccaaagatccaggcccttgccagccacatttacctggtcggctccacccctgaaccagaaaccatgtcgggaggggagaggtggcgggggaagggcaagcctgagactcagggactaaatttatgtcggaggcacaggggagttgctgcgcacgtgggggctgtcaggcggagtgccaggcccagacgccgtggagggggagcacaccctggcacgtctccactgtggaataaggggggcccagccctcgctggggctgcaagcctcgcttctgccttcacagcccagggggtgggaagcacccacagggcagcgctctgagcagcagactccagccagagagccagccaggcccgggagctggcccctcctgctctccccggctgaccccaggcaactccagcctcggagaatgtgcagcctcggctttcccagcgccggcccccgcccaccccttccgcgtgggccacatcaccgcgctggcatctccaacagccatcccaagggcccggtctgcacgaggacaggagcgccgcggcgtctgccaagggtgcgctcagccctgaagcacgcctcccggagccgcctcgggtttcacaatcagtgcttctccctgggtttcccggggcctgggctgcaggctcagctccagggtggaaagagaggatgagctgagaagactccagggatccagcgccgaggcgctgaactcagtgagtcggcaacagtggcttggcagggcccaggctgaccagggtatgagagagagcacctatcaccacgccagaggccctggcctcaggggtctggggagtcacttgggaagtgcccggttggagacacagagacaggtctgggcacaagacgctggccaggtccagggctcaccctgcaaatccagccaaagccctctctccattctcccttaggacccaaggttcaacacttagacatgtcagctgaatcatgacccccggacgtccatgtcctaatcccccaaaactcgtgagcattaccttatatggcagaagagactttgcaaatgtgtttaaatcaggggtcttgagatggggaaagtaacctggatggtcccagcgggccctaaatgttatcacaagtgtccttctaagagggagagctggctatagaagaggagaagccacgtgaccagggaggcagagactgcagcaatgttgccacaagccaaggaacgccaacagcccccaggagctgggaggggccaggaatggattctgccctggggcctcccgaaggaaccagccctgccagcaccttgatcttagcccctaaaatcctatttcagagttctgagctcccgaactgtgaggaatgcaggtgtgctgttttaagccattaaggtgtgggtaacctggtacagcagccacaggaagctgagatggacgtcgacagctacagggcagaaaggctctctgacctggcattcagcaaattggcaccccccaacaaagcacacggccctcctgccccatcctgggccccccagcccccacctgggccaagcctcacatccgctgtgtcagtggggctggctatctgctcgccactgaatggatgagtctcgcctgctccccagtcctgtggtctgacagaacagagctcctctctctctcctgtgccattgctccagcctcccccaccagcctccctcacactgcaaccagtacgagcttgctgaaacactcaactctttgtgagactggagggcgccatccccaccttgggtcattcaaggctgctgcttccatggaggctgccccacagctctctgcctccagccctgggctctgcacacccagggggaactgtcatgcctgaggtccgcccccacccccgccgcccactcttcccccaggatcccctgcggcctggaaaactcctacccaactcaaggcaaagtcacagggtggagactgtgggtcaggaggggctcttcctggcctggtggggaagggctggctgtgggctgcaggtggcagccacgctcagccacatggaggagctgcccagtgccggcgcttgtcctctgtctcctggagggccttccttggtgcagcgaggctgagaggctcccgtggtggcgtgcctcgtctgcccgtcagggaggatgctgcagcctgacagcagcaggcagaggcttggcaccggcggtgtctggggtggaggcagccaaggtcactggcacgttgctgtctgacttctcttccttcagcccagcagggtgtgtgcacagcagcctggtagcagttccccaggatgggaagcacctgcccctcctctgtcccaaggccaggccggggcgagccccaggagagcagcccacagaggagggcagaagatgcttctacctctgcatcacagaaagcatgggtagccaatgggggaccgtgttttgtttggtctatatagtgagcacgggaggggaccccaggcatgacagctcccactgggtgtgcagggcccagggctggaggcagagagctgatgtggaggcttctgtggaaagagggctttgtctggatttgctggctgagccctggacctggccagcgtccttgtgccaggacctgtctctgtgtctccaaccaggcacttcctgagtgactccccagacccctgaggcctggtcctttcgcatggtgataggggctgtctctcgtacccgggtcggcctgggccctgccaagccagctgttgccgactcactgagctcagcgccgtggctggattcctggagccttctcagttcatcctctcattccagaaattttaagccacattttaacatcaggaaagttcacataaaaagtctgatgtctggattttcttgataggatgttcagctgcaccagacccaacttctaccaaattgaggtcaagggagttgaggagggtctgtccctccttgcagggcctcccagacgccctgtgcccatggcaaggccagggctggacaccacgtgtggctgcattcccactgctgtttctttttagtggagatgtattcttggtctccacgtttccatcaaaaggagagaaatgaaagccaggccaagggtgggtgcaattatctttttttcctccactgctgtccttgttggcattgcctgccaggccctgcaggctctgagtttgcagctcttgtctttctgcaaatggcactgtgtgtctgaaacagagaccacatgctcaacacgtgactcggggtctttctcactgtgtggcaaccttcacagagtcccaaggtcagtctctgggaagctaagacaggccctcagtgtcagcacagggttggcttctctgtgcacgtggtcttggagtcagccgctccaggtcccttaacgcgggcggtgggggaggactgccaggctgagactggcacttagacatgcagggaagagctcccacacgacagggtggagggtccagtgagggaggcagcaggaccagggcctgcctgggctgtgcctctgggctatatgccctggggaggcctaagtgaagcctacagtgctgctcctccgcgtgacccagacgggcgcctcccgggtgtgctgtgcactgcgtggccagccttgtacgtgagggccattcacatcctgtagctggctgcatggtgcccccaaagatgctggatcctgatccctgcaacctgagacgggtaccttctatgggaagaaagggctttgcagatgtgcttgcagtaaggctcttgagatgagaagcctgtcctggattactcgggtgagtcctaaatgtaatcaaggcatccttgcaagagggaagcacagggacacgtcagaagaggagggggcgacatgacccgggggcagagattggcatgatgcagccacaagccaagggaggctggcagcccccaggagcggggatgggccagaaacagattctcccctggagcctctggagggagcacagccctgtccacccttgatcttggctcagtgagattcatttcagacttctggcccacagagctgtgagagaggcatttgtattagtccgttttcacaatgctgataaagacatacccgagactgggcaacttacaaaagaaagaggtttattggacttacagttccacatggctggggaggcctcacaatcatggcagaagatgaaaggcacgtctcacatggcagcagccgagagagagagagcttgtgcagggcaactcccgtttttaaaaccctcagatctcgtgagacccactcaccatcatgagaacagcatgggaaagacccacccccatgattcaatcatctctcactgggtccctcccataacacatgggaattatgggagctacaagatgagattcaggtggagacacagagacaaaccatatcaatgttcctattgtttcaagctccgtgaggactccctcctcaacagtcccacacaggatgagatgcacacacaccagagaggacaatgccacagggtgccctgtccctgtaccccagcacagtgtccctggacacagagctggccttgggaagggcagagaacagggattggagatgcctgtcagaatgcctggggggacacctcaaccactgctccccaaaaggccacccagcctcagagctcggcctccggtcctggccaggttcccaggccagcagcactgagcaggacccttctgccaaggccagcatggccagggaggagagaaaaggaccctccccgctccctcaccccttgcccctcctaataacatcctctcccgggtgttgcctaagctgcccagtgcacacactcatccctggcctgtctgtgaaatgctttaaaaccgtcattttctatccgtttcccccaggcaatctgcaatccagcaactgatcttggatgacagagactattagtgaaaatgattccctgaggctccatgagtccccgagatcaccctgagcagcccgtgggcttctcggggaaaacaggacatcctgaaaaggaggcacccctgacgctgcagggatatcctgccacccagacagatgcccatcccccactgggacacccagggcaggtgtgtcaccttccccggcagaacataaatagcagggtgcttcacacccacttccagacgttgcttttggggaggcaggaagaaactgccagccagcacctcctgccagcttctgccagggccacactgatatatcagggttccctcagaattcactggaagaaagggtcccctatacacacacacacatacacacacacccgcacccaggtcctggagttgtgtgccaggcaggctgtgcccctcactatgcctggccacaggacacagcttttatgtatctcccagttgccactctgggccctgaaaaggcccaggcagatggaaagctggacgcctgaggtcaccgtgggccctccacccagctccggcactcactgggcctggtgcccttccagtcagtgtgtcgatctcagcccagggccacgtgggaacgattaggtgcatggcgtgggagctagctcactgaaggcccgagcccctcatgcagggtctgctgacaccagacaggaacatcaagcaaaggggacttggccccagccccaagttctgggatccagacctatagccccaggcccacgctcacatccacagcctgggccccaggcctggagctaaggctggacaggctcacctcctccccgacagcccattaccaaacccccaccttccagcccagcctcacccctgacctggcagctggcctcacccagcgtcttctaaggccaatggtttctgggcttattctgagattgaaattcctttcctgtgttctgaatttcaagttctcattaaagatatgtggattgggggtgggggtggagggaggattcagcagaagatgccaaacaccagcagaagcccagaaaataaggcaaggccggccaggctgtgggggaagggctgccatgttcaggaagacaagcaccatatggaatctgggatcagagacatggccaagggcacgtggccagctcacctcgcctgagcagaggcccccagaaccaccctgaatcttccaggagaggccagccagaagcaccaagcccacagcacaagtgaccagcccctgagctctcggggacacaggggttgctaatgccactgggcttgcccgacagcagctagctagcaaggagcaaagctggggccctgcccccgggtctggagcactcgctcagccccttccacgctggccctcctagattactcctccttccttccctgcaaaatagtccaagggtggggataagtcgaggctgagaccacagctggaaaaggctgggcaggcagtacccagtggcccggctgtctgcagcatagcagacgctgatttgtcaccaaggaacaaggggccaccggttgcactgattggctccagagtacattgggcttcctgatggaacaattcctttgcaaaggtatctgatgccgtttcatgaaattagaagtatgcctgccaggctgtacccaatttttctgtcaagctaggaagtcagacagacctacagtaaatgaggcggggctgctatggagtgacgggagtaccttagtaaatcacagcacgggggctggcccagcccaggcccctggagcactcgctgtgaacgtgcaggtgtgcccgatcctgggccccagactccagactctcctcacccaggggtcctgaccagaggctgagggctgagctcgcagcttcccactctcccagcaagagccaagcacaggccaggagtccctgaccacacgggggaccctgagaactatgggcctgcagaaccacatcagacaccaaccctggcttcaccacaatccaggaccagagactgggggatgctgggaggtgtgggctggcacagtgaggccagatctgaggcgacagtcatggactgtcaccatggccgcctggcagctcctttcacgtttctgggcccagggcacacgtgggttctgagttgaaaaagacagacgcccatgagtctgtgcagagactgctgaggctgctgggagcacctccagagtccttgtagggcacatgcctccagggatccagaaagagcatgcagggcctttctccctgagcagccaggtgagggttgggacctaccacaggcaccctcccagggaccatggcagcacagagcaggagaggcgctgtctggggctctggaggcctcttcacaggcacagactcagagacgcaggcactggactcaggcctggccgggggcccccgccccgctccacgacacttgcttgcctttaggcaacagaagatgggcccttggacagccttcatagtccaccatggaggccccagacatgaaggcagaggtgtctgggctgcttgtcacccacatgcacccagaacagaggccccagccccagcagccctgctacgccctgccgtcagccaggcagctggcccatttctgagccactgagaccggggctcagcctcagcagccaagctggtctgtggagagctgcctgagtctctgggatgctcccctggggaccagggcctcagagggctctccacacagcctgcccacctgcagtagcctcacctgtgtccagggcctgtggccccccgagaggaggggacgtgggtggccggcgatacaccacatgcacacggccttgctcagcctcctgcgccgccagccccttctccaagggttcgatgaagaactcctcctcctccatccggatcagaccagcctgcgggacaaagacaacaggatcagatttccagcacacaaaagaccaaggaaggggaacagcgaggagaccccctcagggagtacctcccacctgaagaccctgcccagcaccccagctggtgctcagcttgaaccctgggctggccggagggtatgaacatgtggtcccagaggccgccccccgccgcccaccctgtctaggaaaggggcctctgtctgggtcatctccacccctatacaccaaccctgtctgctttcagaaaagttactgtgtttataaagtcaaaaccgtccagagaagcagggagacattcaagggcagctgtgggcctgtgcgtgtccccaggagggcatccaccaaagtgcatcaatatgggccaagtgctgcccccactcccaggagcccagagtccaagacaaaggtcaaaacagccagccggggattgaatctgcccacacacatgttccatctgggccaaacaatatttttaaagctctgaagctaacactcagaatgatgagatttcatgtcttgaacatggaatcccagctttccttggaaacgcaggccctgaccacagcgggtcttggatggaacacatgcccctgcaactggctccagtccctactgccccccaactgtctctcctgctctctgtgtcagccaccagcccagactctacaggcagctgaactgctgcccctgaccccctaggccagccagcaccctccctgactacaaactcctcgctgggtcctcatttccgttgggactcaggctgctctatatgctggcattcaggctcttggcctgccccaccctcccagaccgcggcttgcaccaccccatgcttctcactgggctgggtgcaccctgccgagccacccagcccctgaaccccatgctgccaactcaggaatccccattctcccaccccaccaccccatccccagctcggccatctggtaaacctgtgttcccccttcgaggcctgattcagaccccctcacctctcctgccctcccctgccatccagcctgccctcccctgccataccctgccctcccctgccataccctgccatccagcctgctggcaccatcaggtccacccatcccatgacaactccagctcctacacttttatcttctggtccattatccataaaccaaggtctcacactggaagtgcacactgtgtccagccttcagagtgtttccttcagatcacaagcttatgacccatgcaggggattttaaaagcttgaatttgttgccaaacttaagaaacaggagagttcacataaacgaccagatttccagactctcttgaaaatcagaaaagctggcatttccagcacccatcgacactccagcttagctggcgctggccggggtcccctgtccagttaggagtgtgccctctggtgggcagcccccggcacctgccatctggatgtgcggaaaccacaccccccccaaagtaacctcatgatggcctctgccatatcatcatcttggttgtgggggggcacggtggcgcacgggctgcccctccttctccctgaccccaggtgctcggtgagccccatcctgttgctggctgggagcctctgcagaccgagatgcagtcagtgccccccagggcctgctgggcggctgcccctagcctcaagtgtagcgagggaggctggagatgcctcccggcgcactcagcctgggccctcgggaagctgatgtgccaggcaggggctggtggaggtgcagggcctggaggaacacagagcccagcatcaggcctggctccagaatgaaggatgcctccggcaggaggtgacatctacccaaacccacccaatccctttgtgctggccaggcaaagagtcagagagaggaccagtgctccatatgggggaaaccgcacatgccatggccggggaggtggacggagcacagctggtgggaagagctgaccaggtgggtggacaggagcatcaagggcacggtgcccggtggcccatcactcagggggctggtgagggagattgtaggcagcccagggcttctggggggagccttgatctgattccagttcagaagcatggtggctgcggcagggggaatgggctgcggaacaaaaatgggtctggggtcctggggagaaggtgttacaggcacctgggagaggggtaatggtccagacgggagcatgagagacaaggacgagtggcaggtatgaaggaggtgaggagcgaaatggacaggacgtggtagggtagagccggctgagatgggagggaggaggaagcacctggtgggcttccaggtctgtggctgaagaaccggcccccaaagttacccaggcccccatccctggcagctgtgagggtagtggacatggtggaaagagactctgcgggtgtgatcaggtcagctctggggctggctgggccctgaatgcagtccttgcccacttccttatgccggggagtggagggggattaggcagatgcgcagaggacgaggccatgggcagacagggaggatgccagatgccagctttggagattggagcgatgtggcctcaagccaaggaatgctggcagcccccaggagctggcagaggccagaaagtgtcctcccccagagtctccagagggagcgcagccctgccgatgcctggatttgggtcaggttataccgacttcggacgtccggcctcagaactgtgagagaacgaattcctgctgttttaagtggttccttacagcagccgcagaaaagtaattcagggtcctggtgggtggccggcaaagtgggtgccattctccgaggggcatgagaagaagggcaaggggcgcaggaccctctgggctcaggcatcctgggcttctggggaagaggcctaggaggcagtggtaaccagagttaccagggcaagaccgaggtcggagaaggaggtcagcagggctgtgggaggagagcggaagagggggtgggaaccctgcaggccccacgcttctgactcatccctgggtctcagggctcaaccaggcctggcgaagactcagcagatgcctgtggaatgagcgaaccgatgaccccaaagctgcaggccacgtcccccaagggaggcaccgagcaggcaggcgggaagaacacagccaggcctgtccactggcacaggggcagtgtgtttaccagtgcaggagttgggagggtccagcactgatggtcccggtgcgtggtgtggagaaggctggtgcctcaaatccatcttatgactgaaactcattggatgaagtgcaggaattaaccctggggggcggcagcgggcaagctgtcctggagcgtgaagttctgacttcctggcaccctttctatctggccaggtgacctcaggcaaggtgtcaagctccccaagcgtccagtgactcgtctgtacatgaggcaggtcatttcccgtgcacactcacacaggagcacatgcagcctgggagacactgagaaccaggccacgcctccacccaagtgatttcatccagccagcttgctttccaaatgaggaaaccgaggcctagatgggcagacaggctgctggggacacacaggttctagggatcagaactcacacctacacggaaagggcatctcccagacaggtccctgggccagactgggccgattgagccaattagggcaggacactggggcatgaggaccccttatggcagctccatcttctgggggaacttgcagcccaggtcgggagccatcgatgccacaggcctgaggccctggggttattctggagggacctagtgtgacaatgaggccaggctcagcctggggaagggcagtactctctggccggagtaacccgggggacagtttggggtctccctgaccagcaggggtcaggctcccctccctggctgcctccctgaggacaatcactgggctgagccaacagcactagctccatctgatgctgccctgggccttgcctcctggaagggcacccctgcaggcgactcctcggagggcacaggagcacactggggtccatctgaagcagggcctgggctcaggcttcctcacacagccagaagcctccaagcggtggcattctccaacacagacgttcaacatgctcctcacagccccgcccgtctctgttgaccaccgtgcgatgcgcacaacgcatgctggacgatgaacatggtggcacctgccccgagaccaaaggctgacaccccgagaccaaaggctgacccccctgagaccaaaggctgacaccccccgagaccaaaggctgaccccccccccgagaccaaaggctgaccccccgcgagaccaaaggctgaccgcccccgagaccaaaggctgacccccccccccgagaccaaaggctgaccccccacccgagaccaaaggctgacaccccccagagaccaaaggctgacccccccgagaccaaaggctgacccccccgcgaaaccaaaggctgaccccccacccgagaccaaaggctgacaccccccagagaccaaaggctgacccccccgagaccaaaggctgacaccccccagagaccaaaggctgacacccccgagaccaaaggctgacccccccgcgagaccaaaggctgaacccccccgagaccaaaggctgacaccccccgagaccaaaggctgaccgcccccgagaccaaaggctgacccccccgcgagaccaaaggctgaccccccccgagaccaaaggctgaaccccccgtgagaccaaaggctgaccccccctgagaccaaaggctgacccccctgcgagaccaaaggctgacccccccccgagaccaaaggctgaccccccccgagaccaacggctgaccccctccaagaccaaaggctgacccccccccgagaccaaaggctgaccccccccccgagaccaaaggctgaccccccacccgagaccaaaggctgacacccccccgagaccaaaggctgacccccccgagaccaaaggctgaccacccccgagacaaaaggctgaccacccccgagaccaaaggctgaccccccgcgagaccaaaggctgacccccccgagaccaaaggctgacccccccaagaccatcagctgacgtcctgccaagaccgctggccagaataatgctcggggcggggggcacttcacggaagaagtggagatcattttattccctgattttcaaacacttcagtatatgcatcccaggaatgatctgtctaaaacacacagaagaaaattgacaggagagcaaagcacaaaatgtgagctatgttttgctgcatttttttccgggactttgattttcctgctgccagtgtcaagtgtatctgtttttacatgtaatttttattaattagaatcagtttcctctccccactcaataaatattaaagaaactccagaagcacactaggctgaaaagcactcagttgggagcctgctggtggcctgtctgtccaaccccacagctgtccagcctggggtcttacagaaaggttggtaccccgacctggctctaagtgtgagtcccactctgctcttgaagtctgtggatgtctggcaaacccagccaggttctcccctgggggacagagagaggatcatggggagggctctgtccctgaccttcaggtgccaccgcaggggcccagagcctggtagtacccgggtcatcaagtcaagttgccggcattcagatcctggtgagttacacaacgcctgccctgcctcttccttctatagaacctgctcctttgcagttggattgatggtaaagtagttactagaaatggcaactagatgttaaaaatttataaagatccaaaggcttaacagctctcctctattactctgaatttttaagtattcaaccacagacagcctggaagttaggggttcacaggaaacacaagcatgcatcctgtttccttctgcagagcacccaggctggctggttcccactgccccttcccatggaagccacagctgcagccatcagcagcctcccacctgtgtatgactgggacctggtctgtcactcaaccttgtcaacctccagcataaacactgtcaggtgtgtgccaaggttgcagtggcaacaatcaagcatagaaggcacaaagcataggaagcacacaggtccatgcacagagggacccagactttgccaagggacaaggctgcaagtccctgttgccctcaaactcacctccctccgaaatacacacacagcacgcaccttgccaagagtcccccagatgctggcatctgctaagattcccattcctgaaagtattctaactccaagattctttctccccatcttccttttggtaatgaacctgggagatctgctggacaacggggcaatggccaggcagcctcccctgctgtgacagctgcctggtggaatgacggtctcacagggagagctgcacagtgcctgcagttcccagggcgcctcctctcagagcctgctcgggcactctcttgcctctcccagctccccagggaggtctctaacaaccttgggagctttcagggaagggggctggacccctcactactgaacagtcccaggagtgggaagtgtcattgagtgggatttgagccactccgtcctcaccactggacagtcccaggagtgggaagtatcgagtgggatttgagccactcggtcctcaccactgggggctcctttacagttcagcatcccagaggatttcacacactgacttttccacttttccaaaagggacgccagcgggcaggagctgtccatggggttaggaaacagctgtcctcacccgcatctccaccagctcctcctctgtctcatgggatcctcgccaggtgccagccactcccgtccttcctcttggagagcgaccccttgtctagggctctgtcttggagctatggctggagctgggccttccagggttctgctgagcacagtgaccacaacagagttgcctctgagctccacagaacctgatgactttgcttggccactctaaccttccctggacctggtttcaggccctacagacctttactccagaaagtctcttttttggcctaagctggccggagccaatttccaacaggaccaaggagccccgacagtcacatgcccagcgaggctctaaggaaagctagactccactttgaagggcagggtggggggcgaggcaggcagggagagtaagcactggacgctgagccaggggccctggtttccaatgcggtcatggccagtcctgcccccttgcaggcccccagttccctcatctgcaaactgaggagctggactacgtaacctatgaattactgcttatcctgtttattcatcaccccaaaaagaaaccccgcacacgttggcaggtaccgatcatccttctaaaactctactaggaccaaggagaaagaaccaaaccaaaaaccagaaacccactcctgtaaaataaaggccaaggccgtcccatggcacgcaaggccttccatggggtcccagcagccgtctgtccctgggcgcacccccagtgtcttcctctctctccgggcttctatttgcacctcaaagcctacaccgctgcccttctctcttgttatagaggtcagtaagtagcagagagctggtaaagatctgtcagcaccaaactgagactcccctcgactcaaccagagagtttaaaatgcaactgaaaagggaatcatttttcattataaagttcaatgctttttttcttctttttttgagacagagtctcgctctgtcacccaggctggagtgcagtggcgcaacctcagctcactgcaaactctgcctcccatttttaagcgattctcctgcctcagcctcccaagtaactgggattactggtacacaccaccacatccagctaatttttgtatttctagtagagatggggtttcaccatgttggccaggctggtctcaaactcctgacctcaggtgatccacctgcctcggcctcacaaagtgctgggattacaggcataagccatggcgcccggccagttcaatgctttttaatatataacagctttatggtgctgtgattaccataccatacatctcagccatctaaactatatgctgaaagtgaacaattcaaccataaccactattgattttagaacattttcatcaccccaaaaagaaaccccgtacacattggcagtcactccccatgttttccccaacctctcctccccaacccagccctgggcaaccactaatctacattctgtctctatgaattggcctattctggacatttcatatacgtggaatcacatgctatgtggccttttgtgactggcttccttcacttagtatgttttcaaggttcatccatggtgtagcatatagcagtatttcattcctcttttattgtcaaataataccccatcacatgtatataccacattttatttatccatttgccggttgatggacatgtgggttgttggtttttggctcctatgcataatgctgctatgaacatctgtggacaagtttttgtgtggacatgtgttttcattcctctcaaagtggaattactgggtcatacagtaactgtgccagactgtcctctacaggggctggaccattctcagtgcccccagcagtgtgtgagggttcaatttcccctcatccccaccaatactcattattcttaggctctttgactctagctatccagcaggtgtgaagtggtgtcccatcatgcttcggcttgcatttccctgacaactaatgatgctaagcatcttttcatgagcttataggtcatttatttaactttggagaaacatccattcagatactttccctatttttaataagaccattttctttttattgacctgtaagagctctttatatattctagacacaaatcccttattagatatacaatttatgaatattttctcttgttctgtgggctgtcttttcaactttcttattagtgtccactgaagtcatgaaggactttcttgaagtccagttcacctatttttttcttttgtccacttgtgcttctggtgtcatatctaagactttgcctaatccaaagtaacaaagatttactcctacattatttaagagttctatagttttagctcttacatgtagatctatgatccatccatttacagttaatatttgtgtatggtgtgaggaaggggtccaacttcatttttccatatgtggatatccaggtgtgccaacaccatttgttgaaaagaccattctttcccccactgacttgtcttggacctttgtcaagaatcaatatgaggatgtatttccaaactctcagttctattctaccaatctatatgtctatccttctgccaacaccacacagtcttgattactacagctttgtagtaagtcttagaattacaaagcatgagcccttcctctgttcttctcctcaatagcattttggttagtctggatcccttgtatttctgtatgaattttaggatcagcttgtcaatttctgccacaaagctagctgggatttgatagaattaaatgcattctggagtcatgtttggtacccattagttcacctcctaggccaatgtttaggaaacattggcctacaaagaaactctgcattagaaaccaagggcttggtcaggcatggtggctcacaccctgtaatcccagcactttgggaggctgaggcaggcggatcacgaggtcaggagattgagaccatcctggctaacacggtaaaaccatgtcatcttgagatgggagccctaagtctatcaactaaccaggtgagccactgtgagcaactctgggccctgggagagggtgcacagagggatggcttcaaccctgctgctagagaatgccctcgagagcgtctgtctcagttctgcttggcatccctccccagcaccccccacctgccactttacgcagcctggacttgactttaaaactgagacacctggcaagtggggaaatcacaggtcgaaatagcggaattgccctctgcatctatgctacagggataatgagggttacaaatcagaagacatttagcatatattctggaaaaaaaaagctatgtaatatataaactattcataatttaactttaataaatgggggcaggcaaaaaattgccaaacaagcccacaacaatcagacaaagagtagaggaagaaaaaaggaattacagtttaattgcactcgtttcctaatcttcagaatcttcagttagcatcaacagttactggtaagtttctaaaatcagtagatacaagctgaagaattctactcaaaattagaaaagtcacaactagtaaaactaatgtataccttccaaatgactgaaggcagaccatatagaaaatatggtagactagaaaaacagcaaaaaaaaaaaaaaaaaaaaatccagaaaaacagaaaacataaattagatgacagaagtaagaacaaatatataacaataaatgtaggctgggcatgatgtgatcccagaactctgggaggctgaggcagttaggaatttgagaccaggctggccaacatggtgaaaccccatctgtcctaaaaatacaaaattagccagacgtggtggtgcacacctgtaatcccagctactcaggaggctgaggcgggagaatcacttgaacccaggaggcagagttacagtgagccgagatcatgtcactgcactccagcctgggagacagagacagaccctgactcaaaaaaaccaaaacctaaaactaaacaaacaaaacaaaacaataaatggtcagatgattattattattattattattattattattattattattattattttggagactccagcctgggagacagagagataccctgtctcaaaaaaacccaaaatccaaccgggcgcagtggctcacgtccataatcccagcactttgggaggacgaggcgaatggatcacaaggccaggagttcaagaccagcctggccaatatggtgaaaccccgtctctactaaaaacacaaaaattagccgggcttggtggtacgcgcctgtggtcccagctgcttgggaggctgaggcaggagaattgcttgaacccaggaggctgaggttgcagtgagccgagattgcatcactgcactccattctgggcaacagagtgagactccatctcaaaaacaaacaaacaaacaaaaacagacaacaaaaacaataaatggtcagattattattattattattttggagacagtgtcttgttctgtcacccaggctggagtggagtacagtggcctgagctcagttcactgagacctctgcctcccaggttcaagcaattctcctgcctcagcctcccaagtagctgggattacaggtgcacaacaccatgcctggctaatttttgcatttttagtagagacggggtttcgccatgttggccaggctggtctcgaactcctgacctcaggtgatccgcccacctcggcctcccaaagtgctgggattacaggtgtgaaccaccgttcccagccagtcagattatttcaataacactctatgccctgcaaaataattttacaaaatttacagatttatgctaggctaaaagagtttctcagattttttgaccacttaaggaacagacacacccatgacatattggtgaccgaagaaggcggcaagcccagctgcagcatgacctccttacgtaaaatcatgtatatctctgtgccaaacgtcagcacagtctaataattaagcatgtggcctccgagtcactctgcctcgattcaaatgtttacttcacctctgactgagtggcctctctgtggacagtgtctgcagggttgaatggagataataacagggtttccatggctgatgtgagggctaagcgagatactgcgtctctagcactgggcacagcacgtgataaatcagccgactggcagcaccatcaccatcatgatgatcatggcatgacagctgttaggaaacgcgtaacaaagggtcagcagtgttacgatcgggggtgagtttcactttttattaatattttctgtattttttttgttttacatttttacaaagggcatatagcaaaacagacaattcatgtgaagacaggagagacggaaagggggagagcacagagagaaagataagggggaaaatggaataaacaagatgccgacaagaatgcctcacggggccagcgcaggggccagccaggcggccttctgctaaatcaagcaacgcttgagtggctccctcgggacctggcctgtccagaatgtcccacactcagccctctgcagccagctcccccatctccatggctcctgcacacaccaatgccggggtagcctccaggaaacagagctggccagccagacccagccaggacacagaggtcagtgggtcagacccagactctgggactgcaacaggcctgcctatttgtgacgagaactgacactcgtcccggccagattctctggctgacatttcccaggtctcgttcagcatgaagcccacgtcggggaacgtccccagtcacaaattaacattcacataaataacagggcgctctctactaaagaagaaaaatgactcgtgctgcaggaacatttgccaaactatcaaaaagcaagatttttctttctgagcttccatgtctcaccagctggaccacagcagattgtggccttgagacgtgtggtggaggagagctcatggaataaggtccaacttccccattcaagatcctgccaacaggccgggcacggtggctcacgcctataatcctagcactttgggaggccgaggcaggcggatcacctgaggtcaggagtttgagaccatcctgggcaacatggtgaaaccctgtctctaccaaaatacaacaaattagcgggacatggtggtgggcgtctgtagtcccagctactcgggaggctgaggcatgagaatcgcttgagcccagaaggcggaggttgcaatgagctaagatcgcaccgctgcactccagcttgggctacagagtgagagactcttgtctcaaaaaaaaaaaaaaaaaaaaaaagaccctgtcgacaggccctcccctgggctggcacctgcccacaccagctggaacctaacacctttgcacagctgttccctgccagcctccctgcctccttggaggtctgcacacaccgcccctcccttcctccaaccagcccaggagaccagcacgcctgagcaccagcactcccagagacagagccggcacggtgggtctgtctgctcagggggctggggtggcaggggcacatgtctgggagttgccaacatatgcttccttaccagattccccaggggacccaccctggagagcaaccaaaccctgcaaggctgcactccaagaactgagggcctggggacccaggaccgtcccccagcattcacagcaggctcacccacatccaccaggagatgctgcccaggtagactgccagcaccccctcccacaaaaggtcggggccggcgccttccctaggttgctcgggcagccatcacagggcagcacaggccggggcttgaatagcagaacctattctctcacagtcctggaggctagagctctaaaattaaggtgtgggcagaggcggtttctctcgaggcctctctccttggcttgtcgacagcatctttcccctgtcctcacatggccgtccccctgtgtgtacttctgtcctaatcgcttcttcttaggacaccagtcattcatgttgaatcagtgacttcattttcagttaattatctctttaaagaccctgcctccaaatacagccaatatcctgatctacgggagtttaggacctcaacaaaggaactgggggatctagggagggcgtcactcagcccataacagcctccaggcgccaagtccacacagaatcggagcaggctgctggcagggtccggtggccagagctgggcgggctgttccttggggagccactctggacaggccggaaggtcaatgccaggatcactccccaggggccagaaatccagcatggaggaaagctgccactccagggaagtaggagcccgcccagggctggccacatgggatgcccatctcacccttccttctaaactgggcattctcacatggggacacggggcagtgagtgcaggcgcagggagacaagaatgctgcacagccggtgggtggtggacgggcctcaggacccctccgccagcagcaggccactctctcacggtccagcaggagccctgctccagagcccacgactggagccagctgaggctggtgtctcacattcctgcagagaggctggctaaggctcccgtgtgggggcactccccatgcccactgcaccccagaattttctgggcgatcccaaggctgagtctacgcagctgttggaagacggggtatgcaattctagatgtgtggcgtgttttgaacagcatccaataccctttctgtggcagctcagcccggagagcaggtccccagtctcgaggacccaggaggcagggtctgctccttcccacagcgggtgctcctccaggaggggccaggtgctcagagggaaaccagtgcccaccaagggcccagctgcctggctggctcccagcagtgtggggaagacacactacccgacggacgtcccccttagaagcaggggcagacaggaactcccatggggagagcacaggctgggacgcagcccgcccaacgccagtccccccactccactgtgcaacaaggatcagcctttcctctctcaaagcctcggttcccccagagggggctgcagttgagagttgatggtgagactcagtggggcatgtcctccatgtctgcttgtgcaaagctgcccagatcaggcagttttcccagccagaggaccccccctttcactttccatcacaggctgtcatctccccgggtccctgggccacaggcccctctcaggacccctccggcctcatgcacacacagagcctgtgcactgcctcactcctgcttcctttgaattgggcttcttttcctgctgtgatctctggggcccactgtgctatccagggcacgctgaccgccgaccgtcctctgcccgcctgcccagctgccactcccgggcgggcagccctgccaggcccgaggctgtctgcttccccttctgtccagagttcccaaaacaaaaatcaggccataccatctgacgaaggatcctgtctggtttatttatgggaagagccagggctctgagggccaggttgtctgggctgtggccaggctgctctgcaggccttcagacactgcccagcccgtgtccccacccacccagggtggctccgggggaggggcgggggcagggccccagcactggtgagcccacactggtgactctgggatgtgtatttattctagagccaggacagcagccgccagggccctaggcccctctgtgggtggttggcccactggagagccggagcagcgaggccagcaatgaccaaaggcgccgtatccagaatgcaggcaggctcaggcgcacctgccctccctggatgccactacagattcggggagactgaactcatgggatcaagtgccccacagatcctggtcctcacaagggacaaggccaccaggtgtcacactgggagacagtggcaccccagggtatgaaaggccacaccaggcttatgtccagtaaccctgcctgcacagcacagcacggcacggcatccataccgcagcacagccccgccctccggcagtgccaagcccgggatctcagggcccccaccagaaaccagacaggtgagcaggtggcagctccaggccaggtgctgaccttgtgcataccaggccttccccgagagcaggctgcagccccccagctggttctgactgccacaggactgcgcccctcctgcagggctctgctcacacccacactccctgctcagagacggcctgtcccaccgccccgtgtgaaatcacacccaagcacagcggaacgatggaggaggcagctggaaggtgctttcggtggtcaaatctggggcaatttgaacacaataataaatgatagtaataggttagaacccattgaataaaataaatatccacagatcagtattggtagaaacaaataactgaataataaataagtgggaggggaagggcagctctttctcacagggtaattcaactaaaaatgtaaaagaaatgatgagatagaaaatcatggtagtaaaccccatcggcaacagcacagtcaggactgcggcaggtacgacttatccgtggaggctacaattagtgagcaaaaggataacaagaaacagaatgctcacatcacgtcacagcagctacccacgggagatttaatcatcgcaatgggaaaaaagagtgaaagagtggtttgctcatcaagccactcatctgagacctgaaaaaacctcacagtcacagccctagagctcccggggcatccagtggaatcccagtaggtaacaccttagccaaatgaagaagggcatcactgacaataggagacaactggacatcccaatgtgacagtcccagcgtggtgccctacggagggcacagtgcttctgtgacagtcctgccagaaacacgtaagctcaagccagtacaaggcacaccagaaaaacccatggggatgcaccgtctacaaaacagctgaccagtcctcttcaaaaacatccaggtcatgaaacctcagatgggaggaaacgggagagacacaacaactaaatgccacgtgggatcctgagggggagcctgaaccagacaaccgacatgagtcggaagactgacaaaattcagtgcagtctggagtgctacggttagaatgtgactggtttgttcccaccaaaactcatcttgacatttggtccccagtgtggcagtgttggaaggtggggcctggggtgaggtatctgaatcatggaggccgatccctcgtgagtggcttgatactgttctcaaggtagcaagggaattcttgctctggagaggcttgattagttcccgagcctgggttgttataaaagcaggacactccctgggtttcccttctttgcacacatgggctttccctttgaccctctccaccacgttatgacacagcacaaaaaggcctcaccagaagccagggccatgctcttgaacttcccagcctgcagaaccatgagctaaataagcttcttttctttataaattacccagtctcaggtattccattatagcaacacaaaatagactaaaactaagacactaagtaccaacgcttagtatcaacctacaaagttcctggtttcagtccttgttctacgttgcatacggaggaagctgggtgaagggcacagaggaaatctatgctatttttgcaacttttcttgcaatttttccaagacagcatagatctaaagttatttcaaaattaaaactttaaacacataaaaataaaactgggccccagcctccctcagtgctctctggccggtccattcttcacattggctgcctttccctggagtggaggcgcccactgcatccccagtgtccagggagcaggtcctgtagaaggtggtaggttccagggatcggggagcaagtacagaggccctgagaaggaagcaagcctggcgtgttccaggaacaccagggagaaccgtgtagccggagcaatgctcttgtgcagagggcctatgcctgagccaccctgtgggccctgccgttcccttcagggcactctccaaccctctgccctgtgcatggggccacggatgccccaggagctctagggctgttgactatgaggttgcttcaggtctcagtgagtggcttgatgagcgagccaccctcactggccaggaggggacttccttcacaggtgtgaatgggactgagccaccagcatgatgctgacacgtgggttttgaggattcccactcacatcagacagaatgagtgcggggctctgggatacagctgcccaagcctcaagcctgagtggcacttgtgggctcctgcatcggctgtggggccacctccgggctctggtgttcaggggtgggcagtggcagcagacatccttcactctgtgcctctgtcactggtgcccagggcggtggcccacaccctcaaaggttccgtgtcatttccgggcagtcttccagggctggctgcatccacctgcttggagtgctttcagagggaagctgttgccctgcaatgccacgacccttcccgtgtcctctcttgcctccaagccgtgctggacatcatgctctcctcccaggctggtctgcagagggatggaatgcctgtcacaactgggatccctcttctcttgtcattctgcctgctggtggcagagtgtggaaggcgggagtgtgcccaccattaaacgaggttgaattctgggagtgcagaagtaacagcctcaggactgatggggaagatgaggctgcaagatgtgtggttcttcccttcgctataaaggtccaaacgatatttatttatttatttatttatttagagacaggatcttactgtgtcacccactgcagtacagtggctcaaacacagctcactgcagcctggaccccctgggctcaagtgatcctcccaactcagcctcccaagtagctgggaccacagacgtgtgccacaacagctagctaatttaaaaaaaaaaaaaaatttgtagaaatgaggtcttgctatgttgccagggctgatgttgaactcctgggctcaagtaatcctactgccttggtctcccaaaatgctgggattacagatgtgagccaccacacctggcccaaacattaaatttaacacgaccagatgaggacgtatggctcacattttcttgcacactctgggcaagatccacattggtggtcatcattaatgaagcacggtaaccaccttcaagggaacaacggaagccggcattcccgggggcagagagaagcggcggagtcaggagaaatgccacaaccagcactaaatacatggggctggggaatgcggggcaagaagatatacagcatctccacacaaacaggttccaaagagccacacattgtgagcggtaacagctttgctattaccccccagctgtgggagatataaatatgaaattagctgggacagcacactcgaccataaagaacaggaagagatagctcctgagcctgagcagtaacgagggtctctgcatgcactgagcagacagtgagcaaatgtgttcgtgcttctcctccccgtcccctaaatcttccttgatacatcttgctattccccatgtgggctcatgaatcttgttataaattttttaatcaaattgtctatatagacaggagtcctgcaggaaatatatgcccagggccccatgtatcctagggacagccagccatgcctttgggaacagcctagaaggactgtcaggaaggggcctgggtgggtgggagtcagcttgcccaaggtgactctctctccttgcaagatacatctgagagagaagcccattgtaagcagggccaatccaagctcccaccccaccctggagtgcagaccactgcccagacggcttcctgaggtcctggctggggccctccaaggtaccccatttccaggcctccagccccagccccccaatagcctgccttgaattgtcttctgcttaagtgagttgaggtcagttttgccatccaaagagaagccctcctgttttcctagaggttgtcaggagctacgctggccggtcccctgggcttgggacatcctctgttgttggggggagagggtgggaagcgtctttcctgcagccatgacctcaccttggtgacagccacagcttctcactcacagcactggtgtaagtgctaacctgaagccgctcctccttgtccacggggaagacagtctgaccccactttcctctgctccccgaaaataaggaacgttattggtgttgctttgtcctgacagactcacacgtccttaaaaagtgctaatcttcacaaaagaggcagcggcctgtgccttccttgaggaaagtcagattaattagctgactcccacatgagcagcctctgattcttgcaggctttgtttatggatcagaaatcaggcttgaagtgaaaactgacatctcaatgtgaagagtattttccctgctaactgcagtgagtcagagccgtgcgctgagctagacagatagggaacatggccttcccatgtggactggagtgtgccaacgcctccgggccacagcccaggacaagcgtgggacatcagcctcccattgctaggccagaacaggccagtgccccatagatcccagcccaagacaagcaccggagttggcattccagggtagggttttgtttgtttgtttttctcaagatggagtcttgctctgtcgcctaggctggagtgcagtggcatgatctgggctcaccacaacctccacctcctgggttcaagtgattctcgtgtctcagcctcccgagtagctgtgattacaggcacacgccaccacacccagctaaattttttttttttttgtatttttttagtagaatggggtttcatcacattggctaggtggtctcgaactcctgaccctgtgatccgcctgccctggcttcccaaaatgctgagattacaggtgtgagccaccgcacctggccaaggtttttttgtttttttgtttttttgttttaaggtatttgtgcatctcaaacattccacttaatgactgggaactggggcctgcaatcccagcacttttgggaggccgaggcaggaagactgcttgagcccaggagttccagaccagcatagtgaggcctcatctctacaaataatttaaaaattagctgggtgtggtggtgcatgcctgtggtcccagctacttgggaggctgaggtgggagaatcacctaaaccctgaaggtccaagctgcagtgagctaagatgctgccactgcactccagcctgggtaacagaaaaagacactttcaaaaagaaaaaatatgactgggaaccgggagaaagatgttgatgaaggcacgcagcctacagtcagagctgacagcccagaaacacgtccagccagccaattatttttaatgaatgcccttcctttggtgactcaatcccatgaacagggaagatgggtgcatggctagaagctctgtccaggctccgagggctgcccagcagacccaccctagggggtgccaggatcaacccgacccagggatgctgagcacccatgcaagtctgacccacccacgtggcccaaggaggcagcttgtggaggtccggaatggtggtctggagattgggcacccacagacttggggagtggaagggccaccccaagccctgcccccgcccccactgcagcttccccgcagggctgcacccacatccgcagggtggcccctgccccgtgtgcccagcttccaaggtggcctgcccctgatgccagagaaacttcctgctggccaagcggaggggcttgctttctagggtcagcaggaaatgtcaacattttccctgaaaaatccttcaattccctcattgagtctccagtagacttaggtcatgtatacactcaacaggacaactcttttccaccccaaatgctgacagcctctgaggcagtctaaagaaggaaggaagagtcactgtgcagactcctggcatggaggccctcctgtcgctctcaactactgcctctaggcgaacgggcctgtggggaacttggcgggttcccactggccgcatggatcattgtttccacttcaaaaccaggccttgagcaccctactggaggctgctgggtttgtctgtcatcctcagagcctgagagcatctggcaccaggcctggctgaataaatagattctggattagaaaggaaacctggctttgaaaagacacagagaagaaccaggtccctgcgtcccttccttccaggctgatgttctgggctggcgggtctctgttgggctccccaccccttcaccttctgccctgtcctacagcccagtaggcagacctgatggactggctcctcctggctctccctgggtgaaggggggcaccgacaggaaaccagggctggggagagagacagaaggttttatttctcccgctgtggtggcccccagcctccccgccctgcaagctccctcgtcctgcccgcagctctgtgagttgtgcctttgtcaactcctttctgttgatcccttatgtgtcccaggcccctgactgatccgacatgccctgtagcccgaccaggcagccctcactctcatagtccaggtgctggtcccatctctagggtttgggatgggacttccacactccagcccaatttccaccctgaagcacacgggtgagccagttccctgcaaccaccacagactcaggacacaaagtcccaggctggtccagaacattctgagcagggcagaggagccccgtccatggcggctggggcagtcccgcaagtgagagtcggggtgggaggagctggaggctctggaagggattcaggagcagccaccaaggccaccttccacacacgtcctcaaaagcccttccatattccgctgaaaccactagtggggcctgtgctgggagcaagggaggcgtggagacaggtggggctgtggaaggaggctgccatgaggagggaaggctcctccaacccaggacgccccactgcaggaggaaatgcctttctggctgtggtccaggagactgagggtcctgctcagccacacagcacgtgccaaggtgcagagcccaggggaagagcaaaccgaggagctggcggtgcctcggacgatgcagtgatggtgaagcaggaggatgggggaggcctgagccgtggggacaggagaatgaccacaggatccacacctctgtggtccgtgggacctcagcagacgctttgggtgatgccagagagccatggaggaggtggcggcaggggctgtgcttctgagaatgctgacaatgatgggacccgggagcagccggagctcaagggacgggcaggggcaatgccggggcctgtctgtgctcggaggagggggaggtgggtgagcaaggaggtgggtgagcagggagcgggaaggtcccaaggggggatgctgcctgcagaggccagcagtcaggaatgtcgaagtagatccttcagcgaggctggggcccctgctcggaggcaggaaagtaagggaggagggatggggctggacccagcaattcagcaaggaaagcaggaggcgggagacagtggtacaggcagggagcaagtacagcaaagaggaccagtggcatccgactcggataaggaaggaccgcaaggcaggtggagatgggctcagtgggtaaggtccccaggggcggcctgggcagagggcaggagggagaggcggcgggcagagagaggctgctgcgtgctgtgggtcaggagggtggtgcctgggaagaccagctgcctgcctgctcccagggtggacaggggacaagtcaagcataaagatgcaaaggtgcaggccgaaaaaaggacgggccactggtatcactaacacaaccatcaatgggtttaacattgcagttagagatcaaccagactgagatggaacaaacaaggcatgccgtctgtaacacatgcctgaaacatgctaaaagagagacagagaaaactgcaaacccagaaagcagggtgtctgtagtatcatcaaaatagaactcagagcaagtactaaatgactggaaactcctgttgtattgacaaggcttggtgaaagcacacagtcaccaagctttacaaaccaagggccgcagcatctgccatggttagaaacacaagtggctcaacagccctgtcaaagggaaatgcgaacggccactcccagtgggtgacaggtctcctagaccacagcagaggggcacagactcattgactcgggaaatgggccggattgatttctggatggatctgacgacttacaaccgaaagcaaatgagtattctttacaagcatgggggagcatttacaaaaattgatcccggcctcccctgcctgcctggcctgaatcccccaagcctgtcagccgtagcctcccaccccacctgcctggcaatgcagaaacctgagattgctgcttctcggcaccaagaaccaagaggtgaagttggtatggggacccccttctgccccactccctgctagtactgtccagccagaaggccctccccacagcctgcccctttctcttgactgttcccttccccaatacgctgaggccccatgtctcccaggaccctccctcaagaccccggcttccctctccagggtgacttgggcccttgcatcatggggcataatgccaactccccacccctactgatgaagtcactggcagagtgcccccaacgccctccactataatcccagaggacggagagctcttgctctgagccgagacaacccactgcccaccaccagctccctcagggctctccacaagtcccttctcgcctcccctgctgcgtcttcggcctcctcctctctaaagtcctctctcagcccaacaacagaaccgggtctcttcaatcctgaacaagaagactctgcttcccctccagccacaggacctcccttccctcacagcccttctcagcaggctggcctctgctgctccctcccacgcaccaatgcccatggcctctgtccctcctccccagggccccggggacctccacaccctcctgctcagcctctctctggccgcccccagctgctccggtttccacagcaccagaggccagggtcccctcgtgccacagtgaccctgcaacgcagattccgtgctcccttcagaagcccacctgacattcatagaagctgagcaaacaccaggagacagaggcaatttcagaaattccccgaggctcggggaacccaggctgtccccttcactcctaactctgtggcaggcctggccctgccaagcctccatggagatgagctcttcctgtcccaaggtgatggtgtgaagcgggcctttggaaggtgatgaggtcatgagggtggggaccccgttaatgggattagtgcccttatcagagaggcccagggagcttgtgcaccctccactgtgtgcaaacacagcaagaaggccccagctatgagcgaggaagcagccctcaccagacaccaaacccactggcgccccgatctcacatgtgagactccaaaactgtgagaaataaacttctgttgtttctaaacacccagtctgtgatattttgttatggcagcctgaacggagggacacctgcagagcctgggatgctcagaatacacacgtggcaggaggggtgtggacgggctctacggaactgggagatgcctagaaatgctagaggggttgagggggaggcattcacaagcccttgtaggaaactgagatctgcgctggttaggggtggggtgtcactggaatggcaagatgcagatataaatgctgacaagacccaatttaaacccagagatgctaaggtctgaaaacatttggattatactaggaatcaacgcaaagcttaataacctaaaatccaaccactcggaagttttttcaacattcctctaaatagctcttaagttactggaatcaaaatcataaatctttttaaaatgatgacagtgagaattcagcacatcagaacctgtggatgagaccaaagccaccaccagaagcaagttcacaaccttcttaattatagaccagagtgaaaataaatgaagccagtgctccagtcaagagggcagaagagagagcaaccataaacctaaagatgttgatacaaatagcatgagtgacaagatctcacttctgagtgtgacatatatgtaacaagatggaaaaacggttagtttgtatagctgtaacaaattactgcaaatgtagtggcttaaaaacacaaatttgtccaggcgcggtggctcacgcctgtaatcccagcactttgggaggctgaggcgggcggatcacgaggtcaggagatggagaccatcctggctaacacggtgaaatcctgtctctgctaaatatacaaaaaatcagccggccgtggtggcgggcgcctgtagtcccagctacttgggaggctgaggcaggagaatggtgtgaacccaggaggcggagcttgcagtgagccaagatcacaccacagcactccagcctgggcaacagatcaagactccaactcaaacacacacacacacacacacacacacacacatttattatctgacagttctagagatctgaagtccacaatgggtctcactgggctaaaatcaaggtgtggggagggctgcattccttctggaagctctaaggagaatgtttccttgtttttttccagcttttagaggctacccacattccttggcttgtggccccctcctccatcttcaaagccagcaccggagcatctactgacccctctctgactctgaacttctgcctccatcttctacttttatgaatccttgtcatggccagctcacacctgtaatcccagcactttgggaggctgaggcgggcggatcacaaggtcaggagatggagaccatcctggctaacacagtgaaaccccgtctctactaaaaatacaaaaaattagccaggcgtggtggcaggcgcctgtagtcccagctactctggaggctgaggcaggagaatcacttggacccaggaggtggagcttgcagtgagcctgagattatgccactgcactccagcctgggcgacagagtgagactccgtctcaaaaaaaaaaaaaaaaaaagaagaatccttgccattacactgtgccatccaggataatctccttatcttaaaagtcaactaattagcaacctgacttccatctgtaaccttcactgcccctgctatgtcacctgatttattcccaggttctcgggactgggacatggacaactttgggagaaggattattctgtctctcacagagactatctcaaaagggtaggatttcatggtttttgctttctccttaatacttttctacattattcaatgataatgaccatatgttttgtatgttcaaaagtaatttttaattgtgaataatgtaaattattgtgaatcatgttttgtcagttgttgtgaataatgtttaattgtaaacaatggaaaactaaagaaacaaaagaatagcatcctcttatagcacccattgatgtctttgcaacactttttggctggtcttttgtccccgtccccctgactttgagctgcctgaggacaagccagaccccccttcacttctgtggctctagcagtaagcatgaggactttggcacagcaggctttagcagacgtttctcaaagtgaagataaatccccttataaaggaggccctggtttaagaagaatgatgtgcacactcaaaagtgcactttaaggccaagctccgaataaacacgatgatattattttatttaagagtcttcatacatacaacttaattcagtaacagtctgagaaacgcaagccagcagacagataaaccgttatggctctggctctggcaaaaactcttcatctacgcggagccagaagaaagccaattaaaagtcggagaggtcccgcaggacagaggccggaggatgtccccacacactgagcacaagccccaaacacaggcttccccagtctggagccggcggccagccccctcctggcctcagtgaagcctggactcctcactctgtccaagtgggaggaactggtcccagctgcaagaaccgcctactgtgatctgggcaaaggttctggaggctctgctcgctcctgtcccccaggaaaaaaaaaaaaaaaaagacagcagagggcattgctcaggggcccagcctggctgtcatccctgaacatcctgggctgaaggaaagaattgagcccagccgaaacttgagatctttagacttaaatccccactctgtcacttgtggctatttggcctctttcgacctctgcttttccgtgtctaaaatggcacaatattacctactttacagagttgtcaagggattgaaaataagataatgaaggcaaaggaagtgagctcagtatcattatgcccattttacagattgggaaacaggctccaagagatgacatgactctttcaggattagacagctaatgagtggtggatccggatctgctcgcacagggctgggctcctccccagccccgcactgggacaggggcatctcttgagggctgccctgtggcgcccagatgccgcagggagacaaggctgtgtgcacagatctctctccactgggcagcacctgagtaactgggggagagaagtgggtttcaagcatctcctttgtgaaccactgggcttaagtatgctgaacttcagttttgacgcagaacttggagacaacccatcctctgggaaaagacacaaatgagggcaggacccctgcaccatgtgccctgctgccccagcagtgtcctctcatccagcgtgtgaagaaggagtgcagccggagagccggtggcagcagggcgtgcgggatgccccgctcacagcgtgctgtgcccgggagaggagcgagggcaggcccccagctgcttgggaacagtcagcctgcacacctcgcccctgggtgcccttccaaggcagccctcaggccccaggctccgggactccctgcagaggaactgcaagccagtcctggcccagcacagcccttccgccagcctctggccagcgtcaggaaggggagtgtagagtgagtaggaagccacacaggagcagaagccgggacttctgcctctcaccccactgcatgtatgaaaatagacgggggtgatggccgggtgcggtggctcatgcctgtaatcccagcattttgggaggctgaggtgggcggatcatgaggtcaggagatggagaccatcctggctaacacagtgaaaccccgtctctactaaaaaaatataaaacattagccgggcgtggtggggggcgcctgtagtcccagctgctctgggcgacagagcaagaccgtctcaaaaaaaaaaaaaaaaaaaaaaaaaaaagcgggggagtgataaggccccggacaacccaaactgcagcaagattctctgcggaggcagagctgcctcctcctgggggtcctctggaccaggaaggagccctgaggacttgtggcccagtgggtccggcttcccaacctccaccttgccagcagcaccgatagatgtggccacaaaggtgcattcacatttgcgacctgtggctgaatgcagaccctgggtgctatctcccgggggggcaaatggcagtaagcaagcaaagaggaagtcgacagagagtgacgcagccgtgaggacaacagcacagagtattgttgaggggggcgggggacttcctggaagagatgacactggagctgaggcctaaatgattggaaagaggcagcgatggagagatctggggaagtgggctccagcacagagaacagcacatgcagaggacccgaggtcagaacagacctgccatgtttgaggaaagggaagaaggccaatgtgagtggagtgtggagagcaaagggtgggcgggggcgagggacaggagggcagagtggtgggcctgggtggggtacaggagggcagagtggtgggcctgggtggggtacaggaggtcagagtggtgggcgggggcagactgcacagagcttcctctgctgtggggaggagattggattttctcctctgtgcagtgggcagcccctggagggtggaagagacctgattcccctgtcagttgctctgggcatgttgtgagaattgctgggggcaggatctccctccctctctctatgaaattcctgttcagcagggatctgcctatggctgtatttctgctggtagaagtccctccctgattataaaccgctcaacacatagagaggtccctaggagaaggttcaggttccagtaggatggtgtgagcacgcctcacctgcatcccccactgcctgcagccacccaaatgcactggattcatgagcagctagctgaggaccctgcaaaataaataacagcatgcagattggggaagaagactagaatgtgaggttcagcaaacccgcagagtttactcttcattctctggtattcctcagcctagatacaaggcaggtcaaactccagaagcgggcactgggtacagacagacagagctcgagacaagccctgttgttgtagctcaaggatagaaaaagcatttccgaatgctcagagccaagccaacacctcatttttctttcctatttcctttttcttttcttcgtgttctcacacgccagctcatggcagcccacaggcacctaaaactctaagaggggagcctggctgtgtagctggaagtgctgtggtcctagaaaggtggagtgaaaccccattgctctttcctcttttggtcctcccaggagtgtagttgcaggaagtgtgcaagacagcagggtcaataaagccccagctttctggccagagagatttaacaaggagccgcaggaaactggacagggctaggaagatggcagagacagcagagcttggggaactggcatcagaaagttggttagaaactcctgggctcgtgcttgagccgtgcacgagtgggtctgaccctaaacaacacgccataggttctggggactgacttaggaggtggaccaatgcccaggtcccagacgtgccactgggttgtgtttacatgggattgatcagaataggactgcacaggctttgaaaatggacctgacattgaaccgcaatccacaggcacattggaacttgcagccggaacccaattaacccaagggttaattacctgatcaaacaaaaataatgaccttctccatagcatttaaacaagatccaaagtctcatagggtaatatcaaagtgtccaggatacagtccaaaattacttggcataccaagaaccaggaaaatctcaactcctccaggcaaatacaaccaacagataacaagactgagatagcacatatgttggaattaactgacaatgatcttaaagcagctattataaaaatactccataaagtaagggcaaaaactctggcaactaatggaaagatagtctcagcaagaaacggaagacatatttttaaaaaggaccaaacggaaattttagaactgaaaaatacaataacagaaactttaagaactcactggataggctcaagagcagaatggatatgacagaggaatgagtcagtgaacttgaggatagagcaatagaagttacccaattcaaactgcagcgagtaaaaatattttataatgccaagagccttagagactgtgggaaaataccgaaagatctaactaacagtcatgtcccagaaggagaagagaaagaatgtattactaaacaaatatttggataaataatggctgaaaacttctcaaattctgtgaaatgcataaacctaccaattcaacagatcggcaaacctcaaatgagagaaatccaaggaaacacaatcccacacgttataaacacactctgaaaactacagacaaaaaaaagtcttgaaagcagtcagagaaaaacagtgcattacttataggggaaaaatggttcagataactgcagatttcttatcaaaactgtgaagtccaaaggaagtgcaaaacattgttaaaatgctgaaaaaaaaaaaaaaagaactgtcaacccagaattctatctccagcaaaaatacacttcaagaattaaggagaaataaagacattctcagatgaagcaaaacttatagaatgtgtggccagcagatctaccctaagatggttgctgaaggaagttcttcagacagggggaaaatgatgctagaaagaaattttgaacatcaggaataaaggaagagcaacagaaatacctgaaaaaatataacagattaggctcttgcgtattttaaagaggaatgataatgctgtctgatgtagttttccatgtatgtaggtgtataaaagacaacaacattcaggggaggacagagggacctatatgatggcagggtctcaacattcaacttgaagtggtaaaatattgatttgaaaaagactctgaagagttatataggtttattataatccctggagcaaccagtaaacactatacaaagatatacaaccaaacacaataggtaaattaaaattgaataccaaaacatgctcaaatagaaaaagcaaaataagcccaaagcaagtagaagggaggaaatgataagagtaaaaatcaatgaaactgaaaatatgaaaataatagagaagatcaatgaaaccaaatttggttctttgtaaagatcagtcaactgataaatctctagtgagactgaagaagagaaacagaaaaaaatatgaattaccagtatcagaatatttttaaaaaggatatcactaatgacatcacagccataaaaaagataatggaatagtataaacaattctatgcatataaatccatcagtgttgaagaaatgcatgatttcctcaaaaactataagctaccaaaacttacccaagacaaagtagatagcataaaaagttctgtaactattaaagaaaaagaattcatagtttaaaatcctgcaaaaaagaaatttccaggtctagacggttttactggaaaattctactaacctctcaggaaaaaatggcaccaattctcccattcattttatgaggtcaacattaccctgatattaaaaccagacaaagacagttcaataaaaaaaaaaaccctacaaaccaatatccctcatgaacctataaaccaatatccctcaatgaacatagacacaaaaatcctcagcaaaacactggcaagtctagtccagccatgtataaacagcagagtgcacaacagacaagtcatgtttgtcctggatttgcagagtctggcacaatatccaaaagtcagtgtaacccagcatattaacagactgaagaaggaaaaaaaatatgcttatatcaagtgatagagaaaaccatatgatatgattcattcatgactaaaaattaaaaactctcaactaacagagaaagaaacgtgctcaacctggtaagaatatctacaaaaaaactaaagctaacacaataccgcatcctgagaaactgttttcccctaaaataaggagcattttcacgactcctactcaaccttgggttgagtcctagacagcacctctgtacacacccagcacccagcacagaccctcaggccagggcaggaaagggccccagagagcttccccaaaacccgtgttcctggggaaggtggatgtccaggaagggtgactggcccctaaagcctaggggaagcgggggccctcctgctccagcctcatgaagctttgatctccagtgccaagcccggtgccagcagagagccaggcagatgaactcaaccagggaaaggacacccaggaaggaagcaactccatgagatcgagtctcatagcaccaagtgctcccacaggctctgaggacatggctcttattccaggaccaggcctgacaggagcacagcctgagggatgagagggcagggcagtcttctgctgggtggggaattggccaccagggccagtcccacatctgttgtggccctggcaggatcaaccctgggcctgagtccttggaggtgaggccagcacgtagtagaggggcagccgagtaagaagaacctctcggggaagtcagtggccagccagcctaagcccggcccagaccctcgccctgctagcatgagacagacacagggggcccgcactgcagagctgccccggcccacgcgcccctgccctgctgtgctccgccatctgccccagcagtgctgtgagagcatcgcaccctgcaagcctcagccttcagggacggcaagacctggggcccacaggaggtccaccggccctctcagggctcgagcacccggccaaccctgggtggccactgctcagcactccaggacagctccatgacacagaagcagctctgcccatgagcattcaacagcccggtccggggggcaccaccacgcaggggcttcccgggtcatgctgcaccatccactaatagcaccatcacgtatgccaggctgggagcccgggcgtcccaagcctgtgacctcattctctatgctcctcacggctgccccacagaatctctgaaacacgactcagacctgtcactgcctgcccaaagccctccagcggcttcccaccacatgactgccccggtccccgctgatttctccttcactcaagtgccagccgtggagatctcctctgtgtccttggcacacttcaactcagcacctgcctcagggcctttgcacctgctgctgcctccacctggaatggccttcttccagaagtccaggtcctagctccgatgcctcctcacaaggaccttggtgaagggtgtcccttctccatcacactccacactgccatcctgtcctatttttttgtaacaccatttcccaatcatcgacacgtgggttctttattgggtcactctctgccccctgaccagggatcttacgagagcaaagttgtccttgctgggtccacgtcaccagaccagtgcctggcatctcacaggcatggagttgagtacgggaggtcgccggccctcccgaggctcccttcccctacttcaggatggtgtaaggtttccttgccaaggtccctgtggtgcagagtgggccaagtttgccgccttctggagcgacaacaaggagaaaacaggggtttaagtggaggatccggtgctctgatttctccccagttagtaaagcattcaggctgctcggtggaggtgggaagacaggcgctgagagttgtctgacacaattgtcttagcagcaggagacgctgatgggatgtcgggagtcaccaggaccatctgacaaatgaccgccttggggatccgtggagctcagcggtgcccagagagagcactcgaaatgccagctggaaaggtcacgcacgccagctggaaggggagccgcgcagcccctgggcaggctgaggacaggaacgggcagccgccactgttcacgagcaagggtgcaggggcaccagagcccacaggagctcctgcaatgcgatgaccatgcctgcaggcccccataatagacagcctcattttttttttctaggcaaaactttgggaggatcctttttaattgtatttgcaaaacagtttctcccaacatgatgcccatgtgtatgtggattgggggaaattcccaaggcctctcagagaagtgcctccttcctaaggtggtgtcccagcagatgaatctggctggcgtcctgagtggaagcagggcgcgggctgccatggaaccccaccctcctgcaggttcctggcccctctgcctcctcttccttcccaccccaggggccctgggatgcagctaggccagctgggagccagacagccactgaagccctcggggtactgttccctgcctttagcatccccctcagctgcccattcattcagccattcttctaggaggacaggccaggccatggtgaggccctgggtccagggaaagatacgaagagggctgaggcgggcgttcctgcccttgggtctcttccgctgccctggcagccccgtgcctcctgactgtggactggagttctgcagctgcgccatccacaggaagctacatggagagatgggccagctcagcagagaggcgcaaacaccaattcagttgaaaactctgtgttccccgggtagaggccagttaggagccagcatgcctcccaagggttgtgcagggagacttcagccaggcacccactggggcagacccagtcccactgcttctgccttcagtggccacaggcctggggccattggtggatagagctggagaaaggccacctcttcgggacccaggtcacaggatgtccccccaaagccatcccagtcagatgtctgcagacacctgctcccctggcaacagtgacccagacctgaccttcaactctaactgtgcacagcttcctagcccggcccccaagcctgaagcctggtccctccagacactgcagaaagctggggctgactgtaatcccagcactttgggaggccaaggtggggcgggtcacgaggtcaggaaatagagaccatcgtggctaacatggtgaaaccctgtctgtactaaaaatacaaaaaaaatagccacgcatggtggcacgcaccggtaaccccagctactcaggaggctaaggcaggagaatcgcttgaacctgggaggcggagttgcagtgagccgagatcatgccattgtactccagcctgggcaacacagcaagactcagtctccaaaaaaaaaaaaaaaaaaaaaaaaaaaggctctggccctgccacttgaccgggtgggtcacctctccgtgcctcagtttcttctatttaaaatgcataggggaggagctctgagggcaaaacaccctgggtttgcctcagggcagggcaggaccctggacccagcaggcccccactgcatgtccctcctgtcctccctgccccacccctgccctctggcttctggggttcaagtcagggaggccttgggagtagcctgcggccctggggacagacaagggtgcccctgaatgtcctgtggatctgcccaggttgatgccttgactgctccttcctgtcacccaggaccctccaggagagaccaccccggactacgcctgcccagggctccctgcacgtcccatgtccccacagcgctcaggcgctgagatgctctgctgtctgctgtgggggcctgtggacggccctcctcccccaccaggctgcagctcccagcgggcagggatctaggcatgccttgctcataccacaaggcagaaacacagtgaagaaagacagagaactggtcttgttgtctttgggggctcagccccccagctccaagctggaggatcaggaggcatctacaagcctttccgaagcccccccataggctgccttgcagggtacagtatggcctagagagccccagagggctcccctggtcattaaatatctcaggatttccaggaacaaggagaggttcaagtccacagaagaatctgattggcgtctctgggccacccaccggtgctagaatcccggctggggtgagggatggtggtgcagagcctggctatgcaaaatgtggcctggagcagcctgggggcccccgggagcttgttagagatgctgaatccaggccccatccagaccagctgaactaaaacctgcattttggcaagttcccaggtggtctgatgacattgaagtctgggacacactgctctagaccttcccagggtccctcaaaggtgggtgtagaggccctactgccctgccctggggacgcagaggcatcagggccttagtcctcctggggacagtgaaagggccaccaccccagaccatggccaaactgcaggggtcagggaggcatggcccaggacagcagctcagcagggtgcccaaccccacctgcccctgcctgccccaacccacttgccggctgggtcctctggacctccgcccctttccaccccaggttggagccaaagaccaccctctccactccccagccccccaccccccaacccaccgagtgcagggcccgttgactcctatctcaacaacaacaggaaaccatttttccagacagcattatataaggggaggatgcgtatgttcagcagatgttcactctgaggccgagcctcccccgccctctgaacaggaaggccacgtccccatccctctcccccagggcctggcgctcctggcccaggtggagctggcctctggctggccacttctctggaagggcctcgtccagctctgtcctgtgcagggtcatgcccctccactctgctctctctagcccatgggcaggcgccgcctggctcagaggcacagcaatgggccagggtcagacagtggtgagcagcatgccaagaatcacagggacatccacctgccagcaaagcctcaatgacaacaaaggacctgaacagtggacactgacagggactctcctgcttgaccaaactttagtccagctcctgaaccttctccttcgcccacttccttgtaagatccagtttatcaagaactctgctaagtcatgaatgccccatctctccatatctgatcacccttgatatctggtcaggctcgtcctccccatcacccctctggtgatgtctggtcaccccagcctgtcttcagctagaatcatgttaggtgagtttagctagaatccccgacccctgatgttgctcttagtaattccccatcccctggcccctaccctgctccttggctatcaccccccactcgcccgtgctgtattcggagttgagcccagtctctctccccgactgcaagagcccactctagcggttcctgtgtctatctccatggtcctgaataaagtccgccttaccgcgctttaacaagtatcattgaatcatttttcatttaacaacactctgccttgctgaagggaaggtagaaatgacagcagtggggaggagggagaaggggcatgggaaccctgtgccgctaagggcatactctagaccctctgccccaggctaatgttagaagctgcagaggtgcaaatataacagtcagacgaccatggcagtggtcagctgaaaaatggcccccgaagacacgtccgggtcccaatccctggaacccataaatgttaccttccatggcaaaaaagaactttgtagatgcggtgagtccaaggatcctgagatggagtgactgctggattttccgggtgggcccagggatagacagaatgtttatattccccccaaattccgatgttgaaagctactcccccaaggtgatatattaggaagtggggcctttgggaggtgattatgtcaccagattccatccacacgaatgggatttgtgccccgatcagagggaccccagagagctccctcaccctttcagcatgtgaggatgcaacaagatgccttcttgaaccagggagcagaccctcaccacaaccatatgcacagcttccagaaccgtgagaaataagcttccgatgcttttaagccgctccgtttatggtatttggctatagcagcctgcatggactaagacaggccctaaatgcaatcacacttctctttatcagaggaaggcagagcaagatgagccaggcagaggagaaggccacgtacaggcagagcagagggagatggaggatgtcggccctgaagcccagagcgaagaggccacaagccaagcactgctggctgccacgaggacctggaagagcccaggacgcatcctcccctagaggctccggagggagcgcggccctgccgccacctgcgttttgccctgttgaaactgatttcagcctccagaaccgtgagaggatacaattctaatgtttcaaaccagcaagcttgtagtaatttgcaggcagcctcagaaaccaatacaatggggaactctgatatggactaaaagtggtgagagaattatggtagaagaatggggctgggaggggcagcagtgttgtcagtgagctaaaccctcctcttccagggcaggaagtcaatggacaacatcgaaacccgatacatcaagaaacagcaatagaatagcatttcaggacttcatggcaaccccagaaccagccagcagcctaaagccttaccggggctccctcctcaggagtggcctgtgaagaggggacgcacacgcattcacactcatgcacacacacacaccgagacagaggagggcctggccagagcaggggtgtcagcagaggggacgcacacgcattcacactcatgcacacactcacaccgagacagaggagggcctggccagagcaggggtgtcagcagaggggacgcacacgcattcacactcatgcacacacacacaccgagacagaggagggcctggccagagcaggggtgtcagcagaggggacgcacacgcattcacactcatgcacacactcacaccgagacagaggagggcctggccagagcaggggtgtcagcagaggggacgcacacgcattcacactcatgcacacacacacatcgagacagaggagggcctggccagagcaggggtgtcagcagaggggacgcacaagcattcacactcatgcacacacacactcacaccgagacagaggagggcctggccggagcaggggtgtcagcagagaggacgcacacgcattcacactcgtgcacacacacactcacaccgagacagaggagggcctggccagagcaggggtgtcagcagaggggacgcacaagcattcacactcatgcacacacacactcacaccgagacagaggagggcctggccggagcaggggtgtcagcagaggggacgcacacgcattcacactcgtgcacacacacactcacatcgagacagaggagggcctggccggagcaggggtgtcagcagaggggacgcacacgcattcacactcgtgcacacacacactcacaccgagacagaggagggcctggccggagcaggggtgtcagctccaggaccaggagttcccaggcagaacctgatggtggggcgggggggttcctcacacaccccacacccctgcctatgcccagacctccagcttcaggctctgcatccacacggaggcttcggattgggcgcagcctgggagcacacagaccggccagggccagggccaggactggcatttcccgggctcctggtcccatcctgcccctcccaccgggtcggccctgtccttgtcttgctcagctcgggggaagcacctctcgccagccatctggggcttggctgggcctcagcctcctggctgccacgtctcactgggagctgggcggccgccagctctgagctaagtgagcgcagaggagagtgcagggagcggcaaggccaggctcctccccaccccgtggcgtggcgtggcgtggccggaatactcagttttccctgctttttgagacaagagtagtaaatgcaccgtgctgtactcagagcccaggaagcagccctcccacccacagcgctcctgcctctgcagccccccgggccgtgtctctctctcacgggcccacatcctcactggactgtctcccttttacagatgaggtgagacagcatgcagaggcccatgtgcttgtcccacagggtgacgggccagaattacaagcccctgattctgggggcttccacgctcttccaccaagcccttgtagccttcctgcacccaggtggggctcctgtcccccgccagtgcccccaacctctactccagcagacctccacctacagacaggagtcttgggcacacacttttttgtgccaggcccaaccaagagctgcaagggacataggaatgtcccttagcatggcccgggagcctcaagcccagggcctacctagaagtaactctctttcctgacattaagcgactcccctcccagagcctaatcacagccagctacgcccccttctcccagttattcaagcctggaaggaacctggaagtggtactggattcctacacccaccccccccacaatccccaaggccccaccccggcctcctcctccccctgcccctgcatggagcaggcctcactcactctctctcttctgttcctcctgggtccctgcctcagaccctcccacctaacacagcctctgccccaccccagagggctcctcccaagacacgcgtccacgtcgccatggacaagattaaataccctggcttctggaaagcactgaggccacagttggcttctggaaagcactgaggccacagttggcttctggaaagcactgaggccacagtgctttgggaaggtcatgtcgggatcccagggctgactgcactcctgccagtgaagtgggggtgtccccaaagggggtttgtttcccaccattgggagccaggatcccaggtcaggaaacagagcttgggtgggagggaagccatctctggggactttcctcccatctcccttgtcccgctcacgaggagaagccagagctagaagctggcatgagccctcctagcaccaccagccacagtctccacctccggggacacgagctgggatctgagtggcgcaggtactacgttctagagacgccgtacccaggaccgcccatggcacgcagaggaaaactgaaacaacgatccttccagagacaaagcacagccccagatggccacaggaactggccgcccccaggagctgctgagcacaaacgccactggagagagggcttggtggctgcaccgaagagcagaacagaggaactgaacagccacagccaccgcagaactgggggatctggacagagctctcgctgtgtgctaagaaaggagcaagagacagagggcagggagaaaagctgcgagacgtgggcaagtcccagaagagagtcggggaggtgagagaaggaatatttcaaaaaacaaaattacatgaaagattccagcatggatgggttcctagaggccttatcaatacatatataagaaaaagctccatagctagacccacgataatgaaacctaagaacatcaaagacaaagagaaagttcaaaagctcccagagggaaagagcagatcagatcagtgtaaacagggaggcagcaggcagacatccaagtcccagactggggcgtgggcaccgggcagcagacgggagacaagagcccaggaagtcctgctggcaaagaattcaaaggctcttgcctggagggaagaggctgccccattccgaggccagagccaccgcagcagaggacagctgtgtccctcagaggggtcggcagggacagaggccacaccagagcagcagagatctagcaacccagaagggtgacaccctgggagatgctgagagcagcagggccctcaggagcagggctggggagtcggccacagctcagggggtcattgcatgtgggcatcccaggctcctgcctaggccccctagggctccccagccccacagaacaccctccccactcccagggatggcatttgagaccttcctgctgtgtccctccaggaacctgtgagctccaagagaacagaaggctgcctcttcaaccccagtccagcaaggcccagggcagagcaggcacggagaactgctgtcgaacatgaagtggggacgggacgcagtggtgtacacctataattccagcactttgggaggccaagaaccgcttaagtccagaagttcaagatcagcctgggcaacatagtgagaccccatctctacaaaaaataaatttaaaaaattagccaggcatggtggtgcacacctgtactttcagctactttggaggctgaggcaggaggatcccatgaaccaggaggtcaaggttgcagggagctacgattgcaccactgccttctagcccgggagagagcaagaccctgtctcaaaaaaaggaaatatatttaattttttaaaaagaatacacagtggtgagaaaggatggaaagaagagaggaaaggaaggaaaggatagggaaagaacaaaagaaggaaagaaagaaattccagctaattctcagcaacagacaattacaggaacacaaggacaaagcccagagccccaaccccacgtggcctgggtccccacagcctccagccctcctgtcactctgccagctggcagcagggccacctctgagcatccttttcctcagcactttggcgtctttcctcccagtggtttcttggtagttcctcataaatccatgcgtaggtctggctacagctatccttgtccctgaagatggactcagctagcagagtcgctgatatggtaacacaatatcacacatctcatccaagcctgctcggacgctgcccttctgaccccgattcctgtcaccaacacaacaggaaaggagcttgaagacccaggaggccacagcacagttcctcgtggagggagagagatgcgagcaggtgggcggagggtgcactcatgagacttctataagcacggacccagaggccatcccagcgacactgtgtggggactcctgcacctcttcctgctgcccagaccatgggtggccagcagcactgcagtgttggtgtaatctatgtcccccggatggccagcgggcacagagcatatgtgtgctgagggacacatgccccacacaaacgcccccacatgtgcatcgcatacatcacccacacacacacgtgtacatttcagcacgcgtctaggggaggttagcgtgccagcaccagctgagactccctggccagactcatcgccagctggggagagtggagcagacgtacaggatggagggtagaggtggggctggtccacagtgagggagggaggcaggtgtagactgggccagggaaaggttctggaaacccagactgaaggttccctggggtccctggggctcatccagggctggggtggagccgggacatgaggaacgggcagtgatgaatctgaagccctgctggtcagcagagcctccacctgcacgtcctccccaaaggtcaggcaggcttcaccctggccacgtctctaccctggccattagcaaagaggccccccttggaccaggaggaacacagcaggccagccctcctgcccttcccatccaaggctccagccactctcatggagactctgagctgagacactcccagcagaaagggtcatttatctcagagcttaactagccccttccaattagtgaggaataaaatggcagcatttactctgaagaactgcgatgcgagagtattaattaaatgcgctgccgctgagcctcagcacacaggaggctgagccctcattaaaaaggcatgagactaaagcaagacagggaggagaggcggggccagctagacaggggatggggagagaaggagatgccgggcggggcggggacagccagggacggccacagctgccctgccaggagggacagggcccactgcaaagtgggacagctgcttctagccctctcacaagaaggctggtggggaagaagccaagcacacgcagagggtgctcccgcacacccctcgcctccgtctttttggaatcttgacagttagaagacgacaagggccactgtccagtggctggcatttgtccccatgagaccacagagaggcagaggacagctccttctcagaccagggcaggtggggcaatgccaaggccccctcggctcaggatggagctgagcctccccaggatgactcccctgggggaaacactgatgtcgctgtttgagcgttgagacgttggggcctggcctctgagaggcggggccccgaagggtcttccaggaaggtcagaccccagcccaaaagcagcaggcctgggccacaaagagagctggtccctgggccagaaagccctcttccaccatgcactctgggcaaggggcgtgtgtgccattaggaacacagctgcacgctatttctctcctgtcttcctccagctgaagatttcacacagccctgttatgactgagggttcccaacagctattccctcaacacacaggcccccacacacatgcatgtgcactcatgcactcccacatgcagcatgcatgcacccacatacaaatgtccatacgcatcacatgcaccacgtgtgcactcacacgcaggcgtcacacaggcaccatgcagacgcatgcacacacacatcactcatatgtgcatctcctgtgacacatgcatcacatacacatgtccacacatgtgcactacacacaagtacacacatgcaccagaaaaatgccccatgcatgtgcatggcagacattacccacacatacacatgtgcatcggtcatacatgtgtatcatatgcaggtatcatatgtacaggcatgcagtgcacacatgcatgcatcaagcacatgcattatacatgcacacgcccacacatgtgcacacatgcatgacactcatgcactcacacatgcctcacatttgcacacatgcatcactgacgtgctcacacatcagccacacacatgcactcactcacaccctcctgctgctcccagcctcactgcctgcttgcttactttcccagttcctgccactacctgagaaggtgtttatttggccttttgcttattgtatgtctctaccacctcatcctacccctcccagccctccccatccacactcaaccagtagaatagaagcctctcccctctgttgaggcaaaaagctgtgaccctcttttcacccagaaaccacaggaagcatgcgtgcagactggactcagccttcaccagcccccgcagtcattacgcctggctccccagcacccaaacccaggtccccactggtcagcacgttcacacccagcctgccacatctccggcctggcccacagaatgcctggtcccagactcctaatgtaggaagactgccctgcctgatctcaaggcttgcttctctgcattcaggccactcctgctgcccagcctgacggctcctggagcagccggtgatcagtcaacctccccagccttctgtttgccttgcagagccagccgactcccaggagagctgtagaggctggtcagcagcctcactgtccctgccctgcctggtgagggaagggaggccacggaggaaattccctcccgctccatgtctgcctcgtgtccttctctctcctgctgtgctcctgggcagcagctccctcctccagccttccaggtctcccaatcctggccccagccacttccttgggaaccctaagcctgcctggagtccaccctcctccatttttttgggttttttttgagacggagtctcgctctgtcactcaggctggagtgcagtggcacgatcttgactcactgcgagctccacctcctgggttcacaccattttcctgcctcagcctcctgagtagctgagactacaggtgtccaccactacgcctggctaatttttttttttttttttgtatttttagtagagacgaggtttcaccattttagccaggatggtctcaatctcctgaccttgtgatccgtccacctcagcctcccaaagtgctgggattacaggcatgagccactgttcctggcccacccttctccttctgatagcacagcccctgtgtcactcaggaaccagctctcatccctgcgtcaccagtgggcaaggagggcacatgacccagcctaggccaggtagaatacgttgtcatctgactacatgaacatagctcagggatgaggacttgccacaaggtattccatgaagttaaatccaggaactattgctggaattgttggaaaggaaaagctgtttcccccgggttgttgccctgtgaggaggtaatgcagcagctgcctgcatccatttttctgcctcagagaagagcaggcctgagagtgaaatcgacacagaggagagcaaagccaagggttggggatgtgggaaaaaaaacaactgaaaatttatttgggcacctggatccagccacacctgaagctagatagttctagatatttttctttttgcagattaaccaataagtttttttttcttttttctgaagccacttttacttggatttccaacacttgaggaataacacctgactaatacactctctcttctatagcttcaaactctccatctcccggatcctcatcctcggtccctgagcaaactcaagccacctaaaatcctctgtgctcgaggcagggccacacacacatctacacaagcgcacacgtaaacactgcactcacatctaagactgcacaccctccgcagctgatgtctgccccaccgcagcatgtgtgccatgcgcaccagcttccctccactcccttgcctctcactggcccctcacctggtcagtctagcttccaccaactccccagcgaccctgcaaagccccctcttggctgctgggcctgatgccccctgccatcccaattccctgaaccccctcctcttgaacctctctcatcctttagcaggtgggcagccccgctcctaagactccactgcctcctccacttgtctgcacatggtggggggccaaggagcacttccttccccttctgcctccctcttcctttggtgcccgcccacccaccctaggatgtggaatccacagccctccatacagagcgctcccaacccgaattctacccagaccttgcccctgcacctaggacctgcatttccagctgccagactccttccaagagacagccccagtgacaaaccctctctccaagctacccttcctctctaccacccatctgtgcaagtcaaaagctggggagtgcttttcctcagcctctccctcagcccccaggcccacagacccaagtgcctggagatcccggcctctccatgtttcctgagtagattatgctgcctctattgaaagatgttccggcagaacactggatgatccagaaatatttccattatatgtggcatgggcagaggcagatcacaaagggaaggtacaatacgacccttttgtcattaagtatgtttacacatatgtgcatggacgtgggagacacacaaaaatgttgaaagctaatggcactgcagggatttccattttctccttttggcttatttctgcattctgttttatatgaaggcacatacgacagtttttaacttaaagacaggacaaaaagttgccagccatcgtgagtcaccccaggactgccggtgctgggaatgccaaaatctgatgggacccagcgcaggtggggagaggagcagaggatgcacccacggcccgtgccttctttgaatcagtcctcacggggccatctcaaggtggagactctgaaagtgcagagaagtgaaataacccgcccatggtcacacaggagggagtgcagggtccagttctccctcccccacccaggtccgcactacaggctctgatccacgccctcccttgaggacaaaccctgagccacgctgggtcctcccgcaggccctgaaatagagcttcattgccacatcagacaccgggagacgcgaggaggccgtgagccaattccagatgacttgtcaaggctgcgccagccacagagtcagggaagcctctggctgcctctgtaatataagaaccaggactgaaggcccctctgggagggcactagacgagggcctcggcagctccgcaggcaggtggggcccaggccaggcgggacagaaacccaaatgtggcgatgcaaactggacagaaagaggcctctctgggctgcggctccctcactcggggcctgacggtaccagggggagttaatctctcacacacaagctggcgccagacccctaactgcaggtgtccctaaggagaggtgcctggcaagtcctctcctgggagtggacgctctcctcctgagcacggtgtggaagcagggccgtgcccagcatgggtgcgtgaggactggatcctgcctgcagacaggactggcgggaggcagaacttgagctgcctaggactgaggccactccagagccaagactgacagtctccacaaaaccaaggagccctcacctgtctcatggctggcaggggctgcacaggaagtgacagaggcctggtgccctcgagaggcaggcaccgagccagccagtgtcagggagcaggtctgcacatctgatggaaaatccatccgtggtcccccttctgacaggcctttggctgccttcccttctaaatagctgcgaagggaaatggcctggcagaaggaaagacaatggggccccaggggcagcagtccaggagggcctgggccccccaccctccagctgtaggactcccaagctaaggacagagagaatactttggggaggagaaagaagcagacaccaggcttcgtggcaggtgtcagcatggctgagggcaggcagaacagccgccagcttgatctggacacctggtcctgccacaggccacagcacttgccaggggccgttgggacctgtcactgccctgtgggagctccctggagagttcttaacctgggctccataaactgggaaaagagaacacttcaacttcatctttactaactgggaactgaaagctgccattcccttcaactctggagagaggcagcaaccccagacttaacagcacctgcgcccgtcagggcagaaatcacaggcttcggcaactgtcagcaccgctgctgcagaccagaccaaatggtgtttacactcagcacaacttaaattatagaggctgtaagatgcactcctaggtcttattatttaatgcatcaattaaaagcacacaaaaaagttttacatgaatgttcctggcagcattattcacaagagctaaagggtggaaacaacccaatccatcaacccatgagtggatttaaaaaactgtggtacatccatgcaatggaatcatatctttccatccaaagtaatgaagctctgatgcatgctgcaacctagatgaaccttgaaaacattatgctgagtgaaagaagccagacacaaagggcaaatattgtgtgattcatttatactaatgaaatgcccagaacaggcaaatctatacaggcagaaggtaggtcagtggttgcctaggcctgggaggacggggtaattgggggttactaaagggtctggggtttcttttcagagtcttgaacatgatctaaaattgtggtgatggttgcaccattctgtgaacatactaaagccattcattgaattttacgttataagttggtaaaatacatagtatgtgaattatgtctcaataacattattatcaaaaatgtgtaaggtataataatgattaaaaattttaaaagcatgtgtatgttgatagctttatttttctctttttttttttttttgagacagagtctcactctatagccccaactggagtgcagtggtgcgatctcagctcactgcaacctccacctccagggttcaaacaattctcgtgcctcagcctcctgaatagttggaactacagatgcccgccaccacgcccggctagttccttgtattttagtagaggcagggtttcaccatgttgcccagggtggtctcaaactcctgagctcaggccatcctcctgccttggcctcccaaagtgctgggattataggcgtgaggcaccatgcctggccgatagctttatttcaatcagatttatttcctttgtattttgtagtgtacactaaacacattattttgatcaggggtccatgggcctcaccaggctggcaggagggttcacgacatggaacagctgtgctaactaccaggacagaagacaggaaggtttgctggaagaggggtgatgagaagttggccaggcctatggggttcccagcattcaggcaaaagcccagaggtcctcagggacccccccactgtctgctctgctaatgcaaagcccatgaggcccaaggagtctcagcttcttcagccacccgatcacaccccgacacacactaggccctggttccttcaagtccttaggtcattttcagattcaacttcagccaagacaaatggtcccctcctgcacctgccacaggcactgtttccaacgtgggcagagttgacagttgatgggtgtgtgtgatctttcggagctcctgtcccaggcccacaggatgaacgggaaggtggacatggtgggtagagcaagcaggaaatgatgatggtcaggaggggccttgaatgctggttctgggggcctgtgctttaccctcaaagtggaggagccatggggagcatttcgggtggggcacggaagggagaccgcgtgcttatcatgggcagctggaagggagtgggagaaacgggggcagggagaagacagggcagatgtcctggagacagaaggcaatggggacccatagctcctcctgacacatcagcctggctttcctctggggcccatcctctccccgacccactcccagagggtcagaggacagacgccagccctggagccacagcagtcctgtgacgaggcctggccagccgaagtcctgctccgctgtcctggccatagtgatttgcctgaagcatgtgacccaacctgagccagtgagaactcaccactgggctctcccagaaaccctcggggaacctgggcctctctctgccgggcggctggtgcactgcccaggcaggacccacggggagggcggctgagctgaaaccgtgcgggaggcctgggctgccgccctgagccccgcattccccctttggccccagccgcttctgccccggttttctgtcacttgcagtcacaggagtgtggacctggggatggcctgtgggagggacaggggcacaggcaccagctgcacaggtgtggatgggaggacaggagcgaggccagccgcctctgggccacaccctccggattcactcccaaaggagaacggccaggcggccaagtcctcccagctgaggggtgcggaggaagggatcagagcgctcccccaacaaaggctgcctctccgtcctgcacatcccctcgccacactgacctccatttcccttcttggggcctgcccgccacgagactcttctcccattccagactggaaatcttttccgcatcttgactaattgttttcaggtgggaaggatttggtggagaaatggcgtttgtgtgtgcgtgtgtgtgtgtgtgtgtgtgtgtgtgtgtccacccccagccgggcagctgccccaggaatgctgtattggcgggaagagctagaggacccttggcctcagccatgtcctgaggggctctcggtgatgtcagcggctcctggcctcttccagtaaacatctgttcttattctgacccaggaattccatttcagaacagtaacggcctccactggcaacacatcccaggccggtgatgcctggggcagggagagcatcctaccccggcctgtgccccgcccccggccccgccccccactcccatgcccgcccaagccccgcccacagagctctcaaaagggacaaaatctgcacctggctccgtgtgtccaagcgctttcacactgtggtccctcctagcagcgccatcaggaaaatatgatcttgtagtaacaggcccttcgctgctcagtgctggccctcgcttcatttaatcctcatcataacccaccagagtagttaccgtcatcagcttttacctttcacagatgagaaacaggaggctcgctcgcccagggagggagggagcagaaaaccaagcccacgtgttggagcgagatcgcgtctgactccagcgcacgggaccttgcaggggctgatggccaaaaactgaagtcatgggaaggagagggagagggagagggagagagaggggaggaagaaatgaccgttccaaagcccatgcagcactcatctcaaaataagagaaactctcaggtgcctacacagggagtgaatgcgcgtgaagcccgccagggtaatgatagggagcagcagagactcccaaggcacctggaactgtgggacccttctagagggttccatccttgctcagctctagccctccagcacataggcccggcagatttcctggttctcaagagaaactggaaatcttgagctttgtgagaaattttcaaacactggaaaagccaaacaaaactcatctgtgggtggacatggcccgtggcccaccagtgtgcaaactccgccctgcacaatgggaaccctgaagtgcagaaaattatctcattgtgaagggtaaggcagggactcaaaacagggctcctcagtccacattcatagagtctccaggttgtaccaccgaatctactcgccagccttctcctgaaagtgtctcactgaaccacatcccccgtagaaactcagggcatctttcaaagaccgcagttttcctgccagcctgcaaacaaccctgtgcatgcccggtgcactgctccccaaccacaggggacacctaacagaccacgagggactgagagagcctccttgactgaaagggaaggtcaaccgccgccactcatccccataaaaccacaacatgggcacatcctgcgttcgaagctctacttgatgcaagagagcagggaaaggaaagccgtgccaccgtggggaaatgggcctgggagatccattcaggccaaggtttgtccactttgggtctaccaccaccagcattcacagaagaagcagcacctggttctcaattcccttagaagcggggctagatgctctgaaggcatggttgtagctcccacacaaaattactaaagacataaaacgaaaacatgttgaaaaagaagagacaatattatgaactgcagaaagtaactgcacacgtagagaatcctcacccccaaaaacatccaaaaaaaggaaccaaataataacaaggaagttcataaaaagtctagatgcaaaataaatagagaaactcatatatctgggaacgcaaacatgggaaacatccaagcgagagatttaggtttgttttgttttgttttttgagacagagtctcgctctgtcgcccaggctggagtgcagtggtgcaagcgatctgagctcactgcaggctccgcctcccgggttcacgccattctcctgcctcagcctcccgagtagctgggactacaggcgcgcaccaccacgcccggctaattttttgtatttttagtagagacggggtttcaccgtgttagccaggatggtctcgatttcctgacctcgtgatccacccgcctcggcctcccaaagtgctgggattgcaggcgtgagccaccgcacccggcaagagatttatttcagaaggactttttgtgattatctgtggttcatatttgtgccattctagtaacagagagactgctttgctaagacatgggaagatgcaggtcattgggagcaaaggatctgaagcaggggctgttgccaggaagggcgcgccttgaggacagcaatgctggggcttgggcttgccaggtcaaccatgggtatcaagtggttcgtggcagctctgcacatgcatgtatgatttgcactaatgtgtcatttttaactctgttttctccctgggaataaagatgtctaaattctgagaatatcattagtctgaaagaagcaggtcccaggtattctgagtaaataatcacctactgtattataaattaaaagtgttcccagataacaatctggtgtaaaatataatggaaaagaccctattgacaatggcaataacattctaagtctcttagtaataaacctactgggctatgtttttaaacatctgaatcaatcttcttatttccgtgagaaaattaaacatcatgaagatgtcgttcatttgttcagcaaagatttgctgagggccttctgcaaaggggacactactttaggcatttttttaaaacctcacgatggtgatacttgccctatcagatgtcagaacatattgtcaaccaacagcaattaaagacccctggactggtgcaaaagaaaaacagaaaaggccaggcacagtggctcatgcctgcaatcccagcactttgggaggccaaggagggcggatcacgaggtcaggagatggagaccatcctggctaacacggtgaaaccccgtctctactaaaaatacaaaaaattagccgggtgtggtggcgggcgcctgtagtcccagctactcttgaggctgaagcaggagaatggcgtgaacccaggaggcagagcttgcagtgagccgagatagtgccactgcgctccagcctgggcaacagagtgagactccgtctcaaaaaaaaaaaaaaaaacaaaacaaaacccagaaaggccagaaataaaccccatatcctccatgaacttcacagatgatggaatatacattccaaagtcaagaagaaagagtgaattagcaaacgaatggtgttgagacaacagcatggcaatttagaaaaaaatgaacacttaaaaccaacaccttatacagtataagaaacacatttcacttgaattaaaggagttatatatttaaaaatcaagtcaggaaaaaagcaaaacatataatggagtatttctttgaaaggctgatacttttctacaggctgagtaaccagaagaaagcaactagagaggctgacagagctgaccgaagaaacaaaacaccagcccggcagaataaaaaaggaagctctgcaaatataaacccacccaagctagcagagggttaatgactagccccagggagaaccaatcagcttcagaggaggaaagttgggggccgtaaccaccagccattaaagaaacaagtttcaggccgggcgtggtggctcacgcctgtaatcccagcactttgggaggccgaggcgggtggatcatgaggtcaggagatcgagaccatcctggctaacaaggtgaaaccccgtctctactaaaaatacaaaaaattagccgggcgcggtggcgggcgcctgtagtcccagctactcgggaggctgaggcaggagaatggcgtgaacccgggaagcggagcttgcagtgagccgagattgcgccactgcagtccgcagtccggcctgggcgacagagcgagactccgtctcaaaaaaaaaaaaaaaaaaaggaaacaagtttcaacaataacacgattgcctgactcccaccaagggtcccaggccagcccagccccagcggactcctgcaggccttggggagccaggtgggcacctgcaggcaggttgggggaaggctgtgaggactctgagcccccagagtctatcaggacaggctgacaccaagacagagacggcctacatctacccaccccataccatgcccagtcctggaccagccatccctggccccaaaggccacagcgtagtcaccacagctgagactgccccaatcagggccacctgcaatgtccagcagcctccctgcaactgccccggctttggtttttaatgtccctagtcccgagaatgcagaagctctgcaaagagaagaacgcagcaactctggcaacctgactgtggaggcagacacctggcacacatttcccctcccccagtgcccgtgatctccacccagcgctgcgcaccctccaacctccactccattcactcccagacggagcaaaggctggcctcattggccaccttgcccagcacaccacctgcacaaccttcccagcagccctgctcatcgggccaccctccccagtgaggacacagcccgtgacagcctgggcaccccaacaggaaagacagcccaaaggccaagccgccctatctgaggtggaggatgctctggcagggcagggactcagccttgaccttgtttgctagaaaatgcaccaagaactcagtagcaggccaaggagaggagacatgaattccccttttcagcaattcaccctgcttgtacaggtggggagttatctgtacctctgaggaggtacagatttcatctggtgctccagctgcagtgaaaggagctggctctgggctctgtgggacctggggtgggtcatccccatcgctgtgccctgatttcctcccagcacattgggatggctcgttgttggttcccagaatgtaccaggaaggtacaggtgcagagtgcagctgacgacgaagggcccccagccaggaagggtccccaggagtcctggctgatgaaagactctgggaaagaaaggtgggaacggggagaggacagaaggggcagggaggggagaggacataaagggagaatggagagaaaagggaaaaaggggagatgagggagaagagaagggaggggagtgggaaaaagaggaatgagaaaagaagggggaagagagaggagggaaggggaggagaagctggagggagaggagggggaagggagggagaggagggggaagggagggagaggagggggaagggagggagaggagggggaagggagggagaggagggggaagggagggagaggagggggaagggagggagaggagggggaagggagggagaggagggggaagggagggagaggagggggaagggagggagaggagggggaagggagggagaggagggggaagggagggaggggctcccagcaccaggacccagcacaaccgtcctatgacagttgtctctgcagctgcatttagggctgttctggaaactcaggccttctccctgtcggcagggctgagccctggtctgggacctccccttgttctatcagagcccccaggctgggtgaggtccactgggatctgttttcactcacaatgcttctgacaccaaacatgtggtttccctcacaccaaccagttctccaacctccagacgctagctgggtgccccacagttgagtgcaatgctcatgccaactacctggggtcagcttagccctcaggttaaggcctcagtcccacacagcagccccacttgcggtggcaagttccagctttccacctgtgcctctgaccaggcggctataaattgggcgggtcccacaactccctcctcaggttctgtaatttgctattaggttggtgcaaaagtaactgtgaccttggaatcagacagacatgtgttcattaatagaacagatcacagaactcagggaggcattttacttactatttccagttgattattaaagacacaacccaggaacagctgcatgggagggatgggcagggcaaggtaacgggaagggctgcagagcctccacgccctctctgggcactcaccctcccagaacctccacctgttcaccaacccaaagctctccaaaccttgtcatttaggggttttcatggaagttccatgactcccatccccagaggttggggaagtgaggctgaattctcaacccaacaatccagaaactcttatatcaggaacaaggggactcagaccaaatctgataataaaaggtgtttctatcacccttaacactcaggaaattacaaaggttttaggagctctgaggcaggaaccagagatgaagaacaaacatacatttataatttcccactatcacagggtctcagacagtacctcagtctgtgacccaacctgcattgccccagaagcccagacctcagctcagggccagtgtgctgggatcagtggccagtggccagccatcgtgcagagaggggagggcagaggggagggagggaggggatgggagaggaagggagggaggagtgcagagaggaagggaggggaaggaagggaaggagaggagaccaggagcctcccagggcctgggcacctgcctgggagggcactgaggagcaccaaggaggatgcctaccactgcccccaccttgccctgatcaggtctgcaggatcagtgctcaacgcccatggagctccaggtggccgccaagtgtggacagccctgcagcaaaggccagctactgccctgggagccctcacccccttatcctgcccgcttgcctgtgaggacccctccctactgtgtggccttggggatagccatgcgacggcggctgccttccttctgccggggctctgaatttccaggtgagagacccgagagcagagggccaggagccgacaccgctgtggcagcttcccgcatcccaagccgggccatgcccactggccatcgcttccttccacctcaagccccccatggaattccctttgactgaggccagccagcctcatccccctctgctccctcactgacacacaccttgtgaggcaggtggtgtcttaactgggaaaatggagggtcacaggccagcaagagaagagccaggccccaagtctggtctgtgagcccccactccccacagccctcgctagtgagcacccgtcatgctgtacaaaagactctcctgtgtagcttttgaaaagtacagaccccagggctcacgcaggtctgataaagcagaatctctcaggatggggcctatgtacagatgctgtgcaaagctcctcaaatcccatgcccatcagtgggcaggcagagagatcacacaatggaaatgctcttctgcaagacaagccacagatttggtttttttctgtttttttttttttttttttttttagacagagtctcactctgctgcttggctggagtgcagtggcgcaatttcagctcactgcaagctccgcctcctgggttcaagagattctcctgcctcagcctcccaagtagctgggactacaggcgtgtgccaccatgcccagctaatttttgtatttttaatggagatggggtttcaccatattggccaggctggtctcaaacacctgacctcaagtgatctgcccgcctcagcctcctcaagttacacaggcgtgagccactgtgccccgcctacagatttcttctaaggagggaaatgtctttgcttggaaaaacaccttctagaagcacatgggataacagataacagtgggactggaagagcaggagactctgcagacagtgccaccacctcagagcagcgggcaaagtccgctgttaagacacaggaggagaatggagggattgctccagagaaactggacagagggagggagacgccactgggagggaagaaagaacccacagatgaaagtggaaatgcccccacacatggcccaaagggctttccaagaacagggtcctgttcttccagaagtcacccgcgtggccgggaggtgctggctcccccaccttctgcaggaaggctgcccctccctacgagggcttcccatggtgcgtaaatggggactgggtttcattcctggcccagcaaagtggacagctgaggccgaggctgagaacacaaacaccccggaatcgcaacacctctggcttttggaggtgagagaagggagcgttaagagttaagacacattttatcttgatttcagctcctttactgataaaaatgggatcttagaaaacgagaattcagaggatattgccttcacatgaaatccatcttaatccacagcaagcgctgtattaagcagagaaataccgggggcgttgccgttaaagccaggcacagatgaggatgcgtgtagccacggctgtgacttaacatcgctctgaaggttccagacggtgcagattggagatgaggatccaaaattatcagtgtttacagagtgcaactgtatacctagaaaacccaagggactccacaaagatatattagaattaatgagttcaatcaagctgcttgataaaagatagttctataaaaatcagtagccttcctgtgtaccaatagatggaaagtattcaatgagcaatggcaaaaagaaaaaaaatccttgaaataatcctgatttttaaaaatggatgacctgtataaaaatatgtatatataatacttcatggtacaacatcaaagcagaatgaaataagctgaaaaaatatactatgttcctgatgaatactgtaaattatgtcaattcctcctttaattagtttctaagtttaatttactatcaatcaaattcacgagggatttttctacccgacaaaacaattctaaaattcatttgaaagaataaacatatgtgaccagccaagaaaattttgtaagagaataccagcaaagggggacgtatccagccagatgttccaaagccacacagtccaacagaaatagaactcgagctttatatgtagccatgtttttaaaaaaaaaagacacaggtgaaattaatttcagaaatatattttatttaacccagtatgcccaaaatattaccatttcaacctgtaatcaatactttaaaatgatctattaaacattccacattctttttggggggtacgaagtctctgaaatccaatgtatattttatactcagggtacctctcaattcagaccagacacattttaagtcttcaatagccttgtgtggcttatagctactgtattggacagcaaagcttcaaagtacttaatactttgactattagagccttacagttctaataataaacacagcttaatattggtacaagaacagaaagatggaaaagtagaatgtatctgcggtactgcttaacctgaggtttcatttgcaactgactggcgatggtgtactataacccataaaatagacagatgtaaatacataccaatatgctcacagctctcaagccccttttcatcatatgtccagaagctctgtcccaatcagaatggccactagcaagccttagacaagccttgcatgaaacgtgaagacaccctactttccatgtgctcccaatccctgctttcaaacagccgcgtgggagggatgggcagggcaaggtaacgggaagggctgcagagcctccacgccctctctgggcactcaccctcccagcacctcacctgttcaccaacccaaagctctccaaaccttgtcgtttaggggttttcaaaggaaaaatacccgggtgtaaagatgacaggctttaacacttggaaatacttttaatacattgaaatttcagattagggctttcaaaggaaaaatacccaggtttaaagatgaatcccggacattctgcacagagctggtgaaggctggtccccccaacacgcatctttccatttcccaacccctgaactgaggatgcaatcggcgggtctcaggccccggccctggcccccgcctcctgggccacgacacttccaacgcagtccctcactgtcaacaccctggacactcaaaatgtctttgaagagtcacgctgtgaggtcaaaaagttagggtgcacgcagaaaggcgcatgtagctttgcatcggtgaggcaaatacctatccctggaggaaggaccgctacttcgtaattcacaagaggaagacccccggaggcggacgaagccaaccgaactcagttcccgggagccgtgacaagcgacggccaggcagcagaaatggcccacccattaggctgcagacagcatcagagaaaccaagcactgtggcagtggggcccgcgcctccagggaaccacaaggcacagagttgcagtttaaatgggagtgtctcctctttcttggtggcgtataaagtaatggtgtgtcccgtaaccgatggcaccttagagctaatgatatgcagacacggccaccgctttctcacccccgggcctggggtaggcgcttgctgcacacccaccctttcactgccactgaagtgcgtgcggacagaacccatcttttgctattggaggaactaaggttctcaggatcgtggtgcttgtccaccctgccggtcacgaggagcacagcggaccatgtgacccgcaacagcctccagcccacaataggcccctgccttccctgggttaacccgtgaaatgcacaaggcagggtggggatggcgtagagcctgcctggcttcagcagcacccaggccttggtcctggacactagggttccctgtgcctctgagcggaagctgtgcaccccactctgcagccctggagtcgtcgtgcagtgtaattgaaattcatggacaagcccgaggagccagctccgggctcggtaataacttctccatattaatggcagcaccgcagaccctgtggacagctgatatttaatatgaaacatacgcagcagagtgtgcagctcctacctggatcctcccattccggggtaaccaccagtaggggatgggggtgtctaacgtggcgccaagattgagggggctggggtcctcctctcccctgagtacctcaaccccacttaaggcccctcttctacagagtgcaggaaacccctcccgagaaatacataaacacatgctggcccatgctcactcaaatgcacaccctcccatgcagacacactcatgtgcacacacgtgtacacactcattcagacgtgcacaaacatatgcacccccacacgcacactgcatgcacgtactcctacatgcaagacatgcagaggcaacatgtacatgcacacactcccgccatgcacaggcccaggacacgcacacgtccacatgcagccaccagcctgctgtgccggcagcaacacagggacccccagggctgcccaagccagagaggcaggtggggtaaagaaggacatgtctgcctgccagcacagacccagggtcccaggagggctgccatgcacacttgcctctttgggtcttcagataccacagtgggcaggcccagaccatagctcaggcagccacgaggcaaagccagcctcgctgctgagcggatgtccctggctgattcccttactcacccaggtgtggcccctgtgagcctcacagcaggcctgggtgaggacctggccttcacctcccagctgactctgcacgagggcctgaattcactcactcacccaggtgtggcccctatgagcctcacagcaggcctgggtgaggacctggccttcacctcccagctgactctgcaggagggcctgcattcactcaggcatgactcgctaagcactggagacatgggggacagggaagccacggcgagccattgggcaggagaagcctgccacacctgaatgagcacatggccgcgcacatttaccagtgccagaaacatacccagccacacaatggagtgcagctctctcagggagagctggccttgctgggctccggctgagaccagtgctgactatgccggccttcatgaggggctgggagccggctccactctgcccctccctaaaggattccaggagagacgccagcccacacagagaacctgcatatgtaactcctagagcctcggtttcctacctgtgaaatggggccacggtggctggctcacaggaaaaccgcagggactgggttcaaagccccaggcagaggtagatggtgtggatgctgctccccggaccccctcctgaggctggccgccgcctccagagggactgcgctgcactgctggatccctcaggcatctctgtaggggccctcagctcacgtaaggcagcaggggagggagtcattgccccaccctcccaggggcacctgaggggaacgctggagttctgcctcctgcagccctttctcccggagtctcattccagaccagcagagcaggcgactcaggccggagctggagggccctgaccaggtcacgggggccttgaatgccaggccagtgggtttggatgtttttaagagcagtaagaaccactgagaggtcttaagtgaaggcgtgacatgagttgctgcatggtttctaaaaatccctctggctgcagagtggagaagggttgtcggggagagaccatggggcagtggggggtacaagagcagaaagcaggggttggcaccaggcgtggagggaagccgggccctgagagagctctagaattggagctggctaggggagggcgatcctggaagggtggggtctggaggagagtggggagagccacgtgacttgagtatggggtcatccagggaagggggttccagaggcagccgagcaggcaagcctggagcccaggaggacttctaagcccaacatggggtctggagtccaggagaagggtggccacaaccgtgttcaccaccctgcacaattctcctcccttcttgtatgataggcccctcttcattccagagtttgggagtctgtccctccccctcagtcccaaaggtgggcaggagacctgggctaggcccgcatcacagccatgggtttgaagatgggcctccaatccctcccccaactctcacaggtgtcacccagagaggagggctttccatctcaaaggttgcctccttggaaaacgagttgggcctggagccgctggtgggccgggggttgaggggtggagagcaattctgaaatgaacactgagaggcagggctgagaaatggatagcatgctctgagcccctggattcagccaggcctgaagccaacactcctcaggacccccagataattggggccatgctgtcccttgtttgtttcatccaatatgagcaggggtttctgtcacttaaactgagcaagtcttaaggtgacaagtatggcggaggctgagactggccttagcagctgtgtaggctgcttgcagctggggcccacaggagcctctgctcctacctggggagccccgacaccctagggaacccagaggttcctgcagcccctctttagtcttcctgacaacctctcattgcgatccaggcagtgccaaggtggggtgggaggaaggaagaccctaccagcggcagctgcaaatctcaggtgcccctcaccccactgcacagtcccaggacccgctcacacctgcctgatctgctctagcacctgagcctgctggagcccagtgtgtggcctcgaaggcagcagccttgctgggaaaaatgaaactcatctcaatcccttaggccggcttctgacttctctctgtggcctttatgactcttaatgtccagcaagacagagtgggtgcctggcccagacagcagccccgcaggggagccccagcctgaaaggcagcagccctggatttcttcttgccatgcaaccttgggtctctctgagcctcagccacgcagtggggcagccctatctcacagggttgtggggttcgcatcaagcatccagggaagggcatacacttcctcctttgggccccaggattggaccaggccttggagggcggaccatctccaccgcccagcccatggaggcttcatccactgctgcccagcctggcaggagaggatccccgtgctgccctgagtggggaggcagaggcgggcagggttgcttccatcccacggaagtcccagctgcagtcccccaccagtgaggacttaggccacccataggagctgcagcccagcgcaggtcacgagccagtcaaggccactcagctcccaggcctgctcccggctccactcacactgacgatggtcaaacccacaatgagaacgtctccaggagtcaaataagaaaggtgggaaatgttgtaaagaaatgcatttttaaaattctttttgtaggcatgcaggaaaaggcaacaaaacatagtgagcatggccttggaatcagatttgtgttcaaatactggcttcgaagcttgaagcaagctatctcgacttttggagcctcagtttattcatctgtagaagggggatgatgtcgggatatgttccgtagggtgctgtgaggattaaacaaggcgaggtggcacagggggctcagctgagagcctggcacacaatgttaataggaacacagtcaactgtcacttaccatcattaccttttacgccaaaaggcttctcactgggtttttaatgggcatgtaaaaaccacgtgaaattagcacgcctaccacgctgcccaggagatactggaaaactcttccgcagcaacgtgaggcacaacaccactctgtgcagcctgttttgctcatgccttgtgcaaagggacattttgctgtggatactatgaataacccctcgctgtggatattattatgaataacttccgtctagtcactcaacctcccagagcctgagtgctccacctgtaaccagggatgagatgcctccccgaccagggctctgtgaggacaagaggtgccctgtgtaaagacccaggtccttagcaaagaagcctatcgtggtggcagcagagggggatttaacagtaggacagacacatacgcagcaacaaagtcagaaaaggaaagaagaggccgggcgcggtggctgaggcctgtaatcccagcactttaggaggccaagatgggcagatcgcttgaggtcgggagtttgagaccagcctgatcaaaaggaaagaaagaaagaaaaaaaggaaggaaggaaggaaggaaagagaagagaagagaaagaggacaagcgaaaagaaaagaggctgggcgcagtggctcatgcctgtaatcccagcactttaggaggccgaggcaggcagatcacaaggtcaggagattgagaccaccctggctaacacggtgaaacaccgtctctactaaaaattaaaaaaaaaataaaaaaaaattagctgcacgtggtggcaggcgcctgtagtccctgctacttgggaggctgaggcaggagaatggcgtgaacccggaaggcagagcgcttgcagtgagctgagatcgcgccactgcactccagcctgggtaatagagtgagactccgtctcaaaaaaaaaaaaaaaaaagaaaacagaaccaatggtgctgtcccactgtccaaggccattattcagtgacagcattcaatgccgctcaggcaggtcccagctcctcttccaaccccaatattcttcccagctctgtctggtacatgggacacttcagcaggcctgtcctgcccaggccaatccacacctggtacctctgcacacgctcctccctctgcccgggttgccaacctgcgtcttttccagctggccactcattcttccagcccccattcaaacagccccccaggagcacactctccaagtcctggccagagtgtccgtcagccaccctgacgacaggagccctgggtgggtaccagacctgcctcattgctgaccagtacaggggataaacatatgagaaggtgctggctgaaaaatgaatcaccaaatgaactgctgaatgaatgaaacagtgacaagtcctccccaaaatgctctccatcaggaatgcatagtacacaggtgttggcccaccaacagactgcaaccccatgtcaactcccaccaccttacctcaccctaagtccgcagcaaacatctcctttcatttaggaaattaacctccagcgtaaaatgggacacacctctgaggcccaggatgtcctcagagacagtgggcgatgtcaagggctcaccattttaacccagctcctccagggatatttacagttgtttgcaatatggccaagttctaactaaatccagccaaaggcagtgattttccaaagcaacaagtgatattttctgtgtctccataaaaagaatgacagtggttgcagagccctggtgtaattgccggctctgcagactgtaggatgagcctcagctgcccgagtacgggcgtgctcaggggccacgggggctgggagagtggccactcactcggggcaggagttccctgagtagcaattagagcggaacccatggtgggcggcttcagatgtctggccagcacagccagcctgaccaccacacacccaatccaaaatagaaaactgcagtggcctctgctgtgtgccaggccccgggcagccggacagagcaccgccaatgtcagcctcctccctcagcatcgatccaggcttcctctgaggcccccttgtgctgagccacggtccctcctgccctctccaggaagcagagcttcccagagctccagtcacaggactagagaggcgcaggcagtctcaaaagggatcccctagcctctctcttgtccttcaggcgctgcccccaaaagatcgagcagctcatgggcactagagccttcatttccaaatgcacccctcagctcaaaatagagaaaaccaacttttcaaagaaccagctggagttcaacaggaaaccacagcagaaaaaccaatgattcccggtcagccaaggggcagagggctaactgggcatttcagcatcactgccagctccctgggctggtattacccgcacgcaaggaaacaggaagactgactgccagcccataagtccaccacacacatatcacgccagtatgcacaaggacggacacaaactcaacagatgctcaacacactgatgtgcagaaacccagacacatacgtgcacaagagacactggcacacgcacatgttcacacaggtgcacgggcacccagatgcaggtacacaccaacgttccacaacacatgtgcacacactcacaaaggtacacacacatacacggacccacccccggatgcaagccagagacctgttcaggcaggcaaaagagagaggcgcacgctcctgcctgctgagccttttggagacccgggcgctccccatgcataaatggccccctgctcagaccagtcaaaacaacctgctttccagccaagcccttcagttggagcacgaggctcactaaagcacgggaagggcgcggaaagtcctcagcgcaggccttgccctcccaagggactcccaggtaacccttttccaaaacccaggcgagagcagcggagagaaaggagctagagaagtgcgtactcaccagcccatcgcagttgctgagcgccacagaggaggcttcggctaggccggccacgtctccgacgtagagacagctcccgagcaggggctccacgcgggtggtgcccttctcgccctgccactccatagtggccccgggcgccacgaggcgggcgttgggccgcagccgcaggtgcaggtctcggccaaagaccgtgacattgtagaagaggtgactgccaggctcctcctcgttgcctccggggaagctcggggtccggaccggggcggccctgcgggctcgtacccctgctctggacgtagctgccgacaccacgtgggacaccaagcggccctgggcgtcagtgcgcacgggcaccgccaggatgcgctccgctccgtgccccaggggcccgcctgcaacgggaaggggcgttagatcggcggagaccacggagccccagtgcctcagagacccgccggcaagccacgcccccccagaccccgccccactgcgaagggaaggggcattccgccaggcgaccccagaagccagcctgcacctccccggctttcctgcaaccgggaaggggcgttaacagggccaccactccggggctccgccactccccagccgttccctcctccggagaccttgcctgccaagagctctgccccctgccccgttcagggttggggctcggtgggaacctccccgtgcccgaagggacgaccccgtcagagagtcccccgacccttgcacctaccgtccttggcaggacgtggagctgctcggaagccattccgggttggcccccttacccgtgtgccacgacccctcggcgggcccctgccgcccgagtgccctcaccgccagcctccggagcggcggagtctcggcttccccgagcacgagcggcctgtcctgcctgtccagctcccgctcagcccgctgccggccccgtctccccgagcgcccgaggactgggaggggtggaacagggtccctccgatctccggggattccctgcggggcgccccaaccaatccttagggcccaaggctacgcgctcggcagccggctcctccggagcgtccccggacgcgagccccggcgccgcctcgccctggctcccccctcggacccgctggggctgactctgcgctcttggccgcggggcttttcccggccctccgtccccaccctccgcgactcaggagccgccagtgctccgaggctcccccggcccaaggcgctcgggggcggtgcggggcgccccctgcgcgaccaacccggccccgaagttggccaacttggccccgggcggggcgcgcggagtttgcccaagtcaggctggacgacgcctggggagggggcggcggggcacgcgggacagggccaggccggcgggggtcccggggagtaggggccgggccgcacctacctggggggtcggcggcggcggcgagcctggcgttcgcgggcggcggcggcggcggcaggagcggcggcggcagcagcagcagcagcagcagcagcgcggggcagagcaggcggcgagcggctcccgccggcggatccatggcagccggactgcagccggggccccgcactcgcagccggcgcgaaagttccccgcgagccgcccagcccacatctgggggcagctggagccgcccgcagctgcagcaccgcagggcgcggggcggaggaggcgaggcgcggaggggcgggcgggggagcgcggagggaaggcggggagagggaaggagcgagcgagcgagggaggcaggcgggagggagggaggcgagcgagggggagggcggggacggcgggcgcctcagcctgcggtgacccggcgcatcttggcgcggccgccgccgccgcccgcttccctcttcgcgccgccgtcgccgcggtgccgggctcgcagcgaagcagagacaccccgaggcggcggcagagaagcgccgcgggccgggccgggggagccccgccgccagccaccccaggggcacaacctccgaggagcggcgccggccgaacgtccccacctagagagcccttggggtgccgggtcccacccatcagccctggaattcaaggggtgcatccccctgtctctgtgctctggggcaggacagggtgagggaatgaaaggggaggggggactgactactgggtccaaggtctgagccaggccgaatgcccaaatagaggccgcaaaggccagaagatgctgttaggagggtacacccagggcgcgaccccaaagatcaacttttgcccttactgagagaggcaaggctccttcagtccccagttcctcttcctctgaagtccctgtcccctgtcccccatctgccttcccatccctccgctgcagcctcagcacagcctcttcctgccagacctgggctctctgcccatgagcacagtcaggctcctgccctcacctgtcctcaaccccacgtatgcattctgtcctcccgccattgcactcccggcccccaacctgaaatggcctctccaagctctgcctaccttttccacccaagcatccaaggacacctgggcccattctggggccagtttgctgttagagcccgttgccaaccggaacccctccccagtccctcctctccagcaaggccctgatcctcccatgctgtctgagctcagcggcctctctccagggcctgcctgagagccccctctcaggctgttgatcatctctgccctgggacccccaatttctgcctcacttccccagagggtgaacacccacccctttgattttctcatttgccctgccccaggtctgtgtggccagggctttggtctttgctttggccaggggcagaggacccggagatgactcaggcctctccctgctggccaggaggtcccagtcgttgggggaaacacgacttacacagcaggctctaactgtgatctcacgtccttggttctttcgattgtgggtcctgggtgtgagagcatcgcagctggacagccatcttcacctgcaagctgtactctttctgtgtcacctaagggtgcccgaggctggatccagctcccaggcatggtgagatgtcacatggaaatttagattggtaacttttcttgagatattggaagatgtggccacgctagccccacagtcctgcttagcaaccat

SEQ ID NO: 12 - DNA, 559417 bp, Homo sapiens
  source 1..559417: mol_type = genomic DNA
cccacctgtggatgagggggaggcatcagaatcttctggggtgttttcagagcccccccacctccacctctgcccccatctgagaccccctgcaccctcccttgagtggagaatcactgtggttaatgtgaaacacacagacaaaaaaaaaaaaatgcaggcacccacggcctggcctgaagggaggtagggtgggactggagacgcggggtggacgagagcaacacctccaaacgcaggcacccgcagcctggcctgaagggaggtagggtgggactggagacgcggggtgggtgagagcaacacctccaaatgcaggcacccgcagcctggcctgaagggaggtagggtgggactggagacgcgaggtggacaagagcaacaactccaaacaagacgtcttatcccggcccctccggctgcagcattggagccccgtactcagcatggctgtaattttagtctatttcctgggtgacagtgagaaatcaaagtcccttcagccagcacagggatgtccctttctgggcctgccatgcccacagttaggtccctggaaagcagcaagatgtgtcacggggaaaacactctactggattctggggtgctcagtccacgcagactgacatggagctgtggcgcaagcccccgagacgtttaggaatcccttacaccccagttcccacctggcttagtattctacataaaattaccagccacacccgtgctccgtgtgttatggcaaagctacggcaaatctgggagaggactcagaacatcgaacatctcagatttcataacccttcaacccctcaagcctccctcagcagccctgggaagtaggaggctaaggctgtgttcacacactggtgagaaaactgaggcgcaaagtcacgcacgcagtgattaattcattttatgcagttaatgggaagcgggctcaaggctcggagggagctctttacacgtccggccctgtgctattataatgagttcatttacagtaaatctgtaaggctaatgtcgggctagtaactgctgctcaggcagaggccactagtcgatgtgaccattagaaaaaggaaaagggtttgtttgtttgttttgagacagagtctcactctgtcaccaggctggagtgcagtggcctgatctcagctcactgaaacctccgcctcccagtttcaagcgattcccctgcctcagcttcccgagtagctgggattacaggcatgcgccaccatgcctggctaattttttgtattttagtatagatggggtttcaccgtgttggccaggctggtctcgatctcctgacctcgtgatccgccggcctctgcctcccaaagtgctgggattccaggcgtgagccaccgcgcctggccaggaaaaggttttagagctgattgtgtcccttctttggggtgggtggacacattgtacagtcttgagacccccagaactttgcttgatgaaaaaggcccaacaacccaggaaagaacaattttactgaatatttttatttacttaacagaaacattcacttattagatatcactgaagtgcaatttatagaacttagaggcaaattaacatgtaaattcatattttaaggttttggatttttttttacaaatattacaaatgtacatccattgatacaatattgccattctatcatgctttttatgtacataccttcaattagaattactatgtgttaagttcattttgcttacaaaatgctgaaaactaacggggcacactgggagagatttttttttttttaccgatgcataaactgcagagagatagaaatctagggcctgtgtgaaaagaggcactgggaccaggtgatctcgccttggtgtttagggaatgctcatccctccaaccttggcttaggatgatgagttgggaaataaagtgttcctctcaccagggtttgatctgtctgcggttcccgcaggagtgatattgtttggtgtgaatctctagaggccagcgcggtggctcatgcctgtaatcccagcactctgggaggccgaggtgggcagatcacttgaggccaggagttcgagactagcctgggcaacatggtgagaccccatctctaccaaaaatacaaaaattagccaatctcataagccggtctcaaaaaagtaaatagatctctagagatgtggccaccagcgttccttctggtgggaggtcagaacatgtggacacattcaggagagtccaaaaatgactgcagcaactccctgtgcacaaggcatcaggaacccagcggggctcccccagccccagcatgaacctgttgtgtggatccctcgtggggggatggtgcctgagacctcctcctgggtgggggccacggcagcagaacaaaggagccaggagttttgggacagggactaacaagacagcaagaaagggaagaggcgaggaggagagaaagggttgagaagggaagcgaagaggctgaggggagagtgagcggagggtggtgctggccgcctctcaggcttcccagaaacagcctgagaaggaagctcctctgtctccaccgcatctctggttggtccctgtggcctctgctcctgcctcctcacttccccaccatccttccttcactttctcggattcagaatttgtgggagaagtttgacgggtcaccagcagcccagtgtttccagaaacagccctgctcctgcagtggcgaggaacccagacagcggcaaggcctacaccgtgtcctccagccacccgcctagccccacacagtggcaaaataccaaaagaccctaaaataccagcgaggcggggggtggtctgtccctgctaagagctgcctgggggtgctactgcctctcctgcaacacagggcttctaaatttccacctccaaccgcgagctctgcaaaaactgcaggcgaggacaggctttggaggtatgtgggatggcggctccctgacatggactaggggactctgcagcctccctgagggccgcgggaagcccacagagcctcaccgggttctgttgggtgttatgagaggcggctgcagcgatccaacggtagtacataaaaggaaagcctctcagcttccctttggtctctgttagaaagtgatacttattgtattttgggccaattagtcagattattttattagaatggcttcttaaaaaagggcatataagtttccctaaattaaaaatgtctactttatgtacgtctcaaatgtcttcagttgttttaaacaatacactatagacacatcttgaaatttattatctaaaaataggatttcatcaaaataactattctgggcattgatatcctctgtatttactgtttatggctctccagacgtgataaacattatatccaaaaaaaaaagcatgcgactttgttgataagaaaagctccctgtgaaaacaaaatgagatggagaaatatgatctgtgtgtttctttgaaaaggaacccagcttgatgtttctgaggaacaggactcatcacaaagtcagcatggtgtgatagatatatacagatgtaaagagaatcacaggaatggaaaggaaacaatagctatcgacctgcacatcctttcctcagcaaaaacaaaacccacagaaaccctaactctatcccttgatatcacacacggctgcaaaaccggggctggaggtggacagcggaggctgcctggccgcgcagccgttccctgcgccccgtcctgcaaaaaggccagaaaccaccagacactaactttttgactaagaaccaggccggaaaccacattgctgatcttcctgatgggaaagcagtgtgtgttttggaggcagataaaggtggtgctggttttatgaggacttttgtaggggcctaagcaggcatgaatatagactacagaaaatctgaagcaagggtatgaatacagaccacagaaaatctgaagcaaggggcttggcggtgtcaggtggtgggaagtgcgaggaagccagacggtgatttcgaggtggacttggaggggcgggcctgacttcatcagccccccttgtgtcgtgcccagcgtattttcagggtgacagaaagtgacccatcccctacttgtgtcgtgcccagcgtattttcagggtgacagaaagtgacccgtcccctacttgtgtcttgccccctcacttggaggggaatgggtggccactcttaagaccaattcagtggtcaaaactgcagggcagacatggcctgaaagtggtgctgggatgttctgacctggacctgagggcgaaatcctcaggcttcaacacgagcccttccatctctgcagaggtggcacagcccctccaggcacatccagggctgtgggaatcctgggacctgggtcttccaggcacacctggggctgtgggaatcctgggacccggcccccccaagcatagctggggctgtgggaatcctgggacccagctcttccgggaactcttggggctgtgggaatcctgggacccgggtcttccaggcacacctggggctgtgggaatcctgggactcggcccccccaagcatagctggggctgtgggaatcctgggacccgggtcttccaggcacacctggggctgtgggaatcctgggacctggccccttcgggcactcctggcactgtggaatcctaggacctggcccttcctggctgggtcaggccctgccagttgggagcagcctgcgtgtggcgtgatctggtgtggcgtgcctcctgcgtgtagggtcacccttgactgcctcgactaccttctcctttcactacccagggcctgggaccctcctttccttacgtggggtcccctctgcagcccacatcccctctgacagatccctccacggaaaggctccggcacctcaacctcactctggctgcattggaaactcttctgtcgctatcggccttctctgaagagctttaatctctccttccatggagtctcctgtggacttaatacacgaatccatacacttgtactaatgggtagcatggaattaatgtgtggctttctccagatgtggatgttgatatttcagtaaagtctgagttgtttctggaaggtcaatgcctgagacaaaacgaatcccaaccccccagctgtggcttcatgatgctggccactgggtggccgagcgctttccgagtcccgtgaatcagaccctgcgtcttccctgtgacagtgaaatctgcttacaacacaggccccctcgctgcagaaacagcgtgatttggagcccactgggacaaagcattatatgcttctctagccaacatctcagatgaaggtgatttgaggcctgggtgggagacttcagccaggagctggccgtgctcccacgcattcaggggagcgctcacttctgactgctgcgaatgtctgagccacccatcacctctcgactctaagttctctaagcttcatcctagtgatgtcaagttaccagaacttaatagaaactggtcgtttgagcttagcttttgcactgaattaagatttcatttatttttgtgatttttataaaagattaatgtgagtcctttatttgaaaaaatgttctcgtatcttttgaaactttatctggaagaagttgtctactccagtacctgttttcttttctaaaagaactcgagtgataaatttggcctgattttaaatcccaggaaaagtttctttttccatactaatatctctacttcttattatcttgtaacaaatagctacaactcagtttcatttctgccttctcattatgataactgtaatttatagcacttgactatgtacagcacaatgttattcttgcactttctggggtggtcagctgggattctttccgggaagcccacaccccagaggtggacaccaccatgctttgccgtctgccatcactgtcatgaatttcagagatggattttttaagttggagaaatgagagactggctatctagcatgatgaatgttagaaatgagttctcggaggtgagatgacagcagctcgaggtacatggattacgtaaagatacttggaaaagagcctgaccccgtatgaatacagcgccttggctctcagggatgatgctgtgggctaaagcccccatgtcccatctccactgtgagctgaaggtctctggtgttggaagcctgctctgagggtcacagaatcctgcctcttacattttttgacagctgaacttttttggggtcttgtcctgcaaggtgttgattggagaatctgaaagaatagagagctggtagcctctcaagctgaaggtaaaggttgttttgattttattttgtgcttgctttctaatgaaaatttagttaaaaaatcagaatttgatcaaagacttggtctccttattacctggtagggaggttatagggtggtagctaacccttacacaacccagacctcagtggctcttagtatcggccaccataaaccaaacgccatgacggactgaacaggcatgggccaggtgtttccgggctccccacatctgcagcacgcgtgggccgggtgtttccagactccccacatctgcagcacgcgtgggccgggtgtttccaggctccccacatctgcagcacgcgtgggccgggtgtttccaggctccccacatctgcagcacgcgtgggccgggtgtttccaggctccccacgtcacaggtcttaactctgcctcgcaggggttttggaaactgttccttcactttgtgggaatggctttcgtttctctggttctattttaggtgttcggtaatgtcgtacatcttaaatcttttttgaaaggaggtggagtataaaaacctaaatgaatagtgaaaataatagaggattcttattggtttctctggggctggggtgggcatggcttttctcttcatttgtggcttatcttcatgtgccccctcaagctagtgagaccccagcatcaccaagaggcgcacgcaggggtggggtgcagggacggggcctgaggctcactcctgcctggtgtcgtgtcggtgcctccttccaaggctgcagctaaaacccctttgcctgaatggagcccctccctcagactccacaggaagagtcggcgctaactcaacagtgcatgtgcccctgggtgtgggggacagggttctggggccagcgatctggaaagaggcacgttctgaatttgtgttgttgctcgtccaaacattgcacactcgcgtgtttctgggacaccaaagtaaaacgaatgcagggaaccggccgacccgccacgtcgccccccagacacggtcccatccctccagcgtcccgctcagctccagcagccaggagcccgcagcctagagagtcagtagaaactgctgctgctccggtggtttcctcacccaggtgcccaggccagccttctgaaaggccttgaacagctgctgtttcacagactggtaggtgtgcgcccccagcttggcctcacagtacatggagggcgtgtctccagggctgggtgtccgtgtgctcagctgcggacaagaaggagaaagagccaatcagacaccagcagaaaaggagcttctgctaggtgagttttacatgccaggcatcagctcctggccttggccttctgcctttctttctcccactattacagagagcaactgtgaccaggtcctctggcaattccacaggaaacctagtcatcaaggaaacccgcttcatctgaggtgtgaatgatgaatgagcggataaacttgactgctactaaaagtatgaacactgtgcaggggctccaggcagggttggggacagagggggacagtgggagctaaaacagcatcacagtgggcagggagcaggctggtgagagtcatgttgtcggctgagcaggaggatgatggagctggggcgtttcctctgttagctttctgaggtctgccaggcaaagctttgcagcaacacaagacagggatcaaatgcagctctgatacccccaccacggggcagggaggccaggagggaagaggatggggccatgggggagctccaaatcccacagcgggtcttccagggaggcactcaccggggggtcacctcgagcatgtgcaagaggagagggcccttttgctcagcaggacagcatcgacgcttccctgaccttccaagtctccaggagaagggagaccccggcagtgcccttgagcggacaggacagaggctgagagctgcaggatgctgggcgtctcggccaagctcagagctaatatgtgcaattctgagtgtcctctaagttggctaaaacgtttattttaggcattagtatgcctgccctcctctaccagttgacaaatcaacactattattcctgcttggattaaaaagtgtggaaaaatgagagaggcattttttatgtgttggctggtttttctgttatttgttgtttttggttacagtctatgctttggaaatgcatacagatacagattttgatttaaaatccagaaatattgctgttatccctacttgtgaaggagaaatttgctcctaattgtggatgtcgtggaaatgcttgggctttggggttggggagaaattcgaattctgaaattcattacctgtgaaattttggggaaattacacaatttttctgagtgtcggtttcctgatatctaaaccgggaatagtatcgacttcaaaagtccccaggagctgcttctgggacaccccgaacaaagcaggtggtgccgtgccggctccgtcaggggttcagcaatgagctcctttcctgcttctgcagctccagcctggtctgggggcggtgcctggggtagcagggtctcaagcctacaggggaaacgctgctggcctgggcagctgggaaaaggacatgtgatgggcgctgtgtcgtgcatctccctccctgcagaccaagtgttggcctctcccaagagcttgctcagggctggagccagggtctggctgggtccagtttccctgcaaggatgggtgcgacctaccctgccatacagccgcgcccaccgtgcagacagcacgtgcttgcagagccgggatgggcccccacagctcctccgcccagtggtggcgttgataatctccaggtccgcgctgcccacgacccagttcatgctgaaggggggcgacttccccggctggcgcgcctcggcgtcactcacgcctgtcggggagatggggaaaggcgggcgttaatattcctggcctcacacggggctcccccaagggcagctgcggggaaatggagcctgtatgtgagtgggaatggtcctcccttttcatcctcaggactggccagttcacgtgtcacccgcagggcggaggctgcaaattgggcaggatcgtggtggccgcctcgggtccacggcgtcgctgcacctgcgtcaaccttctaatcgaagattttaatagtctggtgataatatagctccgtccagattccccccccttctgtaaatattagttgagtgaatgaatgaacagagccacgtggaagtgatctgagagtgtgtttatcaggcacctttgcaggccccgctctgctggaggcaaaacaccggggctagtaagcaacatgcagctccctggctccctcgggtttacagtttagctgatgagaaaaacaaaacaaaacaaaacaataaaaaccaggcagaaatgagtgtaggatcaattgatccgcaatgtgatcctgaaaccgcactggctacagagtgtttgagactcagtgcacagcggaaatatggggccttttgttcgaaagttacgaagaatttcatgatgacagtggggcgttaaaccaagcatgggttcgtctaagctcaggtgcctgtgtgagctgcagggctgcatgcccacgatgctggtcctgtccagagagagccggcatcttcagggaagccctcgtttcaaaagtgttgcctcttgtgtgcttggacttttaacccggaccatacagtccttgcagcccagctcacagtgcagaagggtggatgaggaggtctccactctggggtggcagctgctttgcagctgggggtggtgcactttctggcttctaactgtggccccagccctgactccttgaggtgctcctgtgctgattggggcttctggacatgctgccacaagatgtctggaaactccagggggcacctgccgagaccctgccctgtgacggcctgaggattccaaaacatgagattccggtgcagctgagccccgccaattcattgtctctttcagtcccttctgaaggctgcatttggcaatgtgaccctcggggtggggaaggcatcagaggaatacaggctatgggacgccagaggcagcgtcctggggacaaagcccacttcttcccatgcccagggcttcctcatggacccagcatggtggacgtggccctcagacgtccatgggtggtgggggaggcacgtgctgtttggccctgtctctgctcagagtctcataggaagatgcatggtccacacaacagtgagtcggcagggagtccaggctcccactcacagcagtggtgttgagacgcttggtttataacccaagatcccttgtcccattggtgcctcctgaatctcccacctcccgcggcacctgcatggcctctacctgacgcgttccccaagcccagctggccgggtgtctccctctcattcatgcctcctcgcagatcagctctgcctctccagcccttcctgccttcctggcctgctgtcctgtggtgcttggaggcgagcggggcccctgagttctcgggggcccgtcatgcatcacgtgagatggcggtgcctgcagagaagaacttggcgtcttggccagggcattgcatataggccagccaagtgcctgctcaggtccctgggaagccactggctattggtggagaggcccaggtgtcagcattggtctgagagcaaagacctggtgggctgagctggtgcgagtgggttcccgccatagcagactcccgggaggaagctgtccccacgtcacgtggtagcacagctcataacaccttcctggaagcaggcttcatttaaattcggggaagacccactgactacagagttgcacagccacagaccccagatcctctgctgctcccagcttcatccacgagcctgagctctgtggacagactgagcacatggcccatttgccaaccacttcgaaagtcacctggtgagcttctgctggccacagacaggtgatgtgggacacccaagcgaatcccgttcatgtcagctcttcctttttccttcaagtgattcacggtggcagctgccaccccgagagccgggagggacaatctggcccgttggccgctgtggctgtcctactaggcaggggccgcctgggcaggaggagccagccaccaaggccagggatgaccgggcactgggagaggcagtcactaccctgatctgcgtgcactgggcagcctcccctcctcctcccactcccgtcaccaggcggcctcccctcctcctcccgctcccatcgccaggcggcctcccctcctcctcctgctcccatccttctggtctccatgaccatcagggccaaccactgaggtgccaagctgcaaagtctgaactcagaggaaagccttgggagcctgaggtctacacaggacctcctggttccttgtcaggatgccctggctccggcctgtgcccctctcctttctctttgcggaggacgttgtgggcaagttgctgctagcccttggccagctgccgtctgacggggtttcctcccaacgctcctggctgccaggcatgacgaggcccaaacaccaccgggaaggcagctgtgaggacgtgggtgtgaacccagcacgtgcactgctccacactccggggacagaaggaaggagctggtggggcagcgagggaggcgctggcgggtgggctgcggggtcgtccagccttgcatgggggcttcttctcaccagggtgtggtcccatgtgtccatatgtgcacagggaggacagtgtctgctgtaaataacatctcagctcacctgtgatgacgtaaatcacactgtaaatcattcagttctaactacaacagccccgcaggctactgtttaacatagaaagtggtgtaaacccaggagcaatcttcaatatccaagcctgtccatgaccccggaggtggaaaatgcaccccaggggcctctcccactgaccaggaaccaggtggctggagttccaggcagtttgagttctgtggcccgaggtcatcctccacttaccgctctgtgacaggtgacttctctacttcacgaggtgatgtgaagatcaaaccaggcaaataagagcacttttggagcacccaggctatgaatgctgctgttttcatctgaaggaggatttgaaggccaactgcagtttgtttcgtgttctccaagtcacacagatcaaaaatgtttctagttagatcacagggaacatttccaacttagttacaatcacctaattgtgtccagggaacggaggaaccgaccaacaagcaaaggtcagttccttgttcctttcacggaaaacacattctgttccctttatttgtcctctgcaggggacaggaccatgtgcttacgctttgagcttctagggaagggtctgctcccctctgtgttctgctggcaaaagaaaaacttcccaaggcagcctggaagaatagcagtcctttttttttttttcttctaccttcttgtcttttttttttttaataaaccttccatagagagatagtgttgggatgtttcctgaatactcacacaggcagtagtttctgacatcgctgtgactaatatctgcagctgatcatgcccgtggagcgggaaccacggcccagatccctggagtctaatgtgcagagaaacggatgctcatggatgctcatgtcagtctcactattaggtttgccgttaatgactctttccatggaacagatcccttatggtgagaggaagtgcagtcaggagcgggctgcttgctctgaggaaccagaagtttccttctccagtgcggccagcagccaggccctcttcccacgctggggcccagccctcccgcaccaggtgcccaggctccaggagggccatctcttcctcaccgacatggaagggccatggcctcgtgcgctttcactctctttccatttccccgcagcctgagtcaccctcaaggaggtaactccctgtcctgggatgtctcctgaggacactccagcattgggacatcaggtcactccaggctcttcctttctttgttttatttattttggcctgggggagccacttggtttctcaggagccttctgctcatgtgtgaatgatctctcatggtgcactgattttataattttccaccagtttcccaggtgccgtacaaagacatgcagagccttctgggagctggtccagttgcttgctcatggtgttcctgtcgagcaccttcctggccgtggagaagtgggtttcgaaagggttgaaggtgttagggctaaactttaactcagctggattgcattgctagcggtagttgtggatagagccagacaaggtgaagacacatgtgctcaggcctagaaatgaaagcctggcttgtgtttaattttaactcctgtggctggaaatgtgaaaatgcattaactcctggctcattcctcctgaagtgggcatcggctgattgaagacggaactcgagtcccaaggacagagggtgtctgcagctgcaggggcacctactcaggcctgtcccaccctgttcctcaagataacacagcagcacatacctggtgacccagtccacccagaacacatggccctacctccttccccagaacacgtggcgctacctccttccccagaacacgtggcgctacctccttccccagaacacgtggcgctacctccttccccagaacacgtggcgctacctccttccccagaacacgtggcgctacctccttccccagaacacgtggcgctacctccttccccagaacacgtggcgctacctccttcccccgaacacgtggcgctacctccttccccagttcacagcacaaaatgtctcctggaggggattcagggaatctccagcagtgaaaggtgccaacagacctgtggcgattgagggacagagcctgtgtcgtctgaactcagaaaacgtgagcatcaggccagctgagctccaaggagaaatgcgtcctcctgagaaattgcacgcaggagtctgaactcagaaaacatgagcatcagcagctgagctccgaggagaaacgcgtcctcccaagaaattgcacacagataccccagtgctgtggacaaacacgtacacgtgcttgcacaggggtcccacgcttctcactctgcaggccgccctgtgaggccaaaattcctgtgaacctctggcatccagaagctacaacaaatccaaattaaccctgtggaacacttctgtgatgcacctcctgccttcggtgtatggcaacacaggaacgatactgtgtattctaatgtggtttccacatgcacagaaaattgtacttttgtaggctgtatttgttttaggtgattgctgtaacacattgctacatgtgttggcttaaaagagcagaaatctgtcctgtcgtagctctggaggctggaagtctgaaggtgtgggcagggctgtacctccttcagaggctctggagagaccccttcttgactctcccagcctctgctcaatcccaggcttcctggcttgtagcggcttcactcccatctctgcctgcatcctcaccggcttctctgcatgtgccatatctcccccgcctccctcttctaaggacagaggtggctgcaggcaggacccactgagataattcagatcatcttccatctcacgatccttagtttactcacatctgcaaagaccccttttttcagacaaggtaatttacaggtcagggattaggacttggcatcggtgggggccattatccagcccactgggagtgaacttcgggactggtctaaggacggagtgagcagcgctcttccggaggaggggcagccccacgctctgggccccacacttcgcagaacaggggtttgcacgctctgggccccacactctgcagaatgggggtttgcacactctgggccccacactgagtagaatgggggtttgcacgctctgggccccacactccgcagaatgggggtttgcacactctgggccccacacggcgtagaacaggggtttgcaggtggcagctcatgggctacttctccccgcatctgtttctttccctctggaccttctgtgtgtgatgaggaccagcggggctcacggtccaggagggtggggggccagggctgcccagagagcagttctgtgccactggctggatgtgcagagcaacctggggatgcacggggcacccggcacgtgcacctgctgagtgagggtggcctccgttgggtaggaccttggatttgaaaatctgtgtaggaagcccaaggaagggtgaggaaaaaaggtgtccctgaaacactgtgtagcctggtggtgagcagggtcgggccccacgtttttttagtaattgctcccaagcggccttgggaataacgccctcgctacctgagcagcttctccctgagccgtctgtaatggaaccacgctcacagacgcttgttaaacctggtacgtaactcagggatgtgttgcatttattaatttgtaaatataccatgcagcatatgggccattcatctctgagaacattttttagggagctgtcttatttcagagtagatctgtataggaataagctggtctcccggagcctttgacatgaatattctgccaggttgtctggtgtacagagatcagcctgatgagattgtgtgacctttttgctaaacacacacaatcgtgttaacagtgggctctggcagcagagcaaagctggactcacttctgtgacatactggcagtgtggcttccgacaagtgaattaaccactcctaccagcactgcttcaactaccaccgtgatcagcacaaccactgctgttacatcaccattactaggaccggtgggggtgaatccacaactcatctatgaaagtgagttttactgtggctcgcggagctataaaaagatgcctgacttgaagaaaatccttatttacctttttaaaaaggcattatgtaagtgagacgttacagcatttcttcaaagtgagcctactatatttacaaggtaacttactttcccaaaattaaatttacacaagacatctcaggagtataatttttacatgcagtgaggcaagtctgtgtcactgggtagcactgcatttaattttgcagagtgaatgaaatagcatggcatctgggcctgcacagattcataaagctaaaggaatcagagagatctcctgagttttctatatggccagacacgctgcggggtctttctctctctcacgcacacccacacacccttaatggaagagctggtaaatttaatgtggacttatggatttggggtaactaacttctaaggctgtattaatgccgttttattcattatcattgatatgaatgtctttataattgccagtaattttatagctgctgtcttgctttgatacagcacatttataagaaacataaaaagtactatggaggctggagatggtagggttaactgaggatggacagctggttctttctgctgtgagatagtcctaaaaacttctgtgggttcggcctggcacggtggcttacgcctgtaatccagcactttgggaggccaaggcaggtggatcatgagccatgaccaccctggctaacacggtgaaatcctgtctctattaaaaatacaaaaaaaaattagccagcctggtggcgggtgcctgtagtcccagctacttgggagtctgaggcaggagaatggcgtgaacccgggaggcagaggttgcagtgagccgagatcgcgccactgcattcccgcctgggtgacagagcgagactccgtctcaaaagaaagaaaattctgtggattcctgcaagccagaagggaatatgaatgttgaaaacacagaggccatggtggcttttcctcgccttccctcatgtgactggtttgaggtggaggtgttgagggtggaaggcaggcatctgcagggtgtggaacgggccacgctggctgcaccgtctgtgaatgtcccgggtgcaagttctgctgggacagcagtgatgtccggggatgccaaggcctgggcggtgtcctctcaggagggtttgtgcctccactgatctccaggaactttattcctaagagaccaccgaggagtcgggaggatggacgaccgctcaggttcccccgaggttaaagtgcagaggctcacaggaggcttcagaagatgtgaaatttccatggcagaggaaagaatctgcatttttcatttttcagcctgataatgacatgacttttggcttctgtaaggattgtcattatttcaaaagatatgggacaaagggactttgggggaatggggtcttttgctgttccaaattatgtatttttgtgccctagtactcaaaatgtagtaatatgccaggtttcaaactggataaaagtgtggctggttttcattgctcttcagtcggcattactcatttgagattgtttttcttaagcccagataacacatggagtgttttctggagagtgagtccaccatagttagactctgtcagtgtttgtctgcaaacgctgtctcaccttcgtttttgaaggatgctttttcttgatatcagatcgtaagttgagattgtttttctatcagcattttaaagatgccatttcattgtttttttgtcttctgagaatcagttaccagtctgatttagctcctttgaagtgagtttgtctttcatttcctgactgcttttaagatttttttggtctctgtttttcagcaatttaaccactgagatgagaattaaaaaaagttattcttggggtacaatgtgcttttcaaatctgcatttggatgctttttgtttgtcttggaaattcttagttgtgatctctttaaatatctctcctgttccattactttttctggaactcttattacatgcattcagactttcctgctctcttcactctcttttgtactttctgtgtgtgatggttcattttatgtgtccccttggctaggctgtagcacccaactagattaactgcgagattaaccagcagtcccaggtattgctgggaaggcacattcaacgcgattaacatttaactcattcgactttgaatagagcaggttatgctctgcaacatggctgggcttcgtccaatctgctgaaggcctgaagagcaaagactcaggttctgtgaagagaaataaattgtgcctccacatggcttgtggactctagacgtgccactgccactcctgctgaaacttccagcttgccggcctgccctgtgcattttagacttgccagcctacacgattgcatgagctgatttcttaaaataaatatctatcaatctctatctgtcatctatctatcatctatcatctatctattatctatctatctaatctatctatctgtctgtctgtcagtctatcatctatctattcatccatcctccatatatcatttctgccttctgtgctgcattctggatgttttcttcagaactgtgctcccatttattaattctctcatgtgctgtgtttatttggtattgaaccatcctctgttaaacaaattattttattttctgtatttctgaaattcctatttggttctgtttttttctgagctttcatctctccccctaagtgttccatcttgctttagaaaatgtcctttctcctattgagcgtggtcatattagggtctgtgtctgaaactccaactggagtgtctgtcctgctgcctgttgtttcttctgcatttgggttttatctcctgtgtctgcttgttttttgtgtgtggcaatattctatttataattttttgtagagttattttgatctaatgagtaagaggaccatcttaatttaagtcaggagtggagaccatttcaagctataaacactgtaaggggctgtttgccttgagcccaccttggccctgggaggcaggccgacccgcccccttagcctcccgtgggtgctgaagcacctctcagcccttcagcttctcagggactcttacaggaaaatctcccctcccatccctgtccttccccaggtcctggcttggcaactcttccctctcctgttcactcttgtggcactctccttggtgccaccaaggagaattgcaggtgcccctgccaacatctcccaccatcctcagggtttgtggtgcagtcccatggggagtgggattctccagctttacagaaccttcagggaaccatcattcagtatctgtcaatgctgtacacagttttttttttgttttttttttttttaagataagggtctttagtcccttgttaagttttatgactggcaaacatttctctctcagaatggcagagttttgcaggcctgggtgggagagcacatctaggcagagacgacgttgaaaggttttcatgccagagaaagctcagagttttgactccaggggtgtggctgtgagcaatgagggatgtccatggagaggctgatcctggttcagaagaattgggatggtgctatcagcctgaggcttctgaatccatggagaggctgatcctggttcagaagaagagggatggtgctcttagcccgaggcttctgaagggaggtatggctcactgcagcagggtgaggctttctagcccccgagccagcaaagcacagtggggagagtctggcatcctaagatgatggtgggggccagttggcttttatggcaccgtcctagtctgtgcttttcccgttagccctgtgaccaccttcgtaaccccactgaatcgaggcccatgtgattgtttcaggtctggggaaccaaacagcagcctgaaaccagctggaatcttcccttggtgagaagggagaggaagcccgctgcagcctttccagagtgcctctctctcccgtccgcttacctcacactctcagcccaaccctgcctgtttcccaaaaccctgtgggagcccttctcccagctccattccctcattcctctaggactctgcgcagtgtcaccgccacactgagagtgctcctgatccttttattagggctgagggtcactttttaatccttcttttgcctttttttttttttttttttgacaaagcactcatattttgtttgtccgtctcccctactggaatgcaatcaccctgaggtatggatttttgactattttgttcactgctctattctcaatgtaggattgtgcccggcactttgtaaatcatcaatacacatttgctgaatgattaagcaaatgcctggattatgctgatcaatttctcgatgttggatacatttaatgtattgacaatggaagtattttcctggagttaatgatacaattctcaggagcaatgtaattaagttcgttgcttaaattctactgggaaacaattccttaagatcatggtggaaattaaatgaaaattaattattatacaaaatatttttaaaaggattctccagaaaatgaaaacaaagtttttcaataattttatatttatcataagctatgtgccatctaatttgcctagaaagttctgtgctaatctataaaaatgtcttattaagtagttctttgttgaatttaacttttttagttttcatgaaaagatattaggatttcttttctttctttcttttttctttctgtagacatggggtctggctatgttggccaggctggtctcaaactcctggcctcaagtgatcctcccacctcagccttccaaagtgctcggattacaggcatgagccaccacgcttagctaagactgccttttagattgttctagcaagatttataattttttccaccaaaaattcctgcaagggcatgggaagataaatttctagctctagtgactgtaagaaacagcaggctgctaaaatatttctgtaatgcttatgtgtttattactaaacatttgtaaaaattttgtaggttactccaaaatagacctctgtttaatgtaaaaataatattgcaaatcacttaccatctggataaaatatttgctactgcttcactatgttattttgcaaaatactcttaattatcattaatttcagaaatttctcctgaattaaagaggtctgatactccatagaattttcctcaacttagtgtgacaacattttgaaaatctggactcataaaaaaaatggacataaatggcaacagagagagactttgaatgccaaaaataggtggcattgggaaatttcagaagctattagtattggtacacatttcagtacatatgtgacttcacatttcagtacgtatctaacttcttttctgacaaatggttttgctgtgaaacatggatgcctgaaagggcttcagacgccccagctggcccttttcacactccaggaaattgtgtgctgtggaggaagacagcccgtgctctcctctattttatcaccagcactgcaatgttcatcacgtgaacataaaccaagagtcttaaacaagtcatggttctaacaatcaattctctgggtccatctctcagatttcatgttcgttgccaagaccttgaggtgggctgtaaaaataatcacagttttatcttcagtgtggactaagaaattaatcattgacaacatatctgtttaacatgctgttaacacaaacagcgaatttatcctacccagatttctttttttcttgatgaagagaaataaaaatttagccttgatgttgaaagctcagagaagcatatatcctcagcttggtggaacagcctgtcaaagtggctatttcatctcactttttcctaaaaggatgattattcaaagcatagagttttattaattactatccccatcattttgttcatcttactgaattcactgagaaggaccaagggcaaactcctttaggctatctgtactcaggaaataatgcaacttttgctgaaggattcagcgtttgagacatcctcgaaatgggcttctggtcctgaagttttgccatagatttagactggaaagtgcagaatttttcaagtatatccttcaagaacattactatgcatcccgtgactgtgtgagtaagggtatctttttcagcttggttgcttctttttaactcagagctgatttagccatatctaaattgctgggcctcattctgctaatacataatcttcatcttctaaggcagttctgcaaactgaccttgagggaagcttcaagcaaacttcatttgcttatttgagggtgctttttattattatccctgtgcaagatctctctctctctttcttttggtgcaagaaattctgatgatttcttttcaaaatttgcatgattggtttttaaatgtccatcaggaacaatgcagggacagcttaggggttgcatgcaggcaaggtaccaagatttaggctcatttgcatctgcaaaataatgaaaaccagattcccaataagcatgtaaatggaggctgaaatatttagtcaggctgcaccggccgtggtgtggcaggtgccacctgggatcggaagcagacaggtgtctctcgggcttggctattatctgtgccactcaatgatgtcaggtggatctgaatttctctaattgcgttttctaaaattcactgtgttcacacttaggattggacattcctgtttttatttatgttgacatgttcccagatggacacatgattgaaaatcagcactgggagactggctgctgagggtgacatgccagtgcccagggagggcaaaacctgctccgttgacggtggcttggggagggcgtggttgcatttgtactccatatttccttgtgctgcgcaagcttaaataagcccttcagtaggtgctggacaaagagcggggatggcctaaggaaaacgcgcagaaaaagagtgcaggagccacttggcaaacaggtgaaaatcctctcctttctggggcagaggttttctccgtttcccccacatatctgcctgattctgccacaggcaggcccttcagagagctctcccactccagcaagggaggctgactcaaagacctggtgttctgcaggcccagcatgaggctggcggtgattcggaaacccacccccccgcttcccgctgttcctgtgaaaggccaggagtcgcctcctgtcagtgtgtccttcacaaaaccctcccaagaccactcccggggctttctagggcacctcgcagctgccaagggactcttcatccttgcagctggctgtgtgccaggcagcccgggcaggccccaggtaacgtggggaagtagaggcttggggaggctcgggtctctgaggacatctgggctgtggggaatcctggtgcgaagccggcccagtactcgcggagtaacctggcagcctctggagggtgtggagggcccggggccctgggttccgaagacccgctctggccacgtgaccttggcgccccccgcccctcctcgcccacctggctcttcctcagcatcgcctcctgtgggcggccaggtgggcaggtgggcaggtgggcggccaggtgggcaggtggggcctcttgggtgagcccaacactagtgattctgttttcagaactccttcagacaccgctgtgaaaacagcaccatcacacaatcacgaattcacatcaggacctggcctattgctatatgcagagagatgctgaaacctttcattttttctttttaaaatcgtaggactttgcccattaaatcctaaattgccactagccaacatggatgaagtctgcgagggatggcaccgccgggcacacctgtgtctggcctggtggtgggaaggaggtggagggcccccgggaagggggttcttaccgctgaggagaggccggttgtgccggtaggaggcgggcagctggccgacaccctccatgcggtggctcatgacgcgtgcgaggtggcccgtgtggtgcaggctgcccaccacgatgctctgcaggtacacgggctccacgaagtgggacaggagcgcgccctgcagccccaggacgttccacctgtggggagagccagcagtcagcggagccccacccaggagcccagggagcctggtcctctctgtccgtctgcggcctggtcctgaggacctgtcagtcttcccatcgtgcggaccttggggagctccctgggagtgccccagacccaacccagccatcactggggctctggggacactgttgcctgggactgggctccacaggcccatgtgtgctaacaaatgctgctctcttttctgaaaatgagtcgttagagtggaaactgttatgttctctgtgggacttagaattagatttttttaaaaagatactctgtcccaaaagtgaatctgaatttttctttatattagctgggaaatactataaatggaatttgtttattttagtttagggaaaaatacttagtactccctttgtccttagcagtcaaaatgacctattgtgttgaaattacattaacaaatgaccttgttttggtctgggcatgattttggtttcagaagcccagattggagatgaacaacaaggccattttgtttgaaataaatatagctctgggtgaatgtttttgcttcctcaagcaaaaatgccaagagcactgacattttttccccttaaatttgggtggcaagaggttccatgtgtgtgttttttgaagcaacattctatggtttccactctaaataatgtgcttaaaatcctacctccttcagcagcaagcgttacgtagctaatttcttacatcattgttcttttcattaattaacatttctccactgttagagcaattactgccatccccgcatgcagcgtctcttttcatgattaataaggagtcattacatttcccttcccgaagcagtcaattaacacaggattctttccattaattaccgaatctacctggagagtaatcttctccgagaacccgtgataccaattgctttaaaaagttctctttaaattttattccaaaaacacaagcaatttagccagcgatattaatttgcctcagaagcatctccatgaatgagaaacatcttttaatctcatgcaagaaaaggcagccatctggctggtgggggtttcggggagccgctctccctctctccctctgcaaatgcaggtcattaaagtaatgtgctcatctacataaaactcaaatggaatataaaaggtaatatttatatacaaacaatttagtcctacaatttaaacagtcattgattttatgaaacatttacttcagtctatcagatttgcataacttcatttaaaaaaatattgtggtcatttctacaagtcacggtgcttctcccagaaagcaagggaagggctggccactggatgtgcgagcttctaccagaggggtgaggtcgggcgctctgaagggtaggatgagatggaggccacagagcgcctgtcaccgaggaccttcattccacagagtgtctgcctggatctcggatggtcgtaagccacagagcacctgtcactgaggaccttcattccacagcatgtctgcctggatgtcggatggtcggaggacacacagcgcctgtcaccgaggaccttcattccacagcgtgtctgcctggatctcggatggtgggaggacacacagcgcctgtcactgaggaccttcattccacagcgtgtctgcctggatctcggatggtgggaggacacacagcgcctgtcactgaggacccttcattccacagcgtgtctgcctggatctcggatggtgggaggacacacagcgcctgtcaccgaggaccttcattccacagattccacagtgtgtctccctggatcttggatggtggctcttcagagtcaatcttttccttgatgttcaccgataagtcagagaatggcaacaaatcctgggaaaggagattttttgtaactgagcttttccttcagggaacaatgggaagtgttttctgtttgtttgttttgtttttttttcaatagagacatggttttgccatattgcccaggttggtcttgaactcctgggctcaagcgatcctcccacctcagcctccttaagtgctgggattacaagtgtgagccactgcacctggtctttgtgtgtgtgtgtgttttttttagacagggtctcactctgtcacccaggctggagtatggtggtgcaagtggtgcagccatagctcaccgcagcctaattattttgtattttttcatagaggcagagtcttcctatgttgcccaggctggtctcgaactcctgggctcaagccatccactgaacttggcctcccaccgtgctggaaccacaggtgtgagtcaccgtgtccggccaaggctgacatttttgaggagcggttgagggatttggcttcttcccttgactctgagaccagaggacagaccaaaggctgggaggaaattcagcagtgtggccctcctcgggacgtaagatgcccgttctcagatttggagatgccagaaaacaaggcccaggaaaggaccccgtgcagggcccagggctccgggtactgtggtcccagtgggcctgttaattctcagactgttagtgcgtcttaaaatgtcttataaagcagggaaaggtacatttccgccatctgtaacaaagcaccttcgtgaaataagccacgagttaaaaagtaaaattgggattcctggaagagacgcctccgtgttagaggccgtcagagcacgggctttgaacaaaacttccggaacgtatgtgagtggctgtgatgctgcaggaccgtcggaagacaaataacttctctatctggttcctacctaataacctttacaataaagaggaaatcaaccttctctttgcctggctaccagagattaaacttactctgctaagatgatcaataaaaccaaatgtctttctgaatatgagctggagaattttcagcattcaggattgaatggaaaaatgcctctccttttgttcaaacagctgatattactgcaatgttgacagaaaaaaaacccatgtctagttttcaatatagataatccctaaataaatatatttttgtctctttgtcagtcattgaaataccacagataagtggggaaggtcttggaaaaaggctgccattctttagccaggagatgcaacctgctcactgagtccaggctgcagcctccaggccacaatggaaggaaagacaggtctccggtgggttgacgacacctcaggctgtccctgcaggtgcgccggcatcaggcagggaacaggaccgcccttgcctgttttggacgctttggttttccgccgtgacgcggccctgtgaggagaagtaactctctaaagttacatgaagcctgcagcaaagtcctcagctgccacccgtcccggcgtctgcagctctgcagggctggctgtcaggcctgctgctgggatcatctgggagctttgaggatctccagaggtctggctcccccaaggattttggtgtgactggggagtcagtgcggccatcagctttctcggtgccgcccacgtgattctcctgtgagccagggttgaagacttctgcagcaaagcggcacatttggagccaacacagtcaggtaccagttaggtcgtgatgctggtcagtggggcctcccttgaccgttctcttgctgctctgagcgactgtcttctcagtggacctcaaagtgggatgtctgggccagccatggagcatcacctgagaagttgatagaaatgcagattcctggctgcaccccggagctgctggctcttgaactctggggtgaggcccggcagtgcaagttctaaggaggctccaggtggctctgaggctgctcagttcgagaaccaccgtctccgtgttggttctggggtcacagtaactgtatctacctttcacggcattggaagagcacaggggacagttgaatctctggccagtctgggggtgacatttcccttcctccacaccctacctccaaaccctgtctcacaccttcttcctcccaccttttgacaagacaggtaataagtctgagacgtctctgcatacaggccccaccccatttccaggccactcagacctattctgggggcctttcaaggtgaaatagaagccaacagccttttgactcaataacacacctgctaggaattcacccagcatctgcattctcaatggaacgcctgatatatggatggggccagtcttgaaggggctgtttgtaattgcaaagcagacaaagcacggcaaagcagaaatgggaaatcacctgagtgcgtcttaacagggaactggttacataaatgatggtgcattattgacaccctggcctgcctgaccatgggtcccacagctctcgtgcctctgaagcgggcctggcttgctgggacaccctcagggccaggaggccacagctgccccacctgcaccttctgtcgcgtggacgctccgcccctcactggctcctgccggcctcacccgtcacattgtgtaggacgcttgtgactgctctaaaaccacagggctttcaagctgtcccctccaaggtcccctcctgtgtccagcaccatcgtgactgcctcctgccgggctgcccctgcctggccctcaggtgcctgtggtttaaatctcctggcattgctgagcacgggtctggtgtgcagatggaggtgactgatgcgtaggaggaagctgatggacagttcgtcccttcgccagcagctgtgttgtgttcaaaggtggaaacaaaccagctaggctctcagtgaccccacccaacaggcatttcctcaacgtgactgtgacatccacagggtgggcctgcacctgccttgagcctctgcagcttgggatgcctcagcctgaggtgctgggatgatgccacctgggactgggtcccctgacctcctgggttctcccttaggtcccggccgccattctgcagagactcctgagtccgtgaagtggatccagggcctccaaccgccccagctgatctgccaggaaaggggtccctgctgcccgggggctgcctcggctggcgccacgtggagatgaagtgagccaacccccgagctcaaagggagggcttgggagtacacgagggccttgttgttttagggccacctaaaacaacaggttttaggtggccctagggttctgaggtgctttgcttcacagcaggagacaactcactggagcccgtggcacagcctgagggagacaactcacgggagcccgtggcacagcctgagggagacaactcactggagcccgtggcacagcctgagggagacaactcacgggagcccgtggcacagcctgaggggtctctgggttgcccacagcttccccaggagctcacacaggtcaggccaaggggaagggagcccagtgcacacccccaggctctgcggtccgaatgcttgtgttcccaaaaattcacatggaatcctcacctcccagagtgctccccagccccttccaccatgggaggacgcggcacagggtgccgttaccacctgggaagcacagcctcaccagacgcggaaactgctggagcagagaccttggcttccagcctccagcgccaagaggagcggattcctgtcgtgggccagcgtgttctgcgtggtggccgggatggaccgagactgggtagatgccatcctgactgctgacgtttgggacgtgagacatctgggggcatggggcagcccgctgcggccaggtggggtcatggggcagcccactggggtcaggtggaggtcacggggcagcccgctggggtcaggtggggtcacggggcagcccgttggggtcaggtgggtgtcacggggcagcccgctggggtcaggtggttcacggggcagctgggctcaggtggggtgggtgggatattcagccgcttccgattattttcagtaaattacttccaggccacacatatctcatttctcttctgaaaaacccgtctcaaaaactccctttctcttgatatttctctggccaagtctaccctgcaacacgctggtaaaatgtaaaattccttcgcacgagagtgaagaggatgatccccaggtgcgtctctccattcccgggtcctaacgattcctccttaagccggctacctgcgcgggggccacgctctcccactgggaggatggtttctgggacatgcggcgtctcctccttgtgcctgtgcgtctgagagaactggggcgtctccttgaactgggacgtctcctcctcgtgcctgtgtggtctgagagaactggggcgtctcctccaactggggcgtctcctcctcgtgcctgtgcgtctgagagaactgcggggtctcctcctcgtgcctgtgtggtctgagagaactgcggggtctcctcctcgtgcctgtgcggtctgagagaactgcggtggccccttgtgggcctcttggttctggggacagaggacacttttcactcagcccggggacctttggttctttctgtgaagatggcgcccatgagatgacgccttgtgactcaggtacctcagccctgcgcctccgtctctgcgtctctgtattgggttggtggcgtccacactgtctgcgtcgttgctgagcatcccaggtccccactcagcccggcctcgtgttttctcttgtcctcctgactggagttccagttcttaccttgcagatggtgcgcttgtcaccctctgccgtctccacagcatctgggccgggtccccccaggaactgggctctggtctcaggagctgtggccgaggtcggtggtgctggtgcaggagggcagagccgcgaaggcagcggggctgctgattgtttcattattactttttatatttgataagtgttagtgaattgatcactgcttctttcctcactagaggtgttatgtcacttaaggccgggcgcggtggctcacccctgtaatcccagcactttgggaggctgaggcgggtggatcacttgaggtcaggagtttgagaccagcctggccaacgtggcgaaaccctgtctctactaaaaatacaaaaattagccgggaatggtggtgtacgcctgtaatcccagctactcgggaggctaaggcagagaattgcttgaacctgggaggcagaggctgcagtgagccgggatcacgccatgcactctagcctgggtgacaagagcaagacttcatctcaatctgtacaattttactcttttaaaaggagtaaaaatatttttaaaccagactgggggaacttggggttcggtgtttaaaagcagttctgttaggaaggacctacactctgagattagaacaatgaacatcactcatttgacctcagtggagtcaacaaatcatggaggaaggcgtcagaattgttcccaggtgggctgcgtggccaagaggaggcacgagaagctgttgttgagggaacattgagcagctgatctctaggtggggggagacggcactctgcacaggctaaaatttaggtttagaaatcagccagtgccgtattccccagagagcagctgtaatttcttatggttcattttcatggagaaagttttaatctgttcatttaaagacacattgtgatcaataatcaagctcaggtacttaaaattagaaaccatatctgaaggaacattagttccaggagatttagattttttatatgccgctcaatgtttgattaatcttagagacaaaagctaaaagcacctctgcagttttcctcattcttttaggagcctggggtttggctgttggtgagagtctagcctggctccatagagctggaaaaacaggccgcgtccacaggccttcaggatgggactgttaggcctgcggtgtccgaccctcttcccatgcaggggcagggtttggtctccagggcactcctaaccttaccttgtggctttgcaggtcaattcttattgacctgtgactaccactttctgcagttccatcccatcttcccagggctatggtggtggtaggattttaggaatcgagtttactgtgactttatctgttctctgatttcctgaagaccggataggtgatttctctcacctgccagtgccagcctcctagggctgctgtgggacaaccacagtggggtggcttgaaacagggatgttcccccagttctggaggccagagtctgaaaaggtgtctgcagggtcgtgctttccctgggtgcgtgtggctggtgccaccccccggggtccctgtcctccaagcacccactggctctgaggtcacagaggaggccaaggacacctgggtgtgtctgtccctggccccagcactcaggtgcaggcagccgggccccatgctgggctctgtccctgcctcccattctctcacctccctgcttccccagcccctttgcatcagcacgaggccctgggcggactgaggtgcctcagggacatgggactctagagcgtcctctcatggcctggacccccagtgggcctggctgcacatcaggccgtttcctctgggctggtcttagccaccaggcagcacccatgggctcttaagtggtcatgtaattatcaagtcagtcgtgtttgctgagcccctgagatgtgaggacacagttctaagtgccacagggagggcctggttcctgccctctgggagggcctgatttgtcgggggagacaagatggtcacagaccattggcccaggaagaggggcttctgagcaggggcttggcccacagctttctctgctggggcgcccggagcctgatgagtggtcggtgctgtcagggcactgaggcaggtggggtgggggttctgcccagtaaacaggctcagggtatcctcttgtggttcatcgtgggtccccagataccacggtggatttcagatgcagtgaggggcgtgtggctgccaatacccccagatccttctgaatggcggagaacattaggtgtgcattgtgggagacacacaggatggagacaaacgactcgttcagtgatccccagagcaacgctgagggcgcctgagagggaatcacaaccccatcagcacagggtgacctgcctcagcccttaggtgtggggatggctgcactatcactgacacccacacccatgcccacgcctacaccatcacccatgcccacacctacagcctcgcccacacccacgccatcacccacacccatgcccatgcctacaccgtcacccatgcccacacctacagcctcacccacacccacactatcacctacagcaacaccgtcacccatgcccacacctacagcctggcccacacccacaccatcacccacacccatgcccatgcctacactgtcgcccatgcctacactgtcacccatgcccacacctacagcctcgcccacacccatgccatcacccacacccacatcatcacccacactctcaccatcacccacacccatgaccacgcctacaccatcacccacacccacatccacactcatgcccatgcctgcaccgtcacccacactcacatccacacccacaccatcacccatgcccacacctacagcttggcccacacccacacacccacaccacactgtcatccacaccctttcccaacttgagtgctctcctgtgccctggtgcactgaatgactgtggccacaggaggccagaagcccacacagaggacggaggggacatcagatgatgtgtaaggaaatgtgacaaaaggtttctccacaatgttttacggctcattctaagccactggaaaaatttcaagatttctatcacacactttcatattttgctgtaaactgatcttaccactgacattgtgaagtgaaatctattattattcatggaattccgtacccagaagaaggtctgctgtcacccaagaatatcactatgggtattattggtcctaaaggtgatgcctgtgcattacttttgatctgtaggtgggaagtaatgtagctgtgttgtttgtttggatcttttgatacaaaagatcatttttcattgatatcaaagggaaattgcaaagagaatgacctatttgtctggcggacacactttctgtaccttaatgatacatacaattctatccatttattctcattttaatacatgaaagtggcacgaagtcggagatcaaaagccagccagacattaatctcatggctgctcaaacagaactgcgtctattcccagagaaatttctaaacgaagaagcaaatatgaccacgggttcccggcctcgtgtgggatgagactcgtgctgtctaggagagaaaatctgtaggtttcactggttttagcacatccctaaaatgtatgagcagcacacatacctctggagccctggccaaagttagtggctgagcagaagacacgtgcttcgcctccataaagtcgtctgcgtggcacgtcagaagcctgcagtcctttcaacttccagttcccagggcatcatcaatcacgtcgcagcgattcctatttcacgtcatggccattctgacaaaacagcaggtttccttcgctcatgagtgcagtgagcggttcctggatgctgaccgtgtggagcactttgtacctcgtgggggtgtaaagaagcctggcaggaagcctggcaggtgggcctcaggcagatggaaaggtggggacagttggaagcagccccttcccgcgctggggcctccccgtggtgtagacgtctcctcgggacgagtctcagtggagccatcatagccaagtcagccggtgcttgaaggctgctgcagctagcacctgggcaacgcggaggctgtacttgccagcctgtgccagggaggctctgggcactctccctgccagcccaccaaggtgttgccaatggcgctgtgaggggttcaaaacccttgtcctctcctgctgtggctcagcctcccatcgctccctccctccctccctcctatctatcttctatcatctgtcgatcagtcatctaatctataatctatcatctatctaatctatgatctatcatctaattttcatctatcatctatcattatcatctatcatctacctatcatctgtcatctattatctgtcatctgttatcatctatcatctattaactatcatctgatctataatctatgtatcatctgtcatcttcatctatctgtcatttattgttctatgtatgcctgctatgtgctgtatcatctatctgtcatctctatccatctatctgtctgtcatctatcgatctatgtatgcctgctatgttcctgcacccactgtgccagacactgaatgcatgacgtggaatgagacaaggtccccacctgccagaagcttagagtttggtgggaagcatggattctaaggagggtgagggcctcccgggttcagacagtggactcccagcagcctcaaatatgttatttctggacgagaccatggtatgctgctcacagtcagctctcgaaagaaagaaacaatcacgtgtgtagctttccaatttccatggtgtaagcaccatcactgtggccaatttcaagggcccagtgtgaggtcactgagcaggtttgggcagcgatgaaggggtttggaaaacagcaggattttgtggtatttccaccacacagatataagaggtgtaaataatttcaagagcacaaataacagtaaaataatttggagtggtgagttttgagtacctgttacctttgttttactatatttagttctaagtttatgtaatttagtttttaataatgacttatttgacaaccacctttcaaaactgcctgcacatctcaccatggccctcaggatgacgctggctcctgtgcatcctgcgccgggcatggtgcctcacgtgaggtcatttccacggccacgtgtgtcctcctgccgcttcacagacggtgacttccacctccatgtcctcagactccactctccacagagccctgactgtcattaactccctgacttagaatatttcatccgtatttgtgtatgaagggtcctttatgttgaatgttatttaagccctaggtttaatttttgtttttgtgcaggatagaaaacagatgaacacatacgttatcagatggtctctctgtacaaataatgcacggcccagatgcttatggtctggaatcattagcataacatatgctgctgctcagaaacggcaagtgcggcgcaattctgaaacagctcctgccttagcaggtacatcctggtctatgctcaggtctgattttggcagatacacaagtaccttcttgccaaaggctgtgtccccatgtcactgcttgtgcctggcccagagcagaggctccgagtggtggcaccacttctgtcattgtcgggaccatggctgcccctcctccccctcctgctaaaccaacaagggctgttgactgagggcccccgagggccactgagtgcaccccacagtggcaggcaccctgcaaccaagtgtccctgagtccaccccaccatggcagacaccctgcagctgagaggccctgagtgcacctcactgtggcaggcaccctgcagccaagtggccctgagtccacctcaccgtggcaggcaccctgcagccaagtggccctgagtccaccccaccgtggcaggcaccctgcagctgagaggccctgagtgcacctcactgtggcaggcaccctgcagccaagcggccctgagtccaacccaccgtggcaggcaccctgcagccaagcggcactgatgagcccttggaggtcagaactcagacgcagaagcagacagtacctggaactgaacccctgcaagctccatgcagagaacagcgtggcagcactcgaggagggaaaggctttggggaagagggagggaggcagaaggagcagctcagggagctcatcaatgagggagggtgagtggagcagagatgaagagatgagatacacacagccagggaggaggatgagatggagagggagagacagagacacagaaagacagagacaagcagacaaggacagagataaaaagacaaagagagacagagatgggcacacagagaaagagacagagagacaaggacagagatggagacaaagctagagacagacagggagagagatacagagagacagagggagagacatagagacagacgcagagacagagagaggccgagagcgagaggaggagggagaagagatgatggggacaaggggaagccaagtctaagacaggagagaaccagtaccagaaccagaaggtggctgggcttcgaggggcctgggccagtggctaggggcatttcaagccttgcctgtgcccccacacctgggcacccccctgtccactgcacccctgtcctgtcaccagactcggggatgaagcacttgtgaatggagagagaggacgcaactctgttctaacccggcaggtgcttaggattaattcctggacaaattcaggaattctcactctagctgcccagagccacgggtgtgacaatttccacaaacttgtattctgttttcaaaaggagtctagaatcacccccaaatcccggacactgaaagcccctggccaggaagcagtgtagacctttgtttttcaaggagattttgttacagagagacaaccctgccccttgagtggccactgagtgcttggacctgccagcgttgtgtgggtttgcatctgtgtccagcatctcgtgggtttgcacctgtgcccggacctgccagtgttgcgtgggtttgcacctgtgcccagacctgctggcatcgcgtgggtttgcacgtgtccagcatcatgtaggtttgtacctgtgcccagacctggcattgcgtgggttcgcacctgtgtccagcgttgtgtagctttgcacctgtacccggacctgccggtgacacataggtttgcacctgtgtccagcatcgtgtaggtttgcacctgtgtccagcgtcatgtaggtttgcacctgtgtccagcgtagtgtaggtttgcacctgtgcccggacctgctggcgttgcatgggtttgcacctgtgtccagcatcgtgtaggtttgcacctgtgcctggacctgccagcgttgcatgggtttgcccctgtgcctggaccttctggcgttgtgtaggtttgcacctgtacccagcgtcacgtgggtttgcacctgtgcctggacctgccggcgtcgcatgggtttgcacctgtgcctggacctgccagcgttgcgtgggtttgcccctgtgcctggaccttctggcgttgtgtaggtttgcacctgtacccagcgttgcgtgggtttgcccctgtgcctggaccttctggcgttgtgtaggtttgcacctgtacccagcgtcgcgtgggtttgcacctgtgcctggacctgccggcgtcgcgtgggttcgcacctgtgtttagtccaccatctatggatgttgaagatcccagggacggccaagtttcaattctgtaggtgctaatttacttcatttttctggggcaccagagagtaaatttagaaacccaatgctatcttagggcaccaagagaatttcagttgaggtgaaaattactgctttttcctcatcatgaatagatgaaaacattgtaaaggaagaatacattttcttttgaagaatgagctatttgtcgacaatgggctgttccctttgatgcagaaaccacggctttggtccactgtcattaggctgaccctgtggctccccagccaggagtgcccagagccaggaaggaaagggcaccattttccccagctctcccacgatttccatgagaaggtggaaccattgttgttagggctggggtttcatctgcctggagtccagaagccggtctgtgtagatcccggggagcagagctgtaggggcctgcaggggcgggggcaggtgcggcgggggtctcccgttttctcctgggccctgtgtcccctgatgtcacccccctgacctccagccccttgggttttgtggacgggccagggcccagcactcgggcttaggatgggtaaacagttgtcctgttatctgttgggcatatggcaggtgcctgtcccatgcaggcactgcctgccccatgggcatctgtctgtgctagaacccctgggtggctgcgttttgaagaggattttacgggggctggctgtgcgcaccctctcccttctctccgttctctccccagatcgtgctgtggttgtagggagcccaggaccccatgggcacaaaagcctccatgcaagcatcagaggtgatgccccgggtcctgctcaggccttcggcttcctggccctccccactcagcctccttcctgcacatcctggggaccaacctttgcatctcctgcctggctccaccacaaaacgtccttacagagggtctcagggccacagcctcgttgggagttgggggtggcacccggagaccacatttgcaccaaatgcgctgttttcactccagctgcagatgacagaggaacaggacgaccagagtgtccaagggtgttctgggtccctcaacccagacttcctgtgaccacattgttgttagtttatcaggcttgtggggaattcatggctcttttagggaaactcatgctgtccccacacctgtgacccctattttccaaaccaaagttacagaaatgtcctgcattggggatggcgctttcagggcgtcagaccaatgtgggggaggtctaggggcttcagatcaacgttggggaggtcttagggcctcagatccacgttggggaggcctcagggcctcaaatccacgttggggaggcctcagggcatcagagcaacgtgggggaggcctcggggcctcagagcaacgtgggggaggtctcagggtgtcaccaacgtgggggtgtcaccaacgtgggggaggtctcggggtcagatcgaggacggagaggtcttgggacattagaccaaggttgggggaagtctcagggcatcagactaacctgggggaggtcttggggcatcagactgaggttgggggaggtcttagggtatcagactgaggtcaaggaggtctcggggcatcagaccgaggttgggggaggtctcggggcatcaggccaaggtagggggaggtctcaacgcgtcagaccaaggttgggggaggtcttgggcagagcagctcaggagcttggggcgtggcagcgactggaggtgctgggagggaggcgggtgcccattctgcagcttcctgctcctctgcacagagctcagccgaggcctctcatcccgagacctccacatggaggctttgaaaactccatccaagaagacaatatctcgggatggtaggggaaaggtgttccacccagctgacctcaaggcctttggctgtccctggacattagtcaggtttttgtggaaagcccagtggggagggaggccctggcttctcgttagcctatggccaccccgactggccggcagcctcaggccaggctgtgtttgccccatgcagccacagcctggggttgccgggccttgctcggggctgtttgcctctgcagcggcagcctcgggtggcagggccttgctccctcagggactcggggtgccttggcctcagggtgtgggactgaacatgtggaatggctgtggagttccacggctcaggcacagggccctgaccgcatgtgcccagcatcactgacctcaccagaagtgggatgcagggagcctggggcttggcactccccaccggccgcagccaacatcctcgagaggaagccgtgggcctcacctggcgatcttgtccgtgcaggacatggtgatcagctgctcccccagcaggacgccgtcccaggtctgcactgcgctggggccacgcacggggaccgtcccttccccggactcgatcttggtgcgcaggtgcccgcggaacttcctgacgaggtgtttgctgctgtgcactaggagataaaagggcggggaggggtgagaagagggaagccgccttggttttgggaggtgggagaagaggaaggactgcaacagaggtcaaagggcccctcaccatggctgggcgtttggcacgaggaaggggcttcagaaataagcgccatgtggggttgggctccagagccacaccatcccgcctgggccgggccaacttcccagtcaagggtcagggagtaaaaaccccaggcttcatgggccagactctcttttcaccaacacccgcctctgttgcgtgagtgcagccacggcctggaccgtgctcaggccagtaaggggccaccgcgtcctcaatgcttcatttacagatgcagacttgaacacgcagttggacgtgtcgttttcagaggttgtgaaacaccgtttttctcacttttcagccattaaaaatgtaaatatttatgcttagctggagggctgtgcagaaataggtggtgagtgggactcagctcttaccctggtccaggtgtcagtcccggctccatggtaagctggctgtgtaaccttgggaaagtgtctcaaagtcactgtgacccggttacttcctctaatgacgagggtaatagcagtgcttgccgcccaggctgtgaggagtcggtgaggtggctcctgtgaaggtgctggggttgcctgggcacctccactcttgctgtgtcccctaattaccaagggtcgccatgggcaggagctccgccaggcccagaagtgacggagcgtctggtgggtctctgtgggtccctcaggtgttctgtgttctcctttctagggtccccttgacaccccccgcccccctataccacattccccacaattacttggagaactagcatgagcaagaggaagcttaaatttatgtttctctttctttgaaaaaattttgtatgtttttgttttgttttgtttgagatggagtctcgctctcttacccaggctggagtgcagtggcgcaatctcagctcactgcaacctccgcctcccaggttcaagagattctcctgcctcagcctcctgagtagctgggattacaagtgctcatcaccacacccagctaatttttgtattttcagtagagatggggtttcgccatgttggctaggctggtctcgaactcctgacctcaggtgatccgcccacctccgcctcccaaagtgctgggattacaggcctgagccactgcacccagccaaaatcttgtacattaaatctggattatattgtaatatggaaatggcccactgctttgcatttgaattatatataaaatagtatagtgattatatcatttacatacatatgataacgtaagtgaatattaaatgctttctttagaaagttcctattgaagttttagaagctgtggaaatgcaatttccccctcactttcccccactgacagtgcttgatatggctgggatccgtgtccccactgaaatccatgttgacatgtaatccccagtgtcggaggtggaatttggtgggagatgactggatcatggggcggatttctcatgcccagtttactaccgtccccttggtgctgtcctcgtggcagtgaattgttctcatgagacctggtcatttaaaagtgtgtggcatcagccgggcacggtggctcacgcctgtaatcccagcactttgggaggcagaggcgggcggatcacgaggtcaggagattgagatcatcttggctaacacagtgaaaccccatctctactaaaaatacaaaaaaaaaaaattagccgggcgtggtggcgggcgcctgtagtcccagctactcgggaggctgaggcaggagaatggcctgaacccaggaggtggagcttgcagtgagccgagattgtgccactgtactccagcctgggcgacagagcaagactacgtctcaaaaaaaaaaaaaaaaaaaagagtgtgtggcatctcccccgccctctcactcctgctctggccatgtcactttctgccatgattgtgagcttcctgaggcctccccagaagccaagcagatgccagtatcatgcttcctgtatagcctgtggaacctcaagccaattaaacctcttttctttataaattacccagtctcaggtgtttctctagagcaatgtgagaatggactaatacagtgctgaatggtaactaatgcttgggtttatataggaactttctcctaaagatcccaagtaatttccagtgtattttctaattgtctgtaagagctgacattctttcactatacattcatagtacttaaggctatgccttgggaagaaagatcgctgcattctttggagaaaaaaccctttgagaggcttcagatggcttttcactttgtaaccaactagatacttgatgagataaaatttggaccggtctttgagtcattcacggaaaaaagagcgaatgagaggtattgagcctgggcaggcacagcaaataatgcccagctcttccccagataaagcacaaatctcttctttgcagctttaatggtgatggtgatgataatggtggtggtgatggtgataatggaggtaatggtggtggtgatggtgttaatggaggtgatggtgatggtgaagataatggtgatgatggtggcggtggagacggtgatatgatggtgaagataatgatggcaatggtgatgatggtgatggtaatgatggtggtgatgatgatggtgatggtgatgatgatggtaatggtggtggtgatgatggtgatggtgataatgatggtaatggtggtggcgatgatggtgatggtgatgatggtggtgataatggtgatggtggtggtgatggatgatggtgatggtggtgatgatggtgatgatgatggtaatggtgatggtgatgatggtggtgatgatggtaatggtgatggtggtggtggtgatgatggtgatggtgatgatggtggtaatggtgatggtggtggtggtgatgatggtgatgatggtgaagataatgatggcaatggtgatgatggtgatggtaatgatggtggtgatgatggtggtgatgatgatgatggtaatggtggtgatgatggtgatggtgatgatggtggtgataatggtggtggtggtgatgatggtggtgatgatggtaatggtgatggtggtggtgatggtggtgatggtggtaatggtgatggtggtggtgatggatgatggtgattgtggtgatgatggtgatgatgatggtgatggtggtggtgatgatggtgattgtggtggtgatgatggtcgtgatggtgatgatggtggtgatgataaattgaacataaaatagttcgtatgactcaaaacacttggtttaaactgactttttgcaggtggggtctttatgaacatcaactttctgcggaaggcaacattgaaagcatggaggagccatcacacctaacagtttccacaacattaccacaatattagggactttactctttcatttgggggatattttctcagggaatgtggttgttgctgtccctccatttctgttatagtattcttatattctcccaacgttttaactattgtggtctttttcgagatcttgaaagttgcctattatattgtaaggcctttctaaatttttaccagttgctactgcacaactaactttccatgaagtacacttgatagcctgttaatgccatgacaacagggaggccctgctttaattaacagctagttcctaggagttaacccaaagctttcaggttagactaattttgcctgaggagccaggtgcatgagttgctcctgagtgtttatttttggaggtgttcagtcttgggatgccttctccacaggctccctgatgagtttgagcagccccagggtggcttgaatgtcggtgatcctgcagagcccatttcctctggctctttcctggctaattgtgagaggtgggaaggagttgaagatgccacttaaggctgacaaaatgccagtccaaccagcaattgcagtgagctggccataaatgatctgtagtggatttagagtgtgcctgagacagtgaaagtgtagaacctcaaactcctgactgctgtgtctacatagatgctcacaaatccatccaaacattctggtccaattctgacagtccaagtcatcagactcttcattacagtgcttattaacctatataaaaccctagataaaacccttgtcttttgaggtcaatatcaaggtaaataaggatagtttttagatgctcatttcttttttttttttaattttattattattattatactttaagttttagggtacatgtgcacaacgtgcaggtttgttacatatgtatacatgtgccatgttggtgtgctgcacccagtaactcatcatttagcattaggtatatctcctaatgctatccctcccccctcaccccaccccaccacagtccccagtgtgtgatgttccccttcctgtgtccatgtgttctcattgttcaattcccatctatgagtgagaacatgcggtgtttggttttttgtccttgcgatagtttgctgagaatgatggtttccagtttcatccatgtccctacaaaggacatgaactcatcttttttttatggctgcatagtattccatggtgtatatgtgccacattttcttaatccagtctatcattgttggacatttaggttggttccaagtctttgctattgtgaacagtgccacaataaacatgtgtgcatatgtctttatagcagcatgatttataatcccttgggtatatacccagtaatgggattgctgggtcaaatggtatttccagttctagatccctgaggaatgaccacactgacttccacaatggttgaactagtttacagtcccaccaacagtgtaaaagtgttcctatttctccacatcctctccagcacctgttgtttcctgacattttactgattgccattctaactggtgtgagatggtatctcattgtggctttgatttgcatttctctgatggccagtgatgatgagcattttttcatgtgtcttttggctgcataaatgtctttttttgagaagtgtttgttcatatccttcgcccactttttgaatggggttgtttttttcttgtaaatttgtttgagttcattgtagattctggatattagccctttgtcagatgagtaggttgcaaaaaattttctcccattttgtagtttgcctgttcactctgatgttagtttcttttgctgtgcagaagctctttagtttaattagatcccatttgtcaatcttggcttttgttgccattgcttttggtgttttagacatgaagtccttgcccatgccaatgtcctgaatggtattgcctagattttcttctagggtttttatggttttaggtctaacatgtaagtctttaatccatcttgaattaatttttgtataaagtgtaaggaagggatccagtttcagctttctacatatggctagccagttttcccagcaccatttattaaatagggaatcctttccccattgcttgtttttgtcaggtttgtcaaagatcagatggttgtagatatgcggcattatttctgagggctctgttctgttccattggtctatatctctgttttggtaccagtaccatgctgttttggttactgtagccttgtagtatagtttgaagtcaggtagcatgatgcctccagctttgttcttttggcttaggattgacttggtgatgtgggctcttttttggttccatatgaactttaaagtagttttttccaattctgtgaagaaagtcattggtagcttgatggggatggtattgagtctataaattaccttgggcaatatggcctttttcacgatattgattcttcctgcccatgagcatgtattgttcttcgatttgtttgtgtcctcttttatttcattgagctgtggtttgtagttctccttgaagaggtccttcacatcccttgtaagttggattcctaggtattttattctctttgaagcaattgtgaatgggagttcactcatgatttggctctctgtttgtctgttattggtgtataagaatgcttgtgatttttgtacattgattttgtatcctgagactttgctgaagttgcttatcagcttgagggaattttgggctgagacgatggggttttctagatatacagtcatgtcatctgcaaacagggacaatttgacttcctctttttctaattgaataacctttatttccttctcctgcctgattgccctggccagaacttccaacactatgttgaataggagtggtgagagagggcatccctctcactgtcttgtgccagttttcaaagggaatgcttccagtttttgcccattcagtatgatattggctgtgggtttgtcatagatagctcttattattttcagatacgtcccatcaatacctaatttattgagagtttttaccatgaagggttgttgaattttgtcaaaggccttttctgcatctattgagataatcatgtggtttttgtctttggctctgtttatatgctggattacgtttattgattttcgtatgttgaaccagccttgcatcccagggatgaagcccacttgatcatggtggatgagctttttgatgtgctgctggattcgttttgcccgtattttattgagaatttttgcatcaatgctcatcaaggatattggtctaaaattctcttttttggttgtgtctctgccaggctttggtttcaggatgatgctggcctcgtaaaatgcgttagggaggattccctctttttctattgattggaatagtttcagaaggaatggtaccagctcctctttgtacctctggtagaattcggctgtgaaccccatctggtcctggactttttttggttggtaagctgttgatcattgcctcaatttcagagcctgttattggtatattcagagattcagcttcttccttgtttagtcttgggaggatgtatgtgtcgaggaatttatccatttcttctagattttctagtttatttgcatagaggtgtttgtagtattctctgatggtagtttgtatttctgtgggatcggtggtgatatcccctttatcattttttattgcatctctttgattcttctctcttttcttctttattagtcttgctagtggtctatcacattttgttgatcttttcaaaaaaacagctcctggattcattaattttttgaagggttttttgtgtctctatttccttcagttctgctctgattttagttatttcttgccttctgctagcttttgaatgtgtttgctcttgcttttctagttcttttaattgtgatgttagggtgtcaattttggatctttcctgctttctcttgtgggcatttagtgctataaatttccctctacacactgcttcgaatgtgtcccagagattctggtatgttgtgtctttgttcttattggtttcaaagaacatctttatttctgccttcatttcattatgtacccagtagtcattcaggagcaggttgttcagtttccacgtagttgagtggttttgagtgagtttctttctagtttgattgcactgtggtctgagagacagtttgttataatttcggttcttttacatttgctgaggagagctttacttccaattatgtggtcagttttggagtaggtgtggtgtggtgctgaaaaaaatgtatattctgttgatttggggtggagagttctgtagatgtctattaggtccacttggtgcagagctgagtttaattcctgggtatccttgttaactttctgtcttgttgatctgtctaattttgacagtggggtgttaaagtctcccattattattgtgtgggagtctaagtgtctttgtaggtctctaaggacttgctttatgaatctgggtgctcctgtattgggtgcatatatatttaggatagttagctcttcttgttgaattgatccctttaccattatgtaatggccttctttgtctcttttgatcttcgttggtttaaaggctgttttattagagactaggattgcaacccctgcctttttttgttttccatttgcttggtagatcttcctccatccctttgagcctatgtgtgtctctgcagctgagatgggtttcctgaatacagcacactgatgggtcttgactctttttccaatttgccagtctgtgccttttaattggagcatttagcccatttacatttaaggttagtattgttatgtgtgaatttgatcctgtcattatgatgttagctggttattttgctcattagttgatgcagtttcttcctagccttgatggtgtttacaatttggcatgtttttgcagtggctggtaccggttgttcctttccatgtttagtgcttccttcaggagttcttgtagggcaggcctggtggtgacaaaatctctcagcatttgcttgtctgtaaagtattttatttctccttcacttatgaagcttagtttggctggatatgaaattctgggttaaaattcttttctttaagaatgtcgaatgttggtccccactctcttctggcttgtagagtttctgccgagagatcagctgttagtctgatggggtccctttgtgggtaacccgacctttctctctggctgcccttaacattttttccttcatttcaactttggtgaatctgacaattatgtgtcttggagctgctcttctcgaggagtatctttgtggcgttctctgtatttcctgaatatgaatgttggcctgctttgctagattggggaagttctcctggataatatcctgcagagtgttttccaacttggttccattctccccatcactttcaggtacaccaatcagacgtagatttggtctttccacatagtcccatatttcttggaggctttcttcatttctttttattcttttttctctaaacttctcttcttgattcatttcattcatttgatcttccatcactgataccctttcttccagttgatcgcattggctactgaggcttctgcatttgtcatgtagctctcgtgccttgattttcagctccatcaggtcctttaaggacttctctgcattggttattcagttatccattcatctaattttttttcaaaacttttaacttctttgccattggttcgaatttcctcctgtagctcagagtagtttgatcgtctgaagccttcttctctgaactcatcaaagtcattctccatccagctttgttccattgctggtgaggcactccattcctttggaggaggagaggtgctctgatttttagagtttccagtttttctgctctgttttcttccccatctttgtacttttatctacctttggtctttgatgatggtgatgtacagatgggtttttggtgtggatgtcctttctgtttgttagttttccttctaacagtcaggaccctcagctgcaggtctgttggagtttgttagaggtccactccagaccctgtttgcctgggtatctgcagcggtggctgtagaacagcagatattggtgaaccgcagatgcttctgcctgatcgttcctctggaagttttgtcttagaggagtacccggctgtgtgaggtgtcagtctgcctctattgggggggtgcctcccagttaggctactcgggggtcaggtggaggcagtccacccgatctcagctctcaagctgcatgatgggagaaccactactctcttcaaagctgtcagagagggacatttaagtctgcagaggttactgctgtctttttgtttgtctgttccctgcccccagaggtggagcctatagaggcaggcaggcctccttaagctgtggtgggctccacccagtttgagcttccaggctgctttgtttatctaatcaaacaactaactcggcaatggcgggcgcccctcccccagcctcactgccgccttgcagtttgatctggactgctgtgctagcaatcagcgagactccgtgggtgtaggaccctccgagccaggtgtggaatataatctcctggtatgccattttttaagcctgttggaaaagtgcagaattagggtgggagtgacccgattttccaggtgctgtctgtcacccctttctttgactaggaaagggaattccatgaccccttgcgcttcccgggtgaggcgatgcctcgccctgtttcagctcaagcacggtgcactgcacccagtgtcctgcacctactgtctggcactccccagtgagatgaacccggtacctcagttggaaatgcagaaatcacctgtcttctgcgtcgctcacgctgggagctgtagaccggagctgttcctattcggccatcttggctcctccccctagatcctcatttctaaatgaggatgtgctttagaaaattgttcaagtgaatcttttatttttaggggagaatcaaaaggaattggagacaaacaacaagaggtttgtcccctggggagctaaagatttatctaaaaagcgatgcatggttgctaccatcacaagggggagagagagcaccaaaaatgaaacaaaccacaggcatgagaaaagaagaaaatatttttaaacaccaaataaattttagattttcaaactgtcttcaaaaggcatatcccagaaagtctgcctgtgaagcaacctagtattcattgtaataataatatccacagaagttaccatgtgtccacgtgggtgcactttgccatatttgattgatgatgatgatgatagtgatgatgctggattataaggccattaaaattcattatcctgcaatgcacggatattatcatattttgcatatttctgtaactcaatgggaaaatctgaagcaggaatttaaggaactgtattttatattccctgacttcctatgggattttcgttaaatctcttcaactacctttctagtcgttgaatggaattggcttagaacaaacgtactaggctcatagcatgtacttgtaggtaaatatatgacatcatctatttttcttggcattttctggacacagactggagaatttaagctgctaagttctcagaaaatggctgtaagaactgagtttaccaggttatttaaaaaccatgccaagaaagaagaatttgcaggcaggtcgttggtgggttgggaggagaggagctgctcaaccacagtgaagtacagagatcctcatcttctgctccatctgggctctttcagaactgcctgagttctatcccaggcctcccagggccactaaaggacccgtcgccctcgtgagtctgtgctgacagcagtcattggaaccctgactctaacatagacacacacagcatgttctcctggtgtgggaataaatgtctttcaggcatttgtccctgccttaactgacctggcccctctaggtccaggggaaagccacagatgtggcagttttgagtcgcttgagatgaatggagtagccctgggtcacatgacattgaagactgagtctgcggtctctgtcgcgaaagcagctttcccctcggtcgcatgcgatgcaccacgaacacttttcattcctgcctgtgatgccacagagcggggagtccagccataagctctgcctggcctctgcagacaggcaggctaccaggccgtccatgcctccaagccctttctacaaagccagcaaggaaacaaatgcccagtctgaagagatgatttaaggagttcaaacctgctggctcaaaacccgacctgtgctcagaaaactagagtcttggatgcccctctgccccgaatgcatcagaatctcggccagagtgcatggggtgagctgcattggtaaacactggcctgggaccctgatagataagccagagctggaaacaacaaacttgaatgccttccgaagctagcaggtgacacagctcccaaaatacctgagaccaattggcattgataccatgtctgaggcctccaggaatggggaatttatgatctagacaaatgtttttgaggggaaaaataaaatagggccatctagaatttctcgagccacatgcatcccaggaaagtggggctggatggcaaccccagggcccttgtgttgtgtctaagacttggagcccctgagcctgggcctcgggtggctggggcttggggaattcctggtcctgctgagctgttggagcaggttgctgccgggagccagctgctcagcagccaccagagagtcagaagtgtgctcctagaaaccccaagtcagactcacttctctcctgggcctttacatgatacttactatcatgattatttaaacctatctacagaaattttttcttatgccctactctgtgttccttcatttttaaaagaagggggaacaatcttgggcaccaaacttctttttgacttaatcacgtcatagttatattgatagatctgatgcatcagatacgtgtcgtgtgcttgtgtgtgcacatatgcttatgtatgtgtttgtgtgtgcacatgtgcttatgtatgcgtgttcatgtgtgcacttgtgcttgtttgtatgtgcacgtgattacatgtgtgcacatatgtgcttctgtgtacatgtgtttatgtgtgtgcgtgtacatgtacttatgtatgtttttgtgcacatgtgcttacgtgtgtgtgtgtgtgtgtgtgtgggtatatatgtgtgagaaagggagaagtctggcacagttgagagaggggctagcaggcgtggccactgtggagatgcacaatcgctcgatgcaggccaaaggggagactgaggaagggatgagctcaagtgaccaggaccaagcactgtgctggtgagaggagacatggcaggtccagaaggggccagaggcagagagcactcgagaagactgaaacctctgtgcagagtctccttcggtttcagatgagctcctctggcccccagcaaaggtctcggtggaggggactgagctctctgcactctgcggcctctgcatttgtgagaataacatcatggccctcagggcttcctttgttccctgggcttcttttgggaatgtggtcctctgaattggaggggcagtgccgctgggtttctgcagggttaatccataggagggaggcagtgccagctgcagacctctgggaacagtgcaaactggatgtgtccagctcccgccgccagcctttcctttgggggcttgtcaccatcgacactgcccttggctagccctggaggagcccctcacagcaaaagcctggccactggcatccccttatccatggtccaaccctctttaaagggtaacaaagacatacaccgcctgagttagcaacgtggagacccctgcctcttattgtaaaggagcttaaagcatctctctgcaggggaaatggcaggagttgttcctgaaggtctctgccttcctcaggcagttcaaaggatgcagagccagctctctgaagggtccttccaagcagagaacagcaggaacttgagttctcctgcctttactgagtgactttggcagatgagtccctgttataggagagttcaccaagtaccttccttctccacgctctccagatgggagagcggaggagtggcaccagcccaatgcagaggcacagcacaggcaggagtttctcaattttgcctggcatatctgctgcaaaaatgtgagaaaaatgctttattttttctcctaccagcacctgccacttcttaaaagcaccatgaaataaaagacatctgtgtctggaagtgaacctcagggtgcctcggagaacgtatttgtttttctaaagcacagacactgcagtagaaagtgagggctggctggagaggctgcagttggtgatcgatgtacagagatgtgggaggcccagtggactagaactgtcccctggggagaccacggggtctcaggcgtggacaaggctcctgctgttctcactcagccctctcccaactcccaccagggacacattagccaaggaagaggctggataactcagcgccaaccccaagcatttggcgggacttttcctctcaattctgagggttcctagctgggtctttacgatgccaaccctttaaagaagaatggaaagataattcccagtagctgtccaatggaccagatttcacaaaattcccaatagctgtgcagtgtaccagatttcacagttttatagggtgagctggtatcatgtagctctggcttgctgaatatgtccagtgaaaatgaagccactcctggtggtttttctgtctctctcttcctgagttggcctggtagtggggggtgccctgtgtgatcttgtggggccacactgggctcccttccctctggggagggctgtgtccacttctcaggtactcaggctgcccctgcctctctctccctactgcaggaagttcctttaaaagtccctgaggttgaacaggcttccttttcttcattcccagtttgacgggattctctcatttaatttccaaagggtgtggaaatactacccaaattcaaattcacttacagagaaccctatccagccatgccagaggatccacttacagagaaccatatccagccatcccaaagggaaagcagtggggctggagggaagtccgcaaaaaggaggaggaatgtttctgggccagcatcccatgtgaggactgcagaatcaggctaagctcgtgtgagattaaagacaccattatccccacaccttcttgtctttggtggaggctgcatgacaagcctgacaacagcagggcataacaaaaatgcttaattttccttaccttggtaattaaaccaccatgtagccttccaccggaggagagtcaggccaaagccaagccttaatagctgtgtgctgtccatgtatgtctgccagagatttcctccctcatcaggactggactcctcatcatacacatatcacatacaccacacacaccacacacatagcacacacaccgcacacacaccgcacacatagcacacacaccacatacaccactgcattgcctgcattgaaagatctgcctggagctgcttctggaaagggtgtgggagcatgtgaatgtgtgtgcggtgtatgtgatatgcacgtggtgtatgtcgtatacatgtgtgttgtatatgctgtgtgtggtgtgtgtggtctgtgtgtggtgtgtgtggtatgcgtggtatgcatgtgcttgtggcatgtgtgtggtatatgtggtgtgtgtttgcagtgtatgtggtatgcatgtgtggcatatatggcatgcgtgtagtgtacatgctatgcatgtgtatgtggtatgtgtgctgtgtgtgatgtgtggtatatgtggtatgtgtgtgtggtgtatgtgctatgtgtgtggtgtgtggtatgcatgtggtatatggtatgtgtttgtggtatatgatgtgtgtggtgtatgtggtctgtgtgtggtatatgtggtatgcatgtggtgcttgtgacgtgtgtggtatatgtggtgtgtgcagtgtatgtggtatgtgtgtagtgtatgtgacatgagtgtagtgtatgtggtatgtggtgtgtgtggtatatatggtatgtgtgtggtgtatgtggtttgtgtgtagtgatatgcatgtgctatatgtggtatgtgtgtggtatatgtggtatgcgtgtagtgtatgtggtgtgtgtgttgtatgtgtgtggtgtgtgtggtatacatgtgtggtatatgtggtgtgtgtgtggtgtatgtggtatatacatatatgtgtgtgacatatgcagatagcactaagcaataggatttcatcattaaaatgaaagagaggagtttccctgaagcaccttttcttttatcatggagttgctgatgtcaagggtggcttcaagggagagccccaccctgccccacgccctgccctccgaccctggcaatcgcagcatcactgccctttgctgatggagaggacagaggggcaggggctgcgtggatgcgttctgtctcacctccatcgataaatgctcacagggcgggtttccagtggaactttgtagttcacctggggaaacccctttgcagggaatcactcatccctggcttggttgcaaaagctgagcttttttcctccccaacgctgtaagcaaaggcaagcagagccagtgagaatttgctcccagcctgcgtaactctcactggccttcccttcattccattttcccagcccaggacacagggattgtctgagttattaaagcagagaactatggcaattaggtagctaattttaggcctcagactactcttctgccaattacttgagcatttcagactaagattttggaggcatggttatcccactaattgtagacgcaatccccttccagtacccaagggccccacacaccgcgcccctgccctgggctgtgaaagcccaggacagagtcccagatagagggagctgggggctgttggcctacagaaggtaaaagcatggtctcttacggtctgtggtgatctcgtagggagagtggagtcttgcgtctccacagggggaggtgctcacgtagagatggaagaggatgttctctcgcagccggtagccaccttcttttaaccgcacgaatatcgatcgctctgagtcctcgcgccgcttgctagggtcacaaagaggtttggggtcatttatcacaaaccaaaccagaaatgttccaaccaggtgaacgcttgagtcctgttttgtagagttgttccccaagttttcctttatatttttccttttttttttttttttttttgagacggagtcttgttctgtcacccaggctggagtgcaatggtgccatatttgctcactgcaacctccacccactgagttcaagcaattcttctgccttgagtatcaagtgttactcagcctcccgagtagctgggattacaggcatgcgccaccacgcctagttcatttttgtatttttagtagatacagggtttcaccatgttggccaggtttgtcttgaactcccagcctcaggtgatccacccacctcagtctcccgaagtgctgggattacaggtgtgagccgctgcgcctggcccccaagtttctccttcttcacaccccatagtgtgtctttcccctgtaccaacacttctagaacaggcagcaatgaaactacgtgaatgcgaacatgactggcagaaaccctgctttcttacccccgccttgacatttacctgtcagggttattattattcttttctaaagataaggtctttctctgttgctgctcatgctggagtgcagtagcgtgatcacggctcactgtagcctcagcttcctgggctcaagtgatcctcctgcctcagcctcccgagtagctgggactacaggtgcacaccaccatgcgaggctaatttatttacttttttttagagacagggtcttgctttgttgccccgagtggtctggaacttctgagctcaagcgatccacttgccccaggctccgaaagtgctgggattacaggtgcgagcgaccatgatctttttttttttttttttttttttttttgtgacggagtcttgctttgtcccaggctgcagtgcagtagtgcaatcttggctcactgcaacctctgcctcctgggttcaaacgattctcctgcctcagcctcctgagtagttgggattacaggtgcatgccaccatacccagctaatttttgtatttttagtagagatggttttgccatgttggccaggctggttttgaactcctgacttcaggtgatccacccgccttggccccccaaagagctgggattacaggcgagagccaccacactgggccccaccatgatcttttaccaagccattttttcccactgctgttcgcccacatctatctgtctacacacctgtgattctgtggatttgccagtgctgctcatggccatacctcacagtggactgtgggtttgacgtagcctgagtgggcagcttgtgtgtgattaaaaggaggaaaagagctgtaggaaggcctgggctccgtcaccagcacaggtgggagtggagaaccgtggcgaaacggctttccttctgcatccagccatgacccaggtggggcgggagagttcccagcctctctgatggtgaatgatttgcctgttgcaaaactcccaccagctgtgaagctggagctgagcagccccacctctgccccatcggagtgggcgctgaacgaacatgcctgcatttccttcttcggtgtttaccctctgtctcccggtgtttactcccccctccctcccggtgtttactcccccctgcctcccggtgtttactcccctctgcctcccggtgtttactcccctctgtctcccggtgtttactcccccctccctcccggtgtttactcccctctgcctcccggtgtttactcccctctgcctcccggtgtttactcccctctgcatcccggtgtttactcccctctgcctcccggtgtttactcccctctgcctcccggtgtttactcccctctgcctcccggtgtttactcccccctccctcccggtgttcactcccctctccctcccggtgtttactcccccctcccttactcccctctgcctcccggtgtttactcccctctgcctcccggtgtttactcccccctgcctcccggtgcttactcccctctgcctcccggtgtttactcccctctgcctcccggtgtttactcccctctgcctcccggtgtttactcccctctgcctcccggtgtttactcccccctccctcccggtgtttactcccctctgcctcccggtgtttactcccctctgcctcccggtgtttactcccctctgcctcccggtgtttactcccctctgcctcccggtgtttactccccctctccctcccggtgtttactcccctctccctcccggtgtttactcccctctgcctcccggtgtttactcccctctgcctcccggtgtttactcccctctccctcccggtgtttactcccctctccctcccggtgtttactcccctctgcctcccggtgtttactcccctctgcctcccggtgtttactccccctctccctcccggtgtttactcccctctccctcccggtgtttactcccctctgcctcccggtgtttactcccctctccctcccggtgtttactcccctcttcctcccggtgcttactcccctctgcctcccggtgtttactcccctctgcttcccggtgtttactccctgtgtcctggtgtttactcccctgcttcctggccatctaccttctgccggtcttgctgttttcacacgttctgccccatgggtgatggattgtgttctgtggggccctgagatcacacaggcaacagaacagacattttctccacaggaagtccttgcggcatccagcagtcttcctgcctctgtgcctgcactctgcccacagccaccatcccccactgccccggctgcctcccccaggacccttggcaaatgtatcccaagcctgggccccggcacagggcctgtcagccacgtggctgccctggaccccccctcccctgtgctggttccccatgcagggcaggcgtcgggtgcacctgtctgtggacccccccagctggtggcacagcaccaagcatgtaaccagctcctggtaaatattggtccagttgccttctctgacacaaacaagagtgagggatcttggtgatagtcccagttgagcaggtggacatttaggagaaatccttccctacattctgagatatttctgttcccccatatccaactcctgctgcaccccgcaggcctcagggaactgagggatgggttcaacctgtggctccctgctcagaggctcagataagaatgagctgagtgtgggctgagcacagtggctcatgcctgtaatctcagcactttgggaggccgagatagggtgaccacttgaggttaggagtttgacaacgtgatgaaaccccgtctctactaaaaatacaaaaattagccaggcgtggtggtgaacgcctgtagacccagctactcaggaggttgaggtgggagaattgcttcaacccgggaggcagaggttgcagtgggccaagataatgccattgcactccagcctgggcgacagagcaagactccatctcaaaaaaaaagaatgagctgagtgtgttaaggtgttgttttcagcagcgtctgcttagggctacacgtgggcctttctccttttgtgtggcttttgcacagctaatgggcatggagatgacccttgccaaagccccccaaggtcccattactcgtagatttgaggaacgcagatggcttcaagggatgtgaaagagtagacagcagacacaggagggagcgtttcaggagaggagcccacagtgagcccttgggactgaatggcccagcctgggggtgtgtcgcggaggccacgtgctgcaaaccacctgggttttgctcctctctaaagtgtctcagggacaggaggctgccccatgacagccaccaatgcctgatggccagagcaggccagggaaccctgggaatcccaatactggggcacagttctcaaggcctcagcggcctcttcacatgtacttggcacaggaggcaagaagacagcgcgtctccaagccaccccttgggcactgcactcacgttctctgagggcaacggcggaaaagggggcagtgcaggaatgtggggggcatggggaaccgaggccaggagagggtggccttgcccggaaggacgagggctgcaaaggtgttttctggagggaaacgtggagtaaggaggaagcctggaattttagcatcttcccagcgcacacggcggctttattggtgtgccagggatgtctctagtctgaataaaaagggatgctttctggctcaccctgtgccaggatagagggaagcgtgttctgagccaggcatggggccccatctgctccctggcagcccccagccgcggcgtccgccttccctggagcccgtccccagccgctcacctcaggtgcagctccagctgcgtgtagaggaagtgcaggaacgcccgccgggccacgacctccgcgtggcagtcattcaccaccagcccctggtcactgaggtgctcgccgctgatgcacttggtccccgaggacagggccacgacctgcgcctgccgagcatccaggcctggggacacagatagcatcagagcagcgtggcccacggcccccgtctccctcctcctcggtcttttcagggtctcacaacagcggtttccctgggttaggaaaccttggaaacactgcgttttgagagctgggaagcgaggcttctgtgtgctccaggctgtcacgggtgaccgcccgcctgagggattcccatctacttcatggtggcctgagacagcgctcagagtgcctctgctatccttaaggttgctgaaatgctccttaggcaccataggagcagagttttgaggtcaaacttactaccagggcagttttctccacctgagtcccaggtcccctgtgagtgggagcagtgctagctgcggcctgggcttcctgcccaacctctaaccacctttgtgctttctcctgtcctccaacgggatcagggcaggacaggagctgatgaacccttcaccctaacacagaaacacagatgaacctgtcatactaacacagaaaggaggctggatgtgtcattttaaccatagtcaaaggaaccccatccacaaaaatgatactctcttcagggactgaaaacaaacaacaaagaaacctcaaaaacaacccccaacgtaatgtccttaaagtataatattcatcactttgtttaaggaggagaagctggaagacacaagccaatgtttgctgtgctctaacaggtctgtgtggatgtgtattttctctgcacttagatggtgaattccttgaggacacgagtcagaatttccaccaaatactccaagcaagggctccctagggagtccgtgtcattagacgggtcagtgttgccgatccaataacaaatccatcatccaggcccttcggctggaggtggcaggaatgttgcgggtgcccaggagccttgggatgtgacagccactggctgggcccggatcgcaggccaagggagggcagcacggagacgcgttagccgctgaccgcggccacgtccacagagttacctgtaaatacacgtccggaccatttcttggaagaggtgacacacaaattaatgtcacgccagaagcaggcctccctcccatcttaaataaaatcgactaattaatgtcacgccagaagcaggcttccctcccatcttaaataaaaacagtgctggctggtcatgagcgcttctcgcttctcacacacttgttcctctgatgtgactttttctcccctgagaacttagttcttgagccctgagggcatctgccctctctgggcctcaccgtgggatctttcttcgtgagataaaagggtggtgtcagcagctaccagtgacagccagggagaattcggggccgggagggaccgagcactggggaagtaacctgcagaggcccagcagcatccttgcccccatggctctgcagctggggtctgtctgtccagcctccttccttccaggcaaagcggtctagcacagcccccgcctcctgcccatgtccactgctctctccgctcatcccagcttctcccagcagcccccgtttctgtgcccgaagagaactccatggtcctggtcctgttgtctacccactgccccctccctggtgggacgggactgctcctgagctcaggaagtgaccagacttccccacgccgctttaatcagaacaggacacgaccagccgccctgaggttcctcccccaggaaagctcgtgagcagctgccgggttccaggtccaggcctcctcctctctcagccatcctgggtgcgggggctgccccctagcgggggtcccagaagttgacgagcagatgggaccaggatctaaggctacagggagctggggtgggcagctgctactgactctgccaggggtgggagccaccatctcactcaggccgtcagtgacatgtggactgttgagaaatggttcacaaggatgacatcgtgatgcagaaaccacccctcaggttccagcttcgttaaagctggtatttagagaaatgggaaacacattgataacgattcctaaccagtttcagtgttcacgaccggtgcgcatgcagtctctggtggaaacggacagctcttcaggaataggtgctgtggcctgtgaggccccggcctgctccttctctttggattccgtggaaattggagctgtagaaaaaagcaactgctttccctttacccctcattgattcccagctccgtttggctccagactctgccacactcagcacaattacgtggcccaagaagtgtttgcatattcagttttcatgattctcacccccaccgccagcaccacgttcccaacacaggagacgcgaagcctggaccgagggagatgacgcggtcagaaacggctgcagcatgagacgtcgtatgagaaatgtcgcggaagtgctgtacatggaatgtcaccagcatgacagtgagggaggaaaagggagagacggactcacacccagggagcttctgcacaggtggcaggaggaggcgtcctaggcagagtgggcatggtggtcagaggcacggataggaaagggcacaggcatattctgcataatctgcgtattctacgggccgttggagcccgtaggagatgtgtgtgggaaagtggcgaagcttcaaaggtgggtggaaatcagtcacagacgccttgagtaccaccctgaagatctagctcttcaccaatagacaatgggagctgtgaaagggttttccggaaggacagcagtactgttgcccatgagtgagtgctgggttgcacaggaggagagaaggggccaggacactgggtgggaggctggggctggacatggtgcatgaggacttaggaagcaccctcaggagtggattggtgggagggacccagagagcacagcaaggaccgaatccacaggatttgggaaatttacacagaagatgagggagaggaagaagccagaaaatgtgcttgagtaccacacattacaaatgagaaataggaagatttttatttatttacttattttttgttttttctttttcttttttattatactttaagttttagggtgcacatgtgcacaacgtgcaggttagttacatatgtatacatgtgccatgttggtgtgctgcacctgttaacttgtcatttaacattaggtatatctcctaatgctattcctcccccctccccccaccccacaacaggccccggtgtgtgatgttccccttcctgtgtgcatgtgttctcattcttcaattcccacctatgagtgaggacatgcggtgtttggttttttgtccttgtgatagtttgctgagaatgatggtttctagcttcatccatgtccctacaaaggacatgaactcatccttttttatggctgcatagtattccatggtgtatatgtgccacattttctgaaaccagtctatcactgatggacattttggttggttccaagtctttgctattgtgaatagtgccacaataaacatatgtgtgcatgtgtctttatagcagcatgatttataatcccttgggtatatacccagtaatgggatggctgggtcaaatggtatttctagttctagatccctgaggaatcaccatactgacttccacaatggttgaactagtttacagtcccaccaacagggtaaaagtgttcctatttctccacatcctctccagcacctgttgtttcctgactttttaatgattgccattctaactggtgtgagatggtatctcattgtggttttgatttgcatttttctgatggccagtgatgatgagcattttttcatgtgtcttttggctgcataaatgtcttcttttgagaagtgtctgttcatatccttcacccactttttcatggggttgtttgatttttcttgtaaatttgtttgagttcattgtagattctggatattagccctttgtcagatgagtagattgcaaacattttctcccattctgtaggttgcctgttcactctgatggtagtttcttttgctgtgcagaagctctttagtttagttagatcccatttgtcaattttgtcttttgttgccattgctgttggtgttttggacatgaagtccttgcccatgcctatgtcctgaatggtgatgcccaggttttcttctagggtttttatggttttaggtctaacgtttaagtctttaatccatcttgaattgatttttgtataaggtgtaaggaagggatccagtttcagctttctacatatggctagccagttttcccagcaccatttattaaatagggaatcctttccccattgcttgtttttctcaggtttgtcaaagatcagatagttgtagatatgcggcgttatttctgagggctctgttctgttccattgatctatatctctgttttggtaccagtaccatgctgttttggttactgtagccttgtaatatagtttgaagtcaggtagtgtgatgcctccagccttgttcttttggcttaggattgacttggtgatgcgggctcttttttggttccatatgaactttagttttttccagttctgtgaagaaagtcattggtagcttgatggggatggcattgaatctataaattaccttgggcagtatggccattttcacgatattgattcttcccacccatgagcatggaatgttcttccatttgtttgtatcctcctttatttcattgagcagtggtttgtagttctccttgaagaggtccttcacatcccttgtaagttggattcctaggtattttattctctttgaagcaattgtgaaagggagttcactcatgatttggctgtttgtctgttattggtgtataagaatgcttgtgatttttgtacattgattttgtatcctgagactttgctgaagttgcctgtcagcttaaggagattttgggctgagacaatggggttttctagatatacaatcatgtcatctgcaaacagagacaatttgactttctcttttcctaattgaataacctttatttccttctcctgcctgattgccctggccaaaacttccaacactatgttgaataggagtggtgagagagggcatccctgtcttgtgccagttttcaaagggaatgcttccagtttttgcccattcagtatgatattggctgtgggtttgtcatagatagctcttattattttgagatacgtcccattaatgaagaatggccaaatttggggctgaccgatttaatttgggggaaaggagagggcgggcgtcatcatctctcccctcggtgccatgagggtgatgaggcatcaggcagcatagtgaggtggagaacagagctcagtagcagttgaagactgcgagcaaaaacgtgtcaaaaacagaaacggcaccaaccagcattcagataaacacgcttttcttaacacccccatcacaggggacagcgcgagggtgctgccaccatggcgggaccacaggcaggtctagggccctcatacctatggggagaaatggggtccttggtttatgggcatcaccctccaggtataaaccagtggtatttggggctgtgtcaaccctgcacagaggtgtctaacattctcctttttcggtgctctggttccccacatggagatccttgattgctgggatgggggtgaggccatgccaagccgtatggacaccaaaaatgctctgcactcaatgagcaatgctttgtgtaaaaatgtgcccaaagccaggccgccttgcagcagaggctgggtcggggatgctccagtaggggcttattaagtcaggaagacaggatggggcagcaaagacgccaggcgaggggaggctgtactgaggtcccgtctccagctgaccaaacaggaagctctggagtgtgaggcaaaggtgtgcgacgtgtcagtcatgagctgtgggcactcccaggcgtgcaggaggtgcaggaagacttaggaagtcctcctgaggtcccgtctccagctgaccaaacaggaagctctggagtgtgaggcaagggcgtgcaacgtgtcagtcatgagctgtgggcactcacaggcgtgcaggaggtgcaggaagacttaggaagtcctcctgaggtcccgtctccagctgaccaaacaggaagctctggagtgtgaggcaagggcgtgcgacgtgtcagtcatgagctgtggacgttcccaggcgtgtaggcttctggtggctagggccattctcaggaggaggctgcagctgtgagctgctcctggccggtactcggagccaggagaagatcaggaagcccaggatggggcggctgtggtgccaacagcatttactccaatccttccaatgatgctgttaagccaataaaatgcaagtttgtatagaagcatcactccatacatagtggctattggtgatctcttttcctataaatggctattgagagtaaaactactactctgtaagacaacatgagaagtagtcacagaaaatatacgaatttctatagaataagtggaaaagctggccaaacagcagggctcctgcacccccgccaaagcaccaagcacagtgagttttgtagaattcgactgaaccttcaagtagcagatggtttcaaggcaattgtaagtgttctggagcatataaagacaagagaagccttcgggttgtgtgttatcatggaatgcctaaatcattgccatactgacgtagcctgcacaacaaagcagacaacagaggaccctcagttagacaaaatactagccatcaagtagcagaggaaaagagcactacagtacgtccctgcaacatgggcttatttctgaaatgtgataatcagttatattaaaaaattaaggccaggcacacagtggttcacacctgtaatcccagcactttgggaggctgaggacagtggattgcttaaggccaggtgtttgagaccagcctgggcaacatagccagaccccaagtctacaaaaaatacaaaaagtagctgggtgtggaggcgtgagcctgtagtcccgggtacttgagagactgaggtgggaggatcacttgagccctggaggcggaggttggagtgagctgagattgcgccactgctctccagcctgggtaacagagcaagaccctgtctcaaaaaaaaaaaaaaaaaatggatttatatgcaacacaaaaataggcataattacagacactgataaggcatctgacaaaatacaacaaatgcttttgataaaacactgagtttttatcaaaactcaactctgtcaagtggaacagagggatttttttcctgaatgtgattttatgcacacacacacacacacacacacatacacacgagtatcatgctctatggggaagcactccaggcatttttatgaccattcaggaacatctgctgcagccattgacgagcacaacaagagaaagaaattagctctgtagtaattggagaggggcaggtaacacaagcactgtctgaacatgttatgattctgtgtctggaaacctccagagaatccagttgacatactgctagaaacaatgagagagcttaatatggtgaaagcgttccaagttaatatacagaagtcaataactttcatagagacacacagcaactagagagacactgtaaaggaaaaatgactccatttataatggcagcaaacgagataataggaataagtttaacgagaaatgaccaaggactatagtgaataaaacttaaaaatcctattgaaggacacaacaaaatttaaacaaacagaaagacttgccacatttttggatagggaggtttaacataatgaatcctctctaaattgattcataaatttaacaggattcccaaagaaacagcaatggtgctttgttttggacaagacacctggttaaaaagtataattttgttttgctttgccattgctatggcttgggtatggtttatttgtagccaaaactcctgttgagatttggtcctcagtgtggcggtgttggggggtgatgggacctagtgggaggtgtttgggtcatggggtggattccttatgaagggcttggtgctgtcctcaaggcggtgagttcttgctctggcaagatggattagtcttcaaggaaatgggttcgttcctgtgagagttggctgtaatgaagccacgatgtcccttagtcttcaaggaaatgcattagttcccatgagcgtgggctgtaatgaagccatgatgcccctctggttttctctttacaagtgtctgcttcccccttgaccttctccatcatgttatgatgcagaaaaaaagctctcaccagaatccactgccatacccttaaacttcccagcctgcagaagcatgagctagataaaccactattttttataaagtacccagtctgatgtattctgttatagcaacacaaaatgaactaagatagttatttgtttttaactgggcaagctgattctaaaaggaaacccagaaaattctgaaaaagaaggctaatgctggagacaagccctagtgtacatcaagcaggttatagaggctccatgccaggtcactgtggggatggggtgtgaagtgaaacaggtggaacaaagtggggagtccagaaattgacccaacacgtgcaggaatttagtataggacaaaggtaatcacatctcaaaccactgaggcaaagagagactatccaattaatggtatctaacaactgcatagtcatctgagaaataaaattgcatctttatctgacaccatgtaccagagtaaattccaaattgatcaatgtttagatgtaagaaatgaagaactgtatttgaatgtttacagcatctttacccataattgccaaaacttggaaacaagcaagatatctttcagcaggtgaatggataaatcatggtacattcagacaatggaatattactcagcactaaaaataaatcagttatcaagccatgaaaagacatggaggaaagttaaataaaagttaagtaaaagaagctgatctgaaaagtctacatattatatgatttcaactacagggcattctggaaaaggcaaaactatggagatatgtaaaaaggtcagtggttgccaggggatgaggcggggaagggatgaatagatggagaacagaggatttttagggcagtgaaactactctgtttgatggtacaatggtggatccatgtcattatacatttgtccaaacccatagaatgtccaacaccgggagcgaaccctaacacaaagaatggtttttgggtgattaaagaaataaagatgcatatgtcataaataaaataagggataatgtataaacttggtgggtgctatggtttaaatgtggtgttttctccaaaatttatattgaaacttaatcctcattgtggtggtattaaaaggtggggcctttaggaggtgattaggggatgagggctccaccttcatgaatggattaatacccctataaaagagacttcagacagagtccagccctcttatgccatccatcccatctgccatgtgaggatacagtgttcctcccctccaaacgatgtagcaacaaggcaccatcctggaggcagagtgcagccctctcgacaccaagcctgctgacgtctggattgtggacttcccagcccccagaactgtgagcaatgaacttctgttgtttataaatggctcagtctgaggtactttgttgcagcagcacaaatggatgcagacacagggcttctccccagcacattacccatctctagacaatgtctgggaatgggcttttattatttacttggaactaagtcattctcagcctgttccaatgttttaaaggtaaatttcttatactgtatctggttttggaggaaaaggattaccaaatttctaagaagaaaactgaaagtaaaatataccaaatagcatcaaagaaatacatttcaaaattatagaagatatagagagaaaggaataatttttactccacatgtagactgccccaagggtgtcatgtgtaattaactctgcctccctatttcctagaactgtgcccactgaatttaatgactcaacaacagggtttccacagcttgccttgagaaagactcttccacagtttatcagtgctcagtgttaggaaaccttcttcagtgttcagcctaactgatcttctgtacaatttcagtccacttcccagacttcatctttaaagctcccagtctccttgtggttggtattctctgaatactcgcagtgaatatcatgatcggcctgcaatcccacatctagtcattatttggtcaaagtctatgttttattttcaatcttttcctgcaagccaattttttttttttaaatcttctggtgtttctgcttccattctctatatttcctctaattagttcgaaatcaggtagattttaaaatgtctggcttggggacatcttgtctgttggggacatgattggactgagactgaaaggaaacagctttgcttttgacaggggagatttttcttccactagggtcttgatttatggctttcctcaggaatcagaagacaccagtgtctcctgggcttttattctctaaacatttcaaatgcattgattttggaaggaaaacaagttatgtgtaaatgttttgtgctctcctctatgaatgacaatacatctggggaatatcagataacaaagcactgtagtcagagtttaacaggctctagggcacaggtagccctgtttctgctgcttacttgaggcaagaatttaattgtgttcagttatcttgtttggaaaaagtttttaaagattaaagaaaataatgcgaagttcttaacatgtgcctgatacacagcaaaaatgccgccatctttagctattatgatacatatatttctgttctcttgtaatcatatttgtttttccatctgcaaccaggatgtttctgtgacttcccttgctagaataacacacaaaaaaccatgtgttccattattaacttctactgactatgaagcacatgttcttgcaatgagaacaagagggctggtgtgggaaagcttaaagacaagacacgttcaagaacacctttcaactaaatctgaccatggcattgcaccatgggccaaataacaattccaggatgagcactcgcttgctttaaagtatcaagggcatattttaatgtatttccatttgtttatccatccattcattcagtgggcattaaacacctaccttattcaagggaaagaggataaaaaactgtgcagtctcaaagctcctttcacagcacatgctcacaggcagggagaaggcagcatggcaggagagcagaaactgtctgtggttgggctacaccagctgtagggacaccttctcagaggatggggcaaccatggacatcaaagccagtgttaagagagggagaaagaagagacctgtgtcctggactagaaggtgtgtaaccactggccacgtaaaggaggaagagtagctgaagactgggagcagcctgcatgaaaacaaggagctctgtggtgaggatgtggtggcatctgtggttaggatgcggtgggctctgtgggtaaaatgtgggatctggttaagatgcgatgggctctgggttaggatacggtgggttctgtgtttaggatgaggtgggctctgtggttaggttagaatacggtgggctatggttaggatgcagagggctcggtggttagggtgaggtcggctctgtagttaggatgtggttaggatgccgcggtctctggttaggatgcagttgactctggttaggatgcagtggattccgtggttagaatgcagtgggctctgtggttaggacatggtgggctctgtggttaggatgtggtgggctctgtggttaggatgtggagggctctgtgtggttactggtgtagaactccagtgcctgtgaggcagtagtagtttctggagggcctcctgttgtatgggtgacatcaccagaaccgtctaccttcttcccaggtactcctgagtggagatgatgggtagaagccttgctcaccatgttgtcttcaccagaactgggagaattgctctctgcataaaagatgtcaagcaagttttggccattctttcttatacttgtgtgatcagaggaatcttttggtcactgttgaaatcacagatgtggctccagtctcctacaaatcgagaaccccaaaactattgaatgagcatctccttgtgaggttcctgaaaatctgtttttaggcaatgttttcaggttattcttatggtcaggtgaatttggggagcagaagtatgtgaaaaaaagcagatgcagaatattcactttttcacctggctgtgtgatgtcattggatgcagtttgggaataggtgctcttcactgaggcagattctttggtttggcaatttgaaagagaaaccattgaatcaaggggcagtttctcttgagcgttgcacacatatggtgctcaatagattgtaggcatctacaaagaaaacccactctgtgggcatccacagatgccatggtccccatttgctgtacctgagcttcaaagaatggtgggcaactgattagtgaatcccaaatgctgactctgtccaactgtgtgaacacgctgtgaaagccagggtttctcagcctcagcacttagttgtcaggataagcacagtaatcacatactcattaatttccttataaaatgctcccagaggacatgccaccctcactttcaggtgctgagactgccagtcatgccggggctcagccccagtgagggagcaagcggggccaatgctctgagctcctcatggggccaaaacatgagggagtgcttggatccaggaatgtcagaaatgaataactctgctgttttaacactcattctttttccttccaaaatggctggggcttgctttgtcaacacagattcacatgttgctctgacaggaaatgaggcaatcactggccctgggtgccacgtcacgtagcttgtcctcgtcagtgcagctgacgctcaccaagccttctgtgccaggcacatgtgagcgctgggtctacacactaatcaaacatgctgctcactccacataacatacaacacgacaaaggcattgagagagcccagaaaccatgccaggctgacgctggctgctgtccacctgtgatggcctcgggcactgtggcccccactacaacccaaagagggtcaggccatggacagggatgtgaccagatgtcagctggtcaacgctctttgctgttccccatcagggaatggaacttctccaaacctgatgggctgtcggtgaggttagaggtaagagggaggaaactgaggagatgccagtgacctttctgtgggccttgggcagggagctggctgcatggttcgctagacagtgtgacctcatgagagtggaggggatccctcccaaacaggtcacacgtgtgtctgtgactcatggtgggtcaaacacactatagccccatcagcgggcaggacaagttgggccctgacacaggcagcatccaggcaggcaagcacattgacaaccacatgtcagccctgggagctaacggtgtttacatgacagtggcacatctggcacattctcctactgaattaacttgacttttccaaagtatacttgcggggcatgagaatggacaggcagatgcagcagtatttgctgctgcacagacctctccacactcgtcccagcacagtgctcaacttggagtattgcccagtattacagctcagtaacgaagagggacttgaagctccaggagatgtgagcaggcactgtggatgcctgcaccagtgttggtttttgaacatccagctccaagctgtcctccctcactggctctgctgtggagactgagatgcaaaactctccctttccaactctccccgctacttcctgcacagctgagtggccagcagcaaaatcctgaccaaaagaagtctgtgggatggaacatgtcctcctcctgccctgatggggtctgggagcatgacctgcagcagcgggtgggatgaggagaggtcagggggccacacaccctgaaaccacaggggcctgaatggcgcctgccaccactgtctggcatgtgggccactgttggttactgagacaataaaaaggtgcgtgtttgcaacactgctaatcagctatctcacttcctgcagccagtggcattctgagtgcataaaacctcaaaatacatagaatttggggtaggataccacatatatcaaaagatggggccaggcgagcttatgagaaggttattagttacgatcctcaacatcaacactgcaagggtttcactggatataaatatggtaattacacatttagtaaatatatttaatgccctgttcctacccccaagaaagaggtagaatgacaacaaacgctttgcaattaatagattgaaaagtctattaaaagtctatttatctcctcatttgcattgggctgagcaagctcttcaccccatatcaaaggaacaaataggaaacacctggtatgatcgatgaacggtctcttctcctaccgaggatggctgacaaggtctcctcactggcactaaaaccagaaataatgagagcatgaagcccgcgctcataaataattcatggactaaatattgtaagtgacagtgctttcttcatttttaagcaaccacttggtatgcttttgttctgtttttaagaagatcatatttgaatcagctcagaggcgagctgtgttcaggccctgtgagctccacgccctctctgctgacctctaatactttctattcttttcttgactgaggtgtgagttcccctgggctcaaatctggctggttagttagagcacccattcttgggtaatgacccaaccacacagggaggcactgacctaagttggggaggccgccctgaacccactgtcgattgtagcttcatactctcctccccttctctgccctccactgagcttgtcatggactggctcctccctgagccacctgttgccaggatggccccaaagctgagactgctttcctccatcgggagctcctcctcagcccgagaccccacttcccttcctcttcagggtcagcactcagggatcagatgcccatcccctctctaacctgggagcctgcctccatgcacacctcttcctgtcatcagtgtgatgaagctgctgcaggggctgggtccagagcgctgtgcatgaggacttcaaaagtccaacggagcagcagaaggagacacagacacactgtgcagtgagggtgtgtgggaaagagaggtgcggagagaggaaagtttggttataacagcatagggcaggaagccaggagaccctgtgtttcttggtgtgaattacccccaggttccaacgtggatgtgtctggaacagcaccaaaggttcctccagtgtttccgcagggaagtcctttcaatatcacctaatgcagatggacacatcttgaaaatttaaatatggggtctactggggaagcagggagtgtaaaccatgaccccaggtgcacacatttgaaagtccacacttacttcagagggttacagcttcactcagtttcacatttgttcactaattagcctgaatcctttagaatatctttattatatctccatccacacagtggggaccctgtcaacgatgattaactcctgctcacagataatgcacagtcatttcctgaagcttctttcttccttctccttccctttcctagctctctctttttctctttctctctccctccctccctaactctttttctttcttgccctctttcttaagtgtgcttaaccatagcatggttcaggtaaatataagaatattttagcttgttaggaagaaactgcatcaactaatgagcaaaataaccagctaacatcataatgacaggatcaaattcacacataacaatactaaccttaaatgtaaatgggctaaatgctccaattaaaaggcacagactggcaaattggaaaaagagtcaagacccatcagtgtgctgtattcaggaaacccatctcagctgcagagacacacataggctcaaagggatggaggaagatctaccaagcaaatggcaaacaaaggcaggggttgcaatcctagtctctaataaaacagtctttaaaccaacaaagatcaaaagagacaaagaaggccattacataatggtaaagggatcaattcaacaagaagaactaactattctaaatatatatgcatccaatacaggagcacccagattcataaagcaaatccttagtgacctacaaagagacttagactccccacaataataatgggagactttaacaccccactgtcaacattagacagatcaacgagacataaagttaacaaggatatccaggaattgaactcagctctgcaccaagcagacctaatagacatctacagaagtctccaccccaaatcaacagaatatacattgttttcagcatcacaccacacctattccaaaattgaccacatagttggaagtaaagcactcctcagcaaatgtaaaagaacagaaattataacaaactgtctctgagaccacagtgcaatcaaactggaactcaggattaagaaactcagtcaaaactgctcaactacatggaaactgaacaacctgctcctgaatgactactgggtaaataacgaaatgaaggcagaaataaagatgttctttgaaaccaaggagaacaaagacacaacataccagaatctctgggacacattcaaagcagtgtgtagagggaaatttatagtgctaaatgcccacaagagaaagcaggaaagatctgaaattggcaccctaacatcacagtgaaaagaactagacaagcaagagcaaacacattcaaaagctagcagaaggcaagaaataactaagatcagagcagaactgaaggaaatagagacacaaaaaaccttcaaaaaattaatgaatccaggagctggttttttgaaaagatcaacaaaattgatagacctctagcaagactaataaagaagaaaagagagaagaatcaaatagatgcaataaaaaatgataaaggggatatcaccaccagtcccacagaaatacaaactaccattagagaatactataaacacttctacgcaaataaactagaaaatctagaagaaatggataaattcctcgacacatacactctcccaagactaaaccaaggaagaagttgaatctctgaatagaccaataacaggctgtgaaattgaggcaataattaatagcttaccaaccaaaaaaagtccaggaccagatggattcacagccgaattctaccagaggtacaaggaggaactggtaccattccttctgaaactattccaatcaatagaaaaagagggactcctccctaactcattttaggaggccagcatcatcctgataccaaagcctggcagagacacaacaaaaaaagagaattttagaccaatatccttgatgagcattgatgcaaaaatcctcaataaaatatgggcaaaccgaatccagcaacacatcaaaaagctcatccaccatgatcaagtgggcttcatccctgggatgcaaggctggttcaacatacgaaaatcaataaatgtaatccagcatataaacagaaccaaaggcaaaaaccacatgattatctcaatagatgcagaaaaggcctttgacaaaattaaacaacccttcatgctaaaaaaacctcaataaattagttattgatgggacgtatctgaaaataataagagctatctatgacaaacccacagccaatatcatactgaatggacaaaaactggaagcattccctttgaaaactggcacaagacagggatgccctctctcaccactcctattcaacatagtgttggaagttttggccagggcaatcaggcaggagaaggaaataaagggcattcagttaggaaaagaggaagtcaaattgtccctgtttgcagacgacatgattgtatatctagaaaaccccattgtctcagcccaaaatctccttaagctgataagcaacttcagcaaagtctcaggatacaaaatcaatgtacaaaaatcacaagcattcttatacaccaataacagacgaacagagagccaaatcatgagtgaactcccattcacaattgcttcaaagacaataaaatacctaggaatccaacttataagggatgtgaaggacctcttcaaggagaaatacaaaccactgatcaaggaaataaaagaggatacaaacaaatggaagaacattccatgctcatgggtaggaagaatcaatattgtgaaaatggccatactgcccaaggtaatttacagattcaatgccatccccatcaagctaccaatgactttcttcacagaattggaaaaaactactttaaagttcatatggaaccaaaaaagagcccgcatcaccaagtcaatcctaagccaaaagaacaaagctggaggcatcacactacctgacttcaaactatattacaaggctacagtaaccaaaacagcatggtactggtaccaaaacagagatatagatcaatggaacagaacagagccctcagaaataacgccgcatatctacaactatctgatctttgacaaacctgagaaaaacaagcaatggggaaaggattccctatttaataaatggtgctgggaaaactggctagccatatgtagaaagctgaaactggatcccttccttacaccttatacaaaaatcaattcaagatggattaaagacttaaacgttagacctaaaaccataaaaaccctagaagaaaacctgggcatcaccattcaggacataggcatgggcaaggacttcatgtccaaaacaccaacagcaatggcaacaaaagacaaaattgacaaatgggatctaattaaactaaagagcttctgcacagcaaaagaaactaccatcagagtgaacaggcaacctacaaaatgggagaaaattttcgcaacctactcatctgacaaagggctaatacccagaatctacaatgaactcaaacaaatttacaagaaaaaaacaaccccataaaaaagtgggcaaaggacatgaacagacacttctcaaaagaagacatttatgcagccaaaagacacatgaaaaaatgctcattatcactggccatcagagaaatgcaaatcaaaaccacaatgagataccatctcacaccaggcaatcattaaaaagtcaggaaacaacaggtgctggagaggatgtggagaaataggaacacttttacactgttggtgggactgtcaactagttcaaccattgtggaagtcagtgtggcgattcctcagggatctagaactagaaataccatttgacccagccattccattactgggtatatacccaaaggactataaatcttgctgctataaagacacatgcacacgtatgtttattgtggcattattcacaatagcaaagacttggaaccaagccaaatgtccaacaatgatagactggattaagaaaatgtggcacatatacaccatggaatactatgcagccataaaaaatgatgagttcatgtcctttgtagggacatggatgaaattggaaatcatcattctcagtaaactatcgcaagaacaaacaaccaaacaccgcatattctcactcataggtgggaattgaacaatgagatcccatggacacaggaaggggaatatcacactctggggactgtggtggggtggggggaggggggagggatagcattgggagatatacctaatgctagatgacgagttagtgggtgcagtacaccagcatggcacatgtatgcatatgtaactaacctgcacaatgtgcacatgtaccctaaaacttaaagtataataataataataataataataataataataataaaagaaaccaccatcagagtgaacaggcagcctacagaatgggagaaaatttttgcaacccactcatgtgacaaagggctaatatccagaatctacaatgaactcaaacaaatttacaagaaaaatcaaacaaccccatgaaaaagtgggcgaaggtatgaacagacacttctcaaaagaagacatttatgcagccaaaaaacacacaaaaaaatgctcatcatcactggctatcagagaaatagaaatacaaatcaaaaccacagataccatctcacaccagttagaatggtgatcattaaaaagtcaggaaacaacaggtgctggagaggatgtggagaaataggaacacttttaccctgttggtgggactgtaaactagttcaaccattgtggaagtcagtgtggcgattcctcagggatctagaactagaaataccatttgacccagtcatcccattactgggtatatacccaaaggattataaatcatgctgctgtaaagacatatgcacacatatgtttattttggcactattcacaatagcaaagacttggaaccaagccatatgtccaacaatgatagactggtttaagaaaatgtggcacatgtacaccatggaatactatgcagccataaaaaatgataagtctatgtcctttgtagggacatggatgaaactggaaaccatcattctcagcaaactatcacaaggacaaaaaaccaaacactgcatgttctcactcataggtgggaattgaacaatgagatcacatggacacaggaaggggaacatcacacaccggggcctgttgtggggtggggggaggggggagggatagcattaggagatatacctaatgctaaatgatgagttactgggtgcagcacaccaacatggcacatgtatacatatgtaacaaacctgcacgttgtgcacatgtaccctaaaacttaaagtataataatagtaataataaagaatattttagcttgttgaataataggagaatgtggctttacacaccccaaacattgcctggcatgcaggtaaacactggatgctagtgtcctttattttttcaccaacaaagttagtgttatgcttccagtaaaaaaagactcatagtcaaagagaccagaataaaatgagtttagttgtgttgctttgagatataatatggcgttggattttcttttcctggtgaagccttttggacaattagattgaagatagaattgaatgctcagttatgagttaataatcagaaaagtgaagaagtgtttgaacagctttgattggagtactagaccttgagagtgtagcaaaaatatttattttctcctccatttctcatgtatttccatctacccatttccttacttgggataaatgaaggcatttggtgaggatttaactcacggccagggctgccagtcctctccttagttaattcagccttgagggttttcatccgcaccctgtgaattattccaggctaaactatttaaatgagccaggctaaactatttaaatgttcgggtggaacaaatgtccagtcattgattttcttttcctctccattttgaggagggatgtttagtagaaatgtgtcagcattcacactacgcaagggtcagcaccggtttagtgaaatctgtcctgcattttatagtttaaacctaacagtttaaaccaaagatttaaaatcaattgcccatcagcgctccttattgtactcagccgtcggcctccgtgaatcttaatgtgcctgaacagacccacagagacacagcatcagcttcacatttctcggtatccacttagtaatcattaagatcaattccttgaaatacagatgataattcaccatctttcatcgcagcatgaggtttctgtttagggatttttgtccagttcatttgtttcagcttatcttcctcatgcccgactggatgcaaataaaaagaccttgcttttaattttaagatcaaagtgactgccagtcattcaggggagacaacggaaggaaaggttttgaaaaattgggggaataaactccttatactccgcttctcttaggtccttgtgaagatgaacttacacagatgctctttgtatgatggaaagagaagttttaactgtatttaaactgtcatggtttctaaagtgcaaatgggaaaatcatgtttgataaccagctttatctggtacaacacaataacacaattctttattcaagccgaaagcgtggcacagacagtacggacacatttctttaccttatgtgctcattttaggttcaaagccaagcatatgcagcaaaacatagtctacatttcaaaacttggaaaacttatgctccatcgtggaattaattggcacttttgtatttttcctaataagagaggccggaccacttccctcagaagggtttcctagttgtcctgggctgtttttacaaagttgaactctaccaggctgttttcaagaaatgtgcatttttccagggcagttgtaagtaagtccaagaaaattgtggagcgataaagctggaccttagtttaaatgggaaagaatatttataaaagccatattttcagaatatgttttgtaggctagactagcaaaaatttaaacatgaccccctaatgtactctagaaaactccttttttctagttattaataaactcgaaaaataatttcccataaagaggtaatgcatggtcaccaccgggccttgatgcctgcttccaaaaggaacctggaactgggaaggataaaggaccatcagctctacatttcagctctgccccgccctcagggcatcaggaaagccacttggcctcttcatcttcgtgtctgcatttcctgaagtgttaataagaattcctgccttccccacttatcggggttatgtcaatcaaactgattagtgtatgtaaaaatgctgtcaaaattataaatctgcatattaaatgcaaggcatcaccatcaacagcccctttaagaatcattcgctcatgaaacacaagagtttctaaataaagcggtgccctgacagtttggctagtaagtgttgtaggggttcaagaggatgggggagaacatttgcttctctttttccagtgaaacgagaggattcgggagggaacaacgctgaactactgtgtgatggagagaaggggtgagtgggacccatgccctcccagaagacgccctgagcgggggcccaggctctcccggaagacggcctgagtcaggtccacgctctcccggaagacggcctgagaggggggcccaggctctcccggaagacggcctgagccaggtccacgctcccccggaagacggcctgagaggggggcccaggctctcccggaagacggcctgagccaggtccacgctcccccggaagacggcctgagaggggggcccaggctctcccggaagacggcctgagccaggtccacgctcccccggaagacggcctgagaggggggcccagggtcccccggaagacggcctgagccaggtccacgctcccccggaagacggcctgagaggggggcccaggctctcccggaagacggcctgagccaggtccacgctcccccggaagacggcctgagaggggggcccagggtcccccggaagacggcctgagccaggtccacgctcccccggaagacggcctgagaggggggcccagggtcccccggaagacggcctgagccaggtccacgctcccccggaagacggcctgagaggggggcccagactctcccggaagacggcctgagtcaggtccacgctcccccggaagacggcctgagaggggggcccagggtcccccggaagacggcctgagccaggtccacgctcccccggaagacggcctgagagggggcccaggctctcccggaagacggcctgagccaggtccacgctctcccggaagacacggtccacgccctctgagaagatggcgtgtgggtcggcgccgagaaggagtggtgagaatgagaacaaagcttcccagtggaagagagagcagctgtcttcgaggtcaggcctgggagggcccagcctcgtgcctgtaggtccggtgcaacagcgcatgtgctcctggcatagggctcactggattattttaagtaaatggctgtggtagttggccaagcatcctgctctctggggagaatgcctgagggtggaagcatttgttcagcatgaaagatggagtcccaccctacagggaggaaaggaccgcctgagaagggtccagggccggctgggaccccacctcattggcgctgtggtggggggtgggggggggccgtgcccacaaatcctaaggagacctgagctgatggaaatgggccctgggccgccttcccatctgggcgggagcctgtgggagaaggaccagccggccaccaccgcagaagacaccaggccaacgcctacaataccagtctaacgtctcgttcacaagtgtgtgtattcagacgagagccatcagcaggacacgggagaaagaccacgcgaaacagaaagccactgcccctggcctggaggacacgggccagggcgtctcctcagaggagttgagcagaagttacagctacagaacaagaggctcccttgaaaaaggaagaatggaggataagggaaagatttaaataatgaaaataggttgcaaaaattaggagggaaaggcagtttatgagctgtaggataaatttaagaaatctccaaaaacatcgagtaaaagaatgaagagacaaattttaaaagtaaaagcagaaaattaatagagtgttgcaaatttaacaaaaatgcgtgtaaatgaaggaattcataaaacaaatgacataaaactatacaaatagcttaaatatgtcaagagaagtgaatggctcacacctaaacatattcttaaatccaagttaaaaaaaaaaaaaaaacctttccccctcccgggtaggtgtgggtgctggtcactgcagagaaaatgtgaggcaggtcagaaatattggataaaagataatggaaacattacttcaaaatactgagggaaaataattgaaagcttagaattcccccctgggaatctattgagacggatgacaagcaaatcaaggaattttgagatgtgggaatattcacaaagttgatctcccatcgttttagatgatgcttcttgaggaagctctctatgaggggagacaaagcaaggaggaagacaatgattccggagatggtgtcccactggaagagcaggacgccgggtctgcagagcacgtgcctcgatgggcctggcctgggagttctctgggagagaggcaggtaccctctgtgagatgcttccatagaagcctcgtgacttagcacgtatggtaaaggcacaatcttcctctttcttttttttcaataagagaaaaaagaagacattccagaaaaaaacacgcacaatatttcaaaagcgatataagcaagtctagcaacacaagtgaatcaaacttaaacacaacacaacttggagctgggggtggaggcggagcctctgcgtgtcctgacgccaggcagccaggctcccttcccagcggaactgtgctgggagggttgaaggtggttctgcttggctctgtagtgggaatatctgcaacactctcatcagatagatgctgttcagctgttacaatcactcaaaagacaaagtagagaagacttaattatgggcataagaaaggatataaataccagtgatgatggtgtaaagatgtaacacgtataattgagagaggctggctagtggggaaggggctgagggctgccaccctcaacgcacagaacagggagtgaaaccacacccaaatttgatgcaataagaaataaaggtttatctataattgcacattacaaacataataatggaaaatgaaaaaagtatcaaatgttaatagcatgagtcaatagatgttatctagaactgaaaatctagaaatatagaagtatgtagtacttagaatcacaagaaaaaaatttgaaatggttagaggtggcttctgagagtgaaggggagtgaggggtggagtgggagaatacggcttttcattcagaagttctttagaatctttaccatatgactgcattaatttgataaaaataaaaacttctgttcataagtatatatttctgtgattatatttctcataatggctaagaaatggtctctgattcataaacagaactttcaggagctaataaatgtgaatgagttggcatcccatccacaggaggggcaaatcaaattgtgttttatttcaaaataagtttaattttaaaacattgtgacatatacagcaactagaacaagacatattactctgagaatttcttaggtatttgcttgaataactgaactagaattaagatcaaatggcacatcaactttaagtaaatgagtatctaaaaatgtttgtattagtaattttgcacatttctaattttttaaaatcagtgtttgtctctttacaataggaaagtaaatttaagcaagttattcttcagcattcagaagtcactaattagtgaagctctaccttatgaagtctcattttcatgtagtaaatttaattcatatagataaattgcctacacataaagcattgtattcactggcaacttagaagtatcatttccccacaagcctctaaaacattactattttccacatgaagtttgacagtagcttccaaaacttgccagatttgtttcccagaaagatggaaagatattgagttccagcgctgagaaatgctacaaacttactttccaggtcatactgacttatgcctctggggctggaagtgcattgcacaataaggaagccagggtggctggtgcccctcccctcccctttctactccctccccctacccttcctcctttccttttcataccaagacactaatttaacctgagttattcagaaatctgtagcagaaatctgtgtaacactccacattttaaaatttaccaaagttttgtttatatggaccagcaaccctgtgtgtatgtaattcttttatagttcttttatattggatttaaattgttctgtatgaaccattccccactagaatataagagccacaagggtaggcatttggtctcttgttctgctgattccccagaactttgtatgccaggcactgactaaataatttgtaaatagtgccattaccaataattaactaacacttacatggtacttgccatgggctaggtaactttctaagagctggaaatacatgaacacatttagccttcaaaataacctgatcaggtaggtgttgctgttatccccattttaaaggtgagagaacagagtcccagcgaggctcagtggctggtcatgggtcgcagagctctgtgcaggtggggctggattctgtgctaggatgatgctcttggcctgccaaactcactgctccctcagtgagactgctgtaccctgagtgggggctgtgtctcttcctcacagccccgtgggcctacagagcagtgcccagtgtatggcggtgcccaattgatggctgcatgctggaggatgaaggaatggtcacctccagcagggatgagcttggtggaggtgaactcttagccctcaatttagaacattcctaattccacaaagaggcaggtgtcatctgtgtctgaaagggggccagttgctggtggccagggtggggctggtatatttatatactggatgatgtgtttataaagcaactttacctttcaaagaatctcatattctagatcttacccagctacattgtaagaaagcagcttcattttcattttaccaggaggcccacattgggaagatcacacagccaagacatggtgctgggttccagtgttcccacacccagcaagattggagaggaccctgctggcccagcgtggctgagaaccatgccagtcatttggtcctttattttgtaacataaatatgtttgtatgtcagctcgatggtctttttccgccttagattttgccggcacatgcagagcaagtgtgtgtgtgaaacttaatccaaaggtcagttactatttcacagtaatgactcccaagtgtgtgagagtgtagtgagtgtgacgaggaggtcattacacactcgtgaaaaactctggaaatggaaatggttgaattcaaataaccagctggcttgttattaatgggttggtggctcgttgtttccacagggccgattgatcaaatttagccctcattcatcttcccccatcctggctgactggagaggacgccttcttggctctcagcatgcccctcgcggctgggtcacccttgtttctcagagtggaattccctccctgagtttgagatggggaatcttggcagaaaggagagcgttcggggtgggttacaccccaaccagaggaacttaggactctcaggagacgtgggtcctccggaaggggctggccaggccccccagagacgggggatgcccaagcagagctgggccccggcagcctaatcacagcaccatggtcaggatggcttttcctgctaatatgctctggccactgatctctgtatatgctataatattttgtctttctttgtcacagcctgttgtggaagagagagccttttggcctccaagatcaggtagatgctaatgctcctttctttagagatgaaaatgcccacaggaaaagaggaggtggctacctttggtcatgacgattcctgccagcgctttatggcgggcgtgcatgggcgtgaggtccgtcgtcacctcgcggaacttctgtgtgaccagctgggatatggagtctgcgaattcctgaaagacacaagcacaggcctccacgttgggctgagcaggtgccgtggaggatgatggggcactgtcctccccgtcctcacagcctcatccccatgtggccacacatgggcctgctctcctcccctcctcacagccttgtcaccacgtgaccacacacggcctctccctggctgtgcccccaaaactcagaatcatattgagtggcttatgagtggttaaccccagcattgctctcagcagaaaccctgagctctgccaacctccccatggaaacagtgtctacttcctctccctgcctctcagagcagtgactggaggagtctttcggcggggagggaatttttatagggatgatgggccaccgcagtcttctgagtattccagagccagtgtctacacagccagcagtctcagggtgctcttctggcaaaatggctggcgctgtggctctctccacaacttcttctcaccttcctgcacatgcacacagatgcacacattcacatgcaacacacaacacacctagggcacacgtgcacacacgaatatgcacacacatgcacacacacagacacacacatacacatacacgtgtgcccctgcacaccccttaacataatctgattagtgataaggtgactcctggtctctgggaagacagcacacacagtgtggctctgtggccgccctttccccggctcctctgggcccaaggctgcagcactgccctttccttgacatggggccccaagcttttcttcgggggcagtttggctggcatagccgttgcaggccttggagtagggaagcctggttggaccctcagttctgccactcaggagcctgggtgagtcgttaactcctcggagcccattttcctaatttacaagtgaatcatcttcatttccaccttatggtgttttcgtaaggattaaatgcaatacggtgtcttaagtgctcagcacagtgccccacacttggtaggaagtgctcagagatgacggctgtgactattactcttattattttcatcattatcatcatctcccccagtcaccacaggcattgcctgagcctctgagcagccaaatcaattcatcatctcatccaggaggcaggaaacagtcccttttcctggtggactgggcttccccattaccaccaggcatgtgttgatgttgatactgtgcagcattgggcctggtttccacatttccaccgggcgtgtgtggacgctgatgctgcgcaggcattgctgctgataaggacagctctctgattaataacgctaagaaagatagacagtttttaaaaatcccacttgtaggcaataaaacatgtttgtgtgaaaacagccctgcctgccagaagcaaaaaacatgccacaaaacaacctagcacctctccctcttaattcttctgcagtcaagggcagaagtgcagggcccggcgcagtctcctctgctcaccccggggtttgagggcctcaagccgctgtagcctgtaaatgatgtcagctacttttcccactgtgtcgtgaatcaatatggaagccccacataggacagattgcagatgaaaggcaccccgacctttcagggactgctgtgagcctggagtcttcctgggtgctcccagtccaggctgctcccagctgtcctgtctttcgtgtctggaatcaggtccagagagggaaacctgtgtcctggacaccccgtgtgctgtgtcctggggctgctggaaaaatacccttaactgggggtctttaaacaacagggattcatccccccgaagctctggaggcagagatctgagactgaggtgtccaggggcggtgctgcctcctgaggctctggggagccttcctgcctctcctggctccaggcctccgggcgtccctgggtggtggccgcatcactgcagtctccgcctctatccccacgtggccttctcctctgtgtctgtgtctgctcttctgcctcttgtagggacaattgtcattgaatttagggcccacttgggcaatccaggatgaggccatctcaaagtccttaacttgaggatatctgcagagaacgttttctcagtcaccgtcatggggttggacgtgtctttctggggctgttcaacctgctgcaccctcgtttactctttcaatgcatgctgtcaagggagagcgtgattcttaatttttttatttttctttgagacagggtttctctctgctgcccacgctggagtgcagtggcactatcacggctcactgcaaccttgaatttttgggctcaaatgatcctctcacctcagcctcccaaagcgctaggattacaggctccagccactgggccaggcccctgtgataacctggtcttccttggtgcccaaatcacacacagttgccatgaacgacgtccacaaggtgggtggcaggcgggagccttcgtgatggtccttggttctcccctagaaggctggctgcccacatctaaaggtcaggcctggctgtgaggttgtccggccccgcctgtgccccccacgaccttgcacgctgagagctctgagctggggtggagaagaagatgcagggggacagaggcccacagagtcctggagccccaacaggcctcagctatcacctcaggcctcgagaagtcagcttctcagcaccatgacagacggtgaaggtgacataagcagccccaccacaggctcctgcagggcgtgtgctgcaagccccatcctgccaggacctcccgcatctcccagggaaagcatccgggcacagggttgatggggcagccctggctctgggaccgggtgacgggtgggacctctgccaggcccggggctcgtgggttgccagcaggtctgggaggtggggaggcttgtgctgggccttgacttgcagtgctcatcctcaccggccctgcagaggggacagggcactgaagggcttcccactgggaagagggtctagaaagccttgtccaaagctgatgtctgagataaaccttgaaggatgagtaggagagcttccctttctcaggtgacagaatgcagactgctctcccgccggtccgccccacggcacatgggcaggcgagggcagcaccgatcagcattgctgcacaggcgtcctggactccagccacggggacacttccccagctcaggcagtggccatggcagcctgggggccacatctgtcccacggggttcactgtcgttgccagctctggtatccgattctgggtgattcatgggtgttaatgttgattcaaggacaaaactacatcttttgcttctaaaacagcttttctggtgccaggcatctgattccagcacacgctgtgctccagagttattcccaatgacgtgtgtagctctttgttttttttttaggatgaagtttcaaatgtctaagaagtgatagcttgtccagcacaggaggcctctctgtgtcactttgtgtctgcttgagaggctccagcacaggacatcaggatggtctcagaccactgagtcataacagtgcatgcaaacacagatttcactgtggaaacctagggagtgctctgtccccttagagatgggaagacacacaaacagtgacaacagggactcattctgagcaggcgcggtacctgcccaggaaggtgccaatattatcctttttagctattgaagcaacgcaaccagtcatacagcagggggtggcagagacgggacgtaccccagctgccttgaccttgacccttgcactgaactggtgaccagattgctctgaggaaaagcaggatctgaactcaaggatggctgcaggcttcactgcctctgggtgcaggctggagcagctgcggccgggacacgggtgaaggcggctggcaccccaagaaggcagtggcccttggaggggggcccgtggtggagcctggccacccactctccgcaccctgcaggcctgtacccctgccctaggctcccactatgaaccaagcagcgtgagccctggccgctcccttgtggggtcatttgaggaacagctggggtggaatgaatcacatttggtttgggcctcagcatttccacagatgaaggcctccttgactcactggggagggcttgcatggccagcagatgccaggtggagagtgatgctcagctttcttctagagtgacaagggcccctggctggtagagatggccttgaactgacagagcagaatggagatattgctggccggacagttccacccaccccagctggaggaggtgggaggtgcagctgacagccaggaggccatggcacccaggtgtgcacattcagtcctgcagggcggctccaggcagcagccatggcgccctcaagggcagggcacttcctctccccaggtccacacattcccgactccacagccagtctttctttctttccttcttttctttttttttaatttaagttttagggtacatgtgcacaatgtgcaggttagttacatatgtatacatgtgccatgttggtgtgctgcacacatcaactcatcatttaacattaggtatatctcctaatgctatccctcccccctccccccaccccacaacaggccccggttgtgatgttccccttcctgtgtccatgtgttctcattgttcagttcccacctatgagtgagaacatgcagtgtttggtcttttgactttgcaatagtttgctgagaatgatggtttccagcttcaaccatgtccctacaaaggacacgaactcatcattttttatggctgcatagtattccatggtgtatatgtgccacattttcttaatccagtctatcattgttggacatttggcttggttccaagtcttcgctattgtgaatagtgccgcaataaacatacgtgtgcatgtgtctttatagcagcatgatttataatcctttgggtatatacctggtaatgggatggctaggtcaaatggtatttctagttctagatccctgaggaatcgccacactgacttccacaatggttgaactagtttacagtcccaccaacagtgtaaaagtgttcctatttctccacatcctctccagcacctgttgtttcctgactttttaatgatcaccattctaactggtgtgagatggtgtctcattgtggctttgatttgcatttctctgatagccagtgatgatgagcattttttcatgtgtcttttggctgcataaatgtcttcttttgagaagtgtctgttcatatccttcgcccactttttgatggggctgtttgttttttttcttgtagatttgtttgagttcattgtagattctggatattagtcctttgtcagatgagtagattgcaaaaattttcttccattttgtagtttgcctgttcactctgatggtagtttcttttgctgtgcagaagctctttagtttaattagatcccatttgtcaattttggctttcgttgctttagacatgaagtccttgcccatattcacccaatacaggagcacccagattcataaagcaagtccttagagacctacgaaaagacttagactcccaaacaataataacgggagactttaacaccccactgtcaacattagacagatcaacgagacataaagttaacaaggatatccaggaattgaactcagctctgcaccaagcagacctaatagacatctacagaactctccaccccaaatcaagagaatatacattcttctcagcaccacaccgcacttattccaaaattgaccacttagttggaagtaaagcactcctcagcaaatgtaaaagaacagaagttataacaaactgtctttcagaccacagtgcaatcaaactggaactcaggattaagaaactcactcaaaactgctcaactacatggaaactgaacaacctgctcctgaatgactactgggtacataatgaaatgaaggcagaaataaagatgttctttgaaaccaaggagaacaaagacacaacataccagaatctctgggacacattcaaagcagtgtgtagagggaaatttatagcactaaatgcccacaagagaaagcaggaaagatctgaaattgacaccctaacatcacaatgaaaagaactagagacacaagagcaaacacattcaaaagctagcagaaggcaagaaataactaagatcagagcagaactgaaggaaatagagacacaaaaaacccttcaaaaaattaatgaatcctggagctggttttttgaaaggatcaacaaaattgatagaccgctagcaagactaataaagaagaaagagaagaatcaaatagatgcaataaaaaatgataaaggggatatcaccaccagtcccacagaaatacaaactaccattagagaatactataaacacctctacgcaaataaactagaaaatctagaagaaatggataaattcctcgacacatacaccctcccaagactaaaccaggaagaagtggaatctctgaatagaccaaaaacaggctctgaaattgaggcaataattaatagcttaccaaccaaaaaaagtccagaaccagatggattcacagccgaattctaccagaggtagaaggaggagctggtaccattccttctgaaactattccaatcaatagaaaaagagggactcctccctaactcattttatgaggccagcatcatcctgataccaaagcctggcagagacacaacaaaaaaagagaattttagaccaatatccctgatgaacattgatgcagaaatcctcaataaaatactggcaaaccgaatccaccagcacatcaagaagcttatccaccgtgatcaagtgggcttctttctttctgcttccttccttccttccttcccctctttctctctctctttctttttttcctttttgagacagagtctagttctgtcacccaggctggacctcagtggcatgatctcggctcactgcaacctccgcctcccaggttcaagcaattctagtgcctcagcctcccaagtagctgggactacaggcgcgcgccactatgcctggctaattttagtttattttgtactttttagtagagatggagttttgccatgttggtcaggttggtctagcactcctgacctcaggtgatcctcccgccttggcctcccaaaagtgctgggattacaggtgtgagccaccacacccggtcctttttttctttttttttttttaagtttcaacttatattttgggttcagtgggtacatgtgcaggtttgagtgatgctgaagtttggtgtacaagtgacccaggtagtgagcacagtacttggtagttagtttctcaaccccctccctccccaccagtattccccagtgtctgctcttcccatcttgatgtctgtgagtactcttatgtttatcttccactcataagtgagaacatgtggtatttggctttttctgttaattcgtttaggatgacggcctccagctgcatccatgtagctgcaaagaacatgatttcattctttttttttttttatggcatagcctgtttctcaatccattatgtcctgccctgcctcagtctctaaaactccttcctaggcccgaaaggtttcctattcccctgtttggaggtcctctccctcatctgcaatccactgcctttagaactccagcaacattcatgtaggggtcgactcatgttttttcctgcatgattacctagcagttcatgttttatggtgtgactcctatgcagtgctgcatctgtggctgggagcatggcttggatgcgttttgcattttcgtggtcctgccatagcaccatgagtgatcatggctgtcatcaacctctcgaatgaatgactgcgtgtatggataagtgaaactctcaaggatgaattatctaaaaagtaaaatttcagaaaaaagttggttatttttcccaccagttattatcagcatttttttccccaaccttttcacactgtcttcatctgctggggctgccgtaaaagaataccatagactaggcagcttaagcaacggaaattaacgttcttaatggttctgaaagctgaagcccaagatgatggtgtcggccaggtcagtttctttctgaggccttttctcttggcgcgtgggtgctgccatcttgtcatgtgctacatgaactctcctttgtgtatgcatgaagacagagcaggaccagactccatggcatcatttgtttgtttgtttgtctgtttgattttgagacatagtctccctctgttgctcaggctggagcgcagtggcgtgatcatagctcactgcagcctcaacttccagggcccaagtcatcctcttagctcagcctgccaagtagttgggaccgcagacacagggtgccatacctggctaatttttcagtattttgtagaggcagggtctcaatgtgttgctcaggctggtctcaaactcctgggctcaagcagtcctcctgccttggcctcccaaagtgctgggattacaggtgtgagtcaccgttcctggcctgtggggtcatctttaataaggacactaatccactggataagctgcctcaactccatgacctcattttgccgtaagtacttccttagggttttggacttgcttgggccctgccatcctttccttgttgcctctttctctctcttggaaagggacgtctactccatgcttggctcactgttatattttgggaacatggaacttgtttgggttccgtggttcacggctggaggggagagctcagcttcagggtgggcaaattgcaccccgagtcccacccattcctgattcaggtgaagttttgttgaggctcaggacttcacaccttagtgctgatgctggaatgagctaagacttctggggctgttgggatgggatgagtgcatttgccatgcaagaaggatgtgaatttgggggaggtcagggacaggatgttctcaactgaatgtctgtggcagcatcaccttgttggctcagagtgagtgagctcactctccggtgtcacctcttacaagaacactaatcccatcagatcaggaccccactctcatggcctcacttaacctgaactacttccttagaggccccatctccaaatacagccacactgggaattagggcttcaacatatgaatttcgggggacacaaacattagttccatcaaacaaaacatgatgtcacctgagcggctccctttctgaacccatgtcatgtgttagcctggtgggtacaccttaggggcaggcaccacttgctctctgcccctcataggctttatctagaaacatgtggacatgcaggtgtggactatccctccttccttgacacatgacatctccttgcttccagcatctaggagggctgtgtgaccagggctgcctgttgagtgctggagaaaattgtgtttgccatttttaggtgtggatcctgaaattcctaagtgatgctccgtgaaattcctaagtgacgctccgtgaaattcctgagtgatgctccgtgaaattcctgagtgatgctccgtgaaattcctgagtgatgctccgtgatattcctgagtgatgctctatgaaattcctaagtgatgctctgtgatattcctgagtgatgctctatgatattcctaagtgatgctccgtgaaattcctaagtgacgctccgtgaaattcctgagtgatgctccgtgtttgcctcctaggctcttttcctcctctttctcaatcccccgtttctctcttccctccctacaagctggattcagagaaccccaggatggagccacgagagggttggggccagggtgaaggaattagctacaggctgagcacgcacggcttatttatagtgcgccactggctttgggggccgtgggttacggcaacaatgttatttactctgagtcatagaagagagaaatccatgagaaaaagacaaagaaaacgtggcaatcaaattgaagacttatgcaaatagtgcatgaaatcttacaacttataaatagaaaatgtctctgcaccataactcatgattgatttgacatgtgtggtggatccatgatgagttggtctattgctgatgtcacacgtttggtgggtccagatgatgacctcatctccacttaggggctcttcaggcctggaggcaggtcttgagcatgtgctggggggtccccaggcctcaggaactagctcctcctcactgttctgctggccagtagaaaacatttttgttatgaaagtagccattattagggcctcacctatggaatgctagatttctgtgtgttggtggtttgtggattcaggtatgcaataggaggcccaggcaaagcaccatgcgcttatatgctttgtgctggtcgatcctggtccaatggaaagatatggattggatagctccagcacttgtttctgagaatctgtccagctctcgtgcaagtccagccttggtgaaagacaatttgcgtgatttctcagcacggtgccagcagggctcaggagcagcaccgaggggtgcacagagactgtcaccccagagtgccccagcatcctgcccctcagggaccgcagggctgcatggggaggatgtggcactaggttcctgggtgactgctctcgctacactcctaagcccaggaaacttccatgagaacttttttttccgtttaaaaagccaaccccatctcctcctctataatccttttttctttattctttacattttaaattgaggggcgcttgacatttatatgaagcatatttttcaactaacattttataaaggcaaatgtaaaaagagaaaagcaaaaatttaaaaaactttccttactttgggtggtgaactaattaaaatgtagagagatttgtagtaagctggttaaattttctctctttgatatttaaccagcgtgatttcccatgacggcttcagcaagtctcacctcctggctggggtccccacaggttggcacagctcagctccagtgataacctcactgcctgagtaattaatctctttctccaggaagtggagttagaatgggttgtgttggggtcccatttactaactgcagatcttcctcccctccctgtcctttcgagaccaccttggtgtttacgtggtgctcagagacctgaaatatttctgtgcttggccacaaacccgtcttactgataaccaacacagctttcaacacagatcttgcttttttgcactgcgtccttccatttccccagtgaagccctttccgggtctctccacagaactgtgtctactgtgccacaggtattttaagtgattggtttttaattaaatcacatacatgattgcagctctatgtagttttccatagttgaattactgtatgtaaatgatactgccattgatgacatagggtgttagaagctagacagcagcttagaattcagatagggagacatacttctttaacactagggatgtttaatgttttaatcacttgggatataatatatacagtcaactttggttactgcaaacccaactaatcagactttgcaataatgtgattttcttccccacctggcacttggtttacaggagaagcagctaaagtgctcaaaaataagcttgtgcctgattaattttttgcatgcaaattacagaatatgctcatgggcctgcaaggggttcatttcatctcctaggatggataaatgcattcagatttagtgttctgagcacatgggccaagttatattgcatggtccctttctaaaataagggaagacactttcccataacccagagaactgagttatctcattgtgtattatgaccaatccgcaccttcccatcatatctttcaattcggtgcctacgtcagaagctctacagaggctcctagggtgctcaaaaaccatgtgcttactagttccgtccacttgaacttgcatcacagaaggtagacaaacctgtgtttctctatggaggtcaaatgccagctcctttataaaggcttcccagcatgggaacccttggtgtcttacagcactttcaagctgtgtcctttcctggcataatttgtatgcttgtctttctttctcctgtacatgtcatacatgtgtaatataccacagaccttgtggacaagtggttactgtttctactgactttctattggttaataggagttctagctaaggtcattgaaatcgtgctacttgccagacactttctaaatgctttaggtgcatgttttcaattaatcctcataaaccactttataattaaggggctgcaatgatctctatatttgttaacaatcctgtgaattaatggtagtgtgcacagcttaggacacgtgtcctacaagtggctcattggtggggtgttgtccatcatgagaataactggtgtggacagcctatggcacatgccctccatgtggttcatcagaggagtgttgacgatcttgagaatgacttctgtagacagcctatatggcctgtgtccttcatgtggcttattggtggagtgttgatgatcgtgagaataactagtgtagacagcctataacacatgcctgagcagtggagtgttgtccatcatgagaataaccagtgtagacagcctatggcctgtgtccttcatgtggctcactggacttgtacagatacttgcaggaggaagaggccacttctgggtagggactgggagtggggtagtcagggaagcctccctggaagagatagtttatgtgattccttcaaagcccagaaagaatctaaattgtcagggattaaatgatcataaaaacttagtagaagccatagcctgaagcagttcagaggtggaaacatttgtttttgggataagaacaaagagtagatcagtctggcctgagtaagaatttgtgcagagtagttatgagaaattaaactgaaagggccactcactacaggagagtgtagggtctcgattccaggccaaggagttcatctgttaattcatcaaatatttatggaatgcttctcagggtcagacacgattatacctgccagggatacatcagcacagaaacaggcagagatcgctcccacgtgaagctcagacgttacccaggcacatggatgtcctttgagggaccctgaccggcagggtgacagggctgggtctgcagctgtgtgaggggccacatgtcttggtgaggacagtgatccagggcctggcaccgagggcacgtctcagtcatggtaaggtcagcagtttgttgttttgctttgcttcaagcaccctagatgtaaggtgaattatgaggatgctctcagggctaggaaggttaaactgttgcactggacctgcactatagctgttactaccgatggctgcctccacccacagcacgggtagcaccctgcgaggctctcgattgagatccctgctgggaactgttaacacattatttaatccacccaacaactatgtgaagaaccgtcccattttataactgtagcaaaagagttttagggagatttggtagctcggccaaagatctaaagcaagcaagtagttgaggcagaaatggggttgtttcaggtctgaatctgagctgtggcagcctatcttcatggacactacctgatgctcttttgaggtggattcccagaaggtctcggaaaacaaatccaaccatacactgtaaatcctcgagatatagaactcagcacatctgtggggtccaactccagtccttgagtgggagaggaaggtgggccttagagaccctcatggtctggcccaccttcagtccttgaggggtgacttcccctccagacaatatcaggaaggcataggttgccatccagatgccccagctcctgcagaggacaggtgagtggctggggaggggacgagagaggctggactgggggcaggtgagatagtgctttgcaatatagaaagccctgcacagagagactctaaaacctgttcaaaaaagcctgaataatcaacagaaaagtcatctgcagcataaattcttttttatatatgaaaaagagagacatccagctgtccccattattgttggtgatttagccatttagaaaatgcctgctgaagggtctcttggcagcggggcagggttaatgtgtcttgcaccagtctttcatgcctcccaggaaagagctcacaccgtggggaaacgcgccctcctgtgaacccttacaaagcagctcggcttctcgcagggacgatggtggtaggtgggactgggtgggtgggggttctggagaatccttggtgatgccctgaggctttgcctggcaccctcagagcagaggtttaagatacccagccttgaagctatgaatgcacaaatgggcaccggctgcacgttggaccagcaatggtcagaggagagggtgtgtggtttctcgttacacaatagtgataaccaggtgcttccagctccagggttaagtggggagttggccccatatttgatgagctgtgcattcccgtgcttaacggaaaagcaaagcaaaaggctgctctgttagctcccactttttgttgcccacattttgcctattggctccgattaccatggcaaattaccagcattattcacattggaaaatgaactttaaatgggaacattgcaagactcaaactttactcatttccaacactaatattttgaatggcatgaataaataaaatgtgctcaaatttgcagcagtagtcctcagggtaaaattgacattcagccaaagtggtgggatactaaaatccatagattataaaggagaaagcctttagtaaatattttcctgttgaaatcctgtctttgggtttatacggctgaaaaatcagaaaggttagatttgcacgtgggtggggcaatgcggaatccaggaccgttgccccgagtccccaggctcctttcccctttgaactttgtttcacagcgggggcgggtggtggggcagtgggggcgggtggtgcctcactggagagagccaagagggggcttgggagtgcagatggcagagggacgcagggccagagtccacatggaggtgggacacacctcgaagccccctctcaaacaacacaccccgtctagacccgggaagtaggagaaacactgccaggagagtccagccaaacacaaaccgaagcctccgggataatcagagaaaatggaagatgatcttccctgacttccatcttcatatccctttgtgtttctgtggaagaggcagtctctatgtcatgtaatgagccctgttttctgacaattacaataaagcttcattaatttcaaaatcagggactggtaaaaaccgatgtccaaccaaatagttcaaattatctgactatttaattattctaaatctcaaattacctaaaggcggatggcaaatttgagtgaaggcatgaaaaggaaaaatcccttattgtagccattgtatggtgggaaaagccctaaacttgggatcagaagaaccagagttgagttctgccaccaccttcccccagctgcatgaccactacggggcaattggggtctctgagccacgggttcctcttctgcaagaggcatcatcataatcactcctcaaggccaaggctctgcatcttggcacagagatgtacgcctgcagcatcctgcactcgtctcttccgtaggaacagtgctggtgtcataggggtgttaggaggttggatgacagtggatggaggtgcttagcctggtacccggcactgttaagctcagcatccagcactcaaataccagctgctgttgttattgccattatcatccaactgtgtgcaaacataacatttttttagaaaaaatacagaaataactcacccccacgtgcctcatccttcaaattaaagtaacctgtttaaagggtacattttgatacaattaagtatgcaggcaatgcagttttgaggaggcgtatgttggggtgacctttcctgtgactcacttgaagttggcctctgtcttggctaactctctgactttgctgctgctggtgaggcctgtcccccacgactgtgctcacaggatggtccccttaaaagaacctgaataacgagttgaatcataaggaaatcaaagctacatagttagccttttagagttttattcttaattcacaaataataattgtatatatgtattgggtgcaatgtgatgtcttgatacatatacacattgtgggatgatcatatcaggctgacatagccaccacctcaaagacttactgtaatgagagcatttagagtcctttcttttggctgtcctgaaatacatgatacattatcattaactatgatcaccatgctgtgtgacagatccccagaacctgtccctcctgtctacctgaaacctcgcgtgctctgacggacatcctagcccctggtaactgcctttctcctctccatttccgtgagagttctgcagccatgcacatagatgctgggtagattttggacccaaagccaaccttaggaggaaattacacatatatcagctgttccatttagtcacttttagtgaaatcatcagtctatttttggtgaggaaatgctcatcagtgaaactgcctgctcactctttaattacatgtacctttatttctgtttaaattggaagctagagtctgaggcaacagcacattcaaaggttaagttagtgtgctttggagttatgccgtcggctgtgtggccctctaagcattgttttctgatctaagcgttccttcctctctgatttcacagcttgggtgtgttattttgtgactgctgacacaaacattgtcctcgtcagactggatgcccaaggacaaggactcagtgtcactcctcattgcaatcacaacatccactgagtgtgcatggtgggcccccaccccaaagcacgcttgcctctgggtcagctcgtgcactgctgtctctgaagccctaccctaaagggaagcctgaaaggagctgagggggtgtctgtcagagccctgactgcagacaggctcggccatgcccagaacgtcacagacaccagttctcaagcatttctgcttttatttcacccccatccctgtccctcggggaaaagaatcaatcagaatttattgtgcaaggcactgatgaaatacagggcaaaataagacaaggtcctctacataaagcagcctagaatacgaaacaggaaacacaaaataccatgtgataaatggcagctgacatttctcaagggctgactgcatagcaggtgctcttccaagtaacagcgagtgtcatttctgttcatccccgttgtatccctaagaggcagttacgattattgtcctgttttacagatgaacaagccaaggctgaggaaaagaaaactccttgcccagcacacaggcagtaagttgtgggtctggaagtcacactagttccatgaggccccacaatgcgtgctgcctctgagacgctgaggagagagaagagatgccttggtcacagctcccaccctcagatgagatgagcctgcaggtaggaggcctgccatggcaaatgctgcctcttagatgaattggggtaggagaatgacccccaaactcctggagcaggcaggcagccacctgcatcaagaccacggggtacttctgtgggtcttaagccctttccccactccctgaataggggtttctgacagaggatgccgaggcactctgacatgtgacgcggttgtctaaacgctggtgtaagccaaaaataaaattctaaggccccccaaccatccaaatggacccctcttctcagccaagggcattccagagttaacctgaaaaactggttcagacatgatggaagagggggtcggacatgcctcatgatacctccctccattgtggaattcaggaaaagccaaccagccttaacatcaacaaagacctgagtccgatgagaaacagtgaccatctgttccctccaaagcctgctacccagagatctgcatggtcaaaccctggtctccacaccccttatcctaacccagaccttcctttctactgatcataactctttcaaccaattgccaatcagaaaaatgttatgacctggaagccgctgctttgagttgtcccgtctttccagactgaaccaatgtcaatcctacacgtattgaatgatgcctcaattctctctaaaatgtataaaaccaagctgtgctccgaccacactgggcacatggcgtcaggacctcctgaggctgtgtcacaggtgtgtccttaacctcggcaaaataaactttctaaattggttgaggcttgtctcagatacttttgggttcacgttggggacctggaagagggaggaggaggccttcagggggaggcctctgcccacggcaccgtcaggaagcccgagtctgccacggctgctgggtgggacagaccagggtgctcctgacgggcagacccatcccactttctgaggtggaaaaccaggcctgggcctcccactgcccacctcctgcttcctctcactggctccgtggccaggacccgttctctctgcccctcgctttggtctatgcaggcctcataccacgcattgctgctgggtgacaagacagcccacaggatccagcccctggggggaccgcccgaccttcactccacggtgggtgtgccacagccagcacgcaggagcaggcgtgttccacaccagggaggggcaggtaggcgttcgccaaacaatagcctctggcctgcggcaggaaggccctcccacgtgtgcaaggagatgcgttagagcaggcacggcatacataggcacatacacggcatacataggctggtggctgagcacagctgtaacttccagggttacagacattgaggcatttcagtcttgtgttgttagcatgttttaatccgacataattagttacagtaaagaatccatctagggaaaatgaagaaaatacggctttaaaatgaaggatctgtatagagcaaaagcagggactgagtcatacgaggctgagtctctcttggtgcctgaggctttgcaaggtcaggagctgactaccttttcccccatgtctgacaagtggattctgtcctctgcatgttgttgtttattttatgaatcagccccagccattgtccagctcacgggcacctccagcagagagtggaggcctgcagggactcacaggtgacccacgcctgcagcagagtggagaagggcctccctcctggtcggcggaaggacatcgacattgaagccagatgctggggtccccaggaccaggtgtccacacccccactgcacggatgagacaatcagcacagggaggtgggctggctcgctgacacaggctcaggcagttggtgggatgcttggaatgaaatccctatccctatgtttaaattctagctccaaaatctgggctcctgaccacaatgttagaggtgccttccaagggcttttcactaattgaggatttcaaacaagcctgagatgagagatcccacattcagccttgagcaactgagggttgacggttgtgtgtgctgacatctgtctgtctacctgttgattatgtaaagtagtcgtccacagtttcctaaatcgttaaatatccacaaatctgtttacacacattaacggtagttactgctttagcaatcaacttcaaatttgaataccattaaaacacagaaaataaactaaaaaccacattgggaagatgcatatttctgtttttttgtgaaactggtgctttctggtctactcaggaagatattttgagcccgggtttaattaggatctttaaattctcatttgtgtgctgacatgagggtgcaaacagatgaggtcctccgtttggggctgattcatggttatttgcattcatctggatttaaaaagataaaaaccagaagaatcatttcaggccatctagagaaagagattcccttggaaaaagtagttgtttcataaagaaagtaatatttacttcccagcttctgttaaattcaagaaaagcctttaagtgagcatctaaggaacgccaacccctcttctgcaaaatcaccagggaggctgatgttacacaggcctccagtgccacagaggtgggggccctcagacctctttgtcccatgactttgcccctgagtctttccctatcctgaaagcaggatctggagaacagaaatcagtggatgaaaattgccaagttgttcccaatgcacctgggtccctgaggcagcctgggtgccgctgctgagcatcctgcaggctcccagaggagcggggtcggagctccttcacagctcagtgtgtgtagaaaacgcagtcctctggtccatgttccctcctcacagcaaaaccaccagcacctctgtaatgctgtgttccctgcacaatcctgcaatatttttgtttatttacatacccgatgtccctggtggagtgaaagcaactgcatggagtgagcgccccaccaggtcccagagctccaagaaaatcctgcgaaaagtaagcatctcagacgaagccacagatggcccacctcggccgggtgaagttttaaatttggacaaacatgcaaccaagacggctcctgtggtgtcctggaggaagccgagctcagccctgcagaatgcatggtgtgtgggttccattagatttccatctggtgtctggagggcctagagaaagccaggagaggagaaggagcctgtgtttccctagagaggaccccgaggcctggctgggcagaggcttcatgcctggcactgcggcaggtcaggggctgtgtggcggcagaaggcatatcgtggctgtgtccgtggagctgcgccttccaagttaccaattccagtggggctgttcgcgtctgccaccaactttcctaagactgacctcgccagccgctcagaaagcagcgttcaccactatcggcgtgcgtgtgttaagctgacttgaccttgtctgcactgggtgtttccagatagtctgggagtgggtaggggagggcacctcactctgtgacccaggctggtctcgaactccttggcctcaagccatcctcccgcctcagcctcccacagtgctgagattacaggcgtgagccaccgcacctggctagaatcttgtttttcactcccagggagcattgaaacagagtagtcacaaaataaatgtttagaaaaaaatttaaaagttgcatatattactgtcgcaggattagtaattgtcactctactgtgaagcctttttatccccctcacttagacaaaaggcttgtgacctgaggcccttctctactgagtgattttctttcaaatcacagcatgcatagacactcagtatatcttttccgataaaattaggtatgtgttttcttcataccctgttgcaccaggaatcaaaatgtctgtatcactctcaggttccgtcgccctgaaaccttcaagttctgtcgccatgaaatcttgctgggtcttgtcactgctccacgggacaaaatgtgatgaacagaggtggttcgggtgccgcgcttctgagaggagtgacttgggtctcccggctgaggctgcgatgccactgcccgctgacggcccacttgccaggatgtcctggcctgaggacaccccaacggggaacagaggtcgaatgacgtgtggctgctcggagcctgttctccagagaaagctccttgttcgaggaaggtttctgacaccagaaatcattctggtttcttgtcagtaactggaggggaaaatccaaagcctttgttgctaagatacataacatccttccatggagagagggaaggagagagagggagagggagggaaggagagagagagggagagggagggaaggagagagggaggggagagagagggacacaggaagagatgcagagggagggagggaaaggggggagaggagggagagaaagggaggaaaggagggaaggggggagagagaaagagaaagggacatagggaaggaaagagagagggagagggagggtaagaaggggggagagggggagagaaagacaggaatagaaaaaagagggagggagggagagagggacggggagggagagagggacggggggagagggacagagggagggaaggagggagggaaagagcagggagagaagggggaagagagaggggagggaggtgggggaagagggcagagagggagaaagagaagggagggaggaagggaaggagagagagatttcaaagcagttttactcttcatgtggtctgttttagccccgtcctcctctgcctttcttcttgtgtgtgtttaaaagctattaatcagttttagaaagcaaatctctgcctctgttgtgagcatctcgatttttcttttgcattttcagggcattctcgctggaaaggctcagtcatgctggacaaactattataccagtggaagtctgtccagtttctgataaaaccaaaactaatttattttttgtttatcctccactacctttgacaaagcttcctctggagatgtgtatcttcattccccactcctttctatgtcatctctttttgttttgttttgcaactgacaaggggaaataaatctgacaccaacctcggaagatggtaatgcattcaaggcttttcttccctctcagatgtgataaaaatcttgcctaaaaccatgtccaaccttttcagcagaaagtccagatggctttgcagcctgtaaaacagactttactcactgatgcctctcggagtgtcggcagggcaatgtctttctcgcagcagaaatgcaaaacaaaagacagcatctgtggcttgcaggggggcgggggcatgggggagctgttggtcatctggaagtgcaaacaaagaaaaaacttagagcaagctcagaagagaacttcccatgaatgggaattccatcaggtgggctgcagggtgaggaggagatggatgaaaatcagctgcagtgggtacgagaatagatcatttgagatgaggaagaattcaacttttccaccattgaagatgagtgactgccgatagaatcagctctgtggtggccacatctctccatcggggtgtgcttgcagttctgttggagaaattccatttctgatgccagccatgtgcagatggctgaggctcacatgagcagtgtgtgtgcaagaacagaggcccaggaagacttgtgatgcctgggacctggcggggtgacgtggctcctcacttacccatcttcagtgtgaggatgaattcctcatttctgtcagccacagctgcacactctgagtgtgtgctgatgggcccttgactcacctgatggcgtttcaccttacagctggggaaactgattctcgaagaaggcagcagcccctcgcgttgtttgactgataaccaagcagagggttccagtgatgtcgaccctaggacttctccggctctgacatgactgtctcgcttcccccatccagcgatggtaaccgctgggtcacactgccttgcctttctgttatcttgcccccaacgtcaaagctttgctgagctcattattacacctgtgatggaattccagtcaagccatctccttccctgagttgaaaattgcttctcccctgatgccagccctaattagcgctacccaattctgacaacccatgtgcccacagcatggagtggtggctctcagccctgcctgcaaattgtattctcctggggagatttaaaaactgtcccctgccaaggccccgacctagaccaattgtgataggatgcctgggctggggccaggatgtctctgtttgtcaaagcagatttctgtgtgcagctggagtgcggagtcactggcagcaggtaagcagctggcttctgcgggaacggcccacatcctttcctggtgaaacatgttgaatatcttcattacgtgtgttcctctcacttcaggtgtggaaatgccggtgttccaggaaggccaggacaaggcctttctgtttgaggtcatggcgttatgtctggtgcagagctcgacatatgacgtttgtcgctgttggttggctgattgatggggcctggggagtgtgaatgtgacatgggatgtgggagagaaacatcagaggagctaaaagccaagaaatgaccttcaaggtgctgcaaaatcttgggaagagtgtgagagttcggtgcaggaagatatgctggggttacaggtatttacatcccaggcatgtgttgaagtggattgctgtgcacttttgacctctttaagtcatttaggtgataatcagatagaacataacaatttcaccaggaaatgttggggacaacatcagagatgtccgatgcaatttaggagaaagagtacaacggacagggaggacaagaggaccctgagtgccgctctctctggtggtgggagtctgggctctgagctgacgtgtgcgcctctgtttcttcaatgacctctcttgatacgattttggatctgcctctagaatcctgacttatttagagatcagaaatagcagaatgcatgaagggtctcattaagaatttttgctttttagaattacctaagtttaaaatacagaataatgataaatggttttattttattctttcaaaatatttttcagaaaataatctctaatatcattgaatatgggagaagtacagcttctttaagaccctgttgattcacagactgtagtaggaaaaggtggcctatgtgtggtgcagcagtaagctcttgctgtgtaatgaccatccccaagcgcaacggctcagtcagcaagcatttgctcctcactcaggagcctgtggttggactggggtggggtgatattgactggcctgtgcagcttggcttccagctgtgctgtggggtcaggcccgctccatgtgcaactccctttggatcagcccctctggagaccccttcctgtcatggtgctggcagatgtgccagggtccaagtccacctgctcaagtgaacttcaaacctctgcttattgggaccctccagtcccactggcctaagcaggatccacgtgtaagacaaacatgaatgggaggggaaagtatgttccctccacagaggagggagagaaggcgaatatttactgacctgtaatctaacccatctcaacagcttagtgtgtgcagactgtagaaaaatgtgaaggctccaggaagtctgtactaaagctttcattccccactgctggtctctcacagtagagatgctgcttaaccccattatcggaggacaggactgaaatggttattggctactgatgattccataacgtattctatgcttttccagacaactgccacattgagacacctaactggcggcagagaattgagggacaggcctggtgcatgggagtcttcctgtggtgctgtggagtacagaaggccaagtgctccatcacaaacgttgggggagggcagggggaaggggtcaggatggttgtctgcagctttgcctgggactctctgcatttagcatctttctatccacaacatatgtaatgaccccaaaactcctgggacacaatcaagtgtggaaaggaggaggccctgctgtctgtgttctaagctcaacaacataattggaaaatgggagagtagtttttagccaccctcatttctactgcaaaattcctttttcactcatccctttctccttccttactgccagaaaaaatacactccttctctgctcccagcctggctccttgctaagatgctcggtgctgtcctgcccgctgccttcagggcagtaacagtctgtcttttctaactcccatctctccagtattttatttgtgtaatctttcgtgttttccttttcttttcctcctatacaaaatacctatctaaacacaaacaaaaataagtatcctggattcaatagtatcctccaaatttaggtctacccagaacctcagagcataatgttatttggaaatagggtgtttgcagatgtgattagtaaaggatttagaaacgaaattatcctggccttagaggaagccctaaatccagggactggtgtctttatcgcagggaggaagggaggtgtagcccccgtcggccttgggtatggagggaggcgtagcccccgtcagccgtggttatggacccgcaggtgttatgtttcttcactgcaactgagccccattagctcaaagcttgccagagccaaactcaagtttttacacatccagttattttaaaaatagcccaaacaagcagatttttagccgttgaaatggtacctgcttggcattccctgtgaaaccttaccatagagctgttccccactgataaggtggggccttgtggttataagaccactggccgttcagaccccgaagagccctctgacccagagacccccgagggtggctgcgtggcatcgcctggacaaggagccccctctgaacccctcttcccagcagctcccttgccctcctctcctcttggaacagtcttaggccatgacagatgcccctgcatgcaaatctgtccaagcgccagcctcatacagcctgtgtgcgctcctgccaccggggggcacacctttttcctcggtaagccctgaaactcccccagtctagagacgcgggcacagccaggacagcagcagccatggaggcaggggctggagggatgcagccgcagcccggggcagaggatccccagccatggctggaggccaggagagagggtgggacagatgccccttagaatcagaaggaaccagccctgcccacacctggaggtcagctctggttccagagctttgagagaataaacttctgtcatttcagccacctgggtgtgctcacttgctgtagcggctgaggagctctcacaaacacagccttgctttccacttccctccctcctatttgagatagcaaaaaatggaccattctgtcatttattcatttcagaaacacacacattgtctccattgtgcctcccacatgccaggcagcaaacgaaacggacagagatctgtcattccgggagactaaaatgtagggagtagatgctattgaaaaaaataacacaagtttataaagacaaaatgaagtttctcacaatggctttgtaaacacagcttggggaaaacagccggctatgtttttatgtttttttgccaaggaaggttttttggagtggctggacttaagggtttccatggagtctgctctgggtgatcccgggggcacatcccagggctgagcagatgttgtctattgaaagtgaggttttcccttcacctaatttacagcctatatttgagatgctattgcgcttaaaacctaggcaggatggtatgcacaaaattcaccttgagggagcccagagaagacttcatagagacaggcagtagccaaactgaggcaaggaagggcctcttttttggaagaaacaggacacacgtggatggagaagacacatactgggctcaagcaggagctcccctcaagggcacgtgccccactgcagagtgcagtgcaatgctgccgactatcccatgtgcgacgggaattttttttttttttttttttttttttttttttttttttttttttttttttttagatttgcccaggctggagtgcagtggcacactcttggctcactgcagcctccacctctggggctcaagtgatcctctcactttagcctcccgagaagctaggaccactgacgtgcatcaccatgcccggttaagtttttatttttattttttgtagagatggggtttcactatggtgcccaggttggtcttgaacttctgggctcaagtgatccacctgccttggcctcccaaactgctgggatgacaggtgtgagccacagtgcccagccacaatgccatttttatttgatgttggataatgattctcccttatgatgatagtgaagccagctggaagacacatgctcttaaatgtcttgtgtgttaagaaggaaagcgtaagtgactaggagaccagatcacagggaccccagctaatctggggagtcacgaaggggccccagatggggaaacccacaagcagagcccggaaggcatcaggagcctgcctgcaaaagccaggaagtgcagaaccagtgtgcgtagagtgtgaggggcacctgcctcactgggggacgtggacgtggccacagccccagcctggactgcccctcacatgtcagcaggggtgtccttcccctgcccctggtgaagatctagcagactccaggcattagaaaattctagagtcactttaagtcgcaagcagtgactcctttggtgattttaagtgtgcagccccgtatgtcatccactagtttggacggtatgcaaatgagaactctgccctggctgatcgcctgtgtgagattctcagccctgaccacaggaggatgaggctgtgtcctgcagacctcatggggaagctgccctcccatcccacactggtgcacggcttggtgcagcagctttctgtaggacgtggagctaaggacatttcatccatcagactagggactcttctgcccctgggcttcgcctccttctgcttcctgacctcctgggttacgatgcagcagcagcctttggtttgggctcctgggcaaagagagggtcccacagtctggtcccctgtgcttccggaggccatgcggacaccctggcctcttccctgctctgtgtctccaagtgaataaagtgcagttgctacttgaatgtggctcattgtcctaacggccacttcacgcctggccatcaaccacatgctggagttacctacctcaccaggggggcccggtggaggaccctggaggcagaggtccttttccttggttccccaccatcctggccgtacccaccacacttgtctcatctcgcagggatgagattttcccactctgccctccagctgtttaaagatccttccctgttttggtgcttttgggatttttaaaaataaaaactatcatagttgcctcttaagtagtctctctgcttctcatctgtcttccttccaaacccttttagccttgctggtggcttaagttttctcacatgcaggtataatggcatctacagatggatgcccattgaaggctgccctcgcagcagggatggttcttccacatcccctcctgttcctacagtgacggctgctcccagcctctcacaccacaccacacagccaggctgatgccagctccacgccccccacaccacctctccttggggcacccccacgcctctcctcctgacattgctgggctcacacagacacctcctcctccactaatcaattccccccatgtgtgctcctataacacttaaaaatatctttcctatgttactcatgacacggtataatttgttcattcgttcaatgaatatttactgaagacctgttcaaaatgcttctttagctgcctccctgagcatagcaattgtatcttcctcattttaaaattcctcgtgggcttcatagatgctcagtaaatattcactgaaaagggatttggatttaaaatcaaaacatacagatgtgaatctgctgccatgcactgtctggctgtgggcaatcatttaccctgctcttggaggcttgtttttctcatccatgagatattacaaccccacttgttctttcaccttgatgtggtcactatgccaaaagagaggacatgtaggccaaggtgcttagaagataaagcaatatgcaatgtaagatgctgctgtgattgtcagggttgtgacatgcttctgggatcagtgatcaaggagctgaattggccctggtgtccactctattgccggaccgtggtgtcatctcccacttaaaaaccactggttctgagaggaattgaccaaatacagggcacataagcactggtcagaaagctcactcctcttggtaaaatactgaggaattacggaacgctttcttgtctcttcagttatggtactgatgataaaatcgtggcacagggatttaacaggtccacacggttatggactctgtgcgtgctaattttaaagataacaagataaaatgtttacttaattccgttaaaaataaaatacagaagtgacttaactgctgaatgttcatagagatgagaaaaattaagtggccaagcaaaagtcatcaactctggttaccaccaacagagggggatagcagcctttgatatggggataggcttgaacaggtgaattttagaacctaaatagattataaatggaagtgcttacatacattattgaaaatgaaacccatcaaaatattgaatatcaatcaatgcccaatataaaaccgttaagaaaatcaaccttaaacagaaaactttcttttcttgatgcttctctcttctctctctctctctgtccctccattcctccctccttccctccctcttcagggttcattaatttggctgattaaatactagggtgactgcttaggatttagagtaaagaccaggcatccctgagaaatcattatggatttcttgtggtttatttcctgtcattgaattttgtgctaacacctctggtataatcctgccaagtagctaatttttaacaaatagactatattttaaagcagttttaagttcaaagcaaaactgggcagaagctacagagatgttccctgtacctgctgcctccacacatgcacctgctcctctattatcaaagtccccacaattggtgaccttacagtgacacatcactaccacctggagcccacggttcacaggagggctcactctggtgttgtgcactgcatgggtttgacaaatgtataaaatgtatctcccatctagggaggagccaagatggccgaataggaacagctccagtctacagctcccagcctgagcgacgcagaagacgggtgatttctgcatttccatctgaggtaccaggttcatctcactagggagtgccagacagtgggtgcaggtcagtgggtgcgcacaccgtgcgcgagccgaagcagggcgaggcattgcctcacttgggaagcgcaaggggtcagggagttccctttcctaatcaaagaaaggggtgacggacggcacctggaaaatccggtcactcccacctgaatactgcgcttttccgacgggcttaaaaaacggcgcaccacgagattatatcccacacctggctcggagggtcctaccccacggagtctcgctgattgctagcacagcagtctgagatcaaactgcaaggcggcagcgagcctgggggaggggcgcccaccattggccaggcttgcttaggtaaacaaagcagccgggaagctcgaactgggtggagcccaccacagctcaaggaggcctgcgtgcctctgtaggctccacctctgggggcagggcacagacaaacaaaaagacagcagtaacctctgcagacttaaatgtccctgtctgacagctttgaagagagcaggggttctcccagtatgcagctggagatctgagaacgggcagactgcctcctcaagtgggtccctgacccctgacccctgagcagcctaactgggaggcaccctccagcaggggcacactgacacctcacactacagggtactccaacagacctgcagctgagggtcctgtctgttagaaggaaaactaacaaacagaaaggacatccacaccaaaaacccatctgtacatcaccatcatcaaagaccaaaagtagataaaaccacaaagatggggaaaaaacagaacagaaaaactggaaactctaaaaatcagagcgcctctcctcctccaaaggaacacagctcctcaccagcaacggaacaaagctggacggagaatgactttgactagctgagagaagaaggcttcagacgatcaaattactctgagctacgggaggacattcaaaccaaaggcaaagaagttgaaaactttgaaaaaaatttagaagaatttgtaactagaataaccaatacagagaagtgcttaaaggagctgatagagctgaaaaccaaggctcgagaactacgtgaagaatgcagaagcctcaggagccgatgcgatcaactggaagaaagggtatcagcaatggaagatgaaatgaatgaaatgaagcgagaaggaaagtttagagaaaaaagaataaaaagaaatgagcaaagcctccaagaaatatgggactatgtgaaaagaccaaatctacatctgattggtgtacctgaaagtgatggggagaatggaaccaagttggaaaacactctgcaggatattatccaggagaatttccccaatctagcaaggcaggccaacgttcagattcgggaaatacagagaatgccacaaagatactcctcaagaagagcaactccaagacacataattgtcagattcaccaaagttgaaatgaaggaaaaaatgttaagggcagccagagagaagggtcgggttaccctcaaagggaagcccatcagactaacagctgatctctcggcagaaaccctacaagccagaagagagtggggaccaatattcaacattcttaaaagaattttcaacccagaatttcatatccagccaaactaagcttcataagtgaaggagaaataaaatactttacagacaagcaaatgctgagagattttgtcaccaccaggcctgccctaaaagagctcctggaggaagcactaaacatggaaaggaacaaccggtaccagccactgcaaaatcatgccaaaatgtaaagaccattgagactaggaagaaactgcatcaactaatgagcaaaataaccagctaacatcataatgacaggatcaaattcacacataacactattaactttaaatgtaaatggactaaatgctccaattaaaagacacagactggcaaattggataaagagtcaagacccatcagtgtgctgtattcaggaaacccatctcatgtgcagagacacacataggctcaaaataaagggatggaggaagatctaccaagcaaatggaaaacaaaaaaaggcaagggttgcaatcctagtctctgataaaacagcctttaaaccaacaaagatcaaaagagacaaagaaggccattacataatggtaaagggatcaattcaacaagaagagctaactatcctaaatatatatgcacccaatacaggagcacccagattcataaagcaagtcctgagtgacctacaaagagacttagactcccacacattaataatgggagactttaacaccccactgtcaacattagacagatcaaggagacagaaagtcaacaaggatacccaggaattaaactcagctctgcaacaagcagacctaatagacatctacagaactctccaccccaaatcaacagaatatacattttttttcagcaccacaccacacctattccaaaattgaccacatacttggaagtaaagctctcctcagcaaatgtaaaagaacagacattataacaaactatctctcagaccacagtgcaatcaaactagaactcaggattaagaatctcactcaaaaccgctcaactacatggaaactgaacaacctgctcctgaatgactactgggtacataacgaaatgaaggcagaaataaagatgttctttgaaaccaatgagaacaaagacccaacataccagaatctctgggacgcattcaaagcagtgtgtagagggaaatttatagcactaaatgcccacaagagaaagcaggaaagatccaaaattgacaccctaacatcacaattaaaagaactagaaaagcaagagcaaacacattcaaaagctagcagaaggcaagaaataacaagctagcagaaggcaagaaataactaaaatcagagcagaactgaaggaaagagagacacaaaaaacccttcaaaaaattaatgaatccaggagctggttttttgaaaggatcaacaaaattgatagaccactagcaagactaataaagaaaaaaagagagaagaatcaaatagacgcaataaaaaatgataaaggggatatcaccactgatcccacagaaatacaaactaccatcagagaataatacaaacacctctacgcaaataaactagaaaatctagaagaaatggataaattcctcgacacatacatcctcccaagactaaaccaggaagaagttgaatctctgaatagaccagtaacaggatctgaaattggggcaataatcaatagtttaccaaccaaaaagagtccaggaccagatggattcacagccgaattctaccagaggtacaaggaggaactggtaccattccttctgaaactattccaatcaatagaaaaagagagaatcctccctaactcattttaggaggccagcatcattctgataccaaagcctggcagagacacaaccaaaaaagagaattttagaccaatatccttgatgaacattgatgcaaaaatcctcaataaaatactggcaaaccgaatccagcagcacatcaaaaagcttatccaccatgatcaagtgggcttcatccctgggatgcaaggctggttcaacatacgaaaatcaataaatgtaatccagcatataaacagagccaaagacaaacaccacatgattatctcaatagatgcagaaaaggcctttgacaaaattcaacaacccttcatgctaaaaactctcaataaattaggtattgatgggacatatttcaaaataataagagctatctatgacaaacccacagccaatatcctactgaatgggcaaaaactggaagcattccctttgaaaactggcacaagacagtgagagggatgccctatctcaccactcctattcaacatagtgttggaagttctggccagtgcaattaggcaggagaaggaaataaagggtattcaattaggaaaagaggaagtcaaattgtccctgtttgcagatgacatgattgtatatctagaaaaccccattgtctcagcccaaaatctccttaagctgataagcaacttcagcaaagtctcaggatacaaaatcaatgtacaaaaatcacaagcattcctatacaccaacaacagacaaacagagagccaaatcatgagtgaactcccattcacaattgcttcaaagacaataaaatacctaggaatccaacttacaagggatgtgaaggacctcttcaaggagaactacaaaccactgctcaaggaaatgaaagaggatacaaacaaatggaagaacattccatgctcatgggtaggaagaatcaatatcgtgaaaatggccatactgcccaaggtaatttgcagattcaatgccatccccatcaagctaccaatgcctgtcttcacagaattggaaaaaactactttaaagttcatatggaaccaaaaaagagcccgcatcgctaagtcaatcctaagccaaaagaacaaagctggaggcatcacactacctgacttcaaactatactacaaagctacagtaaccaaaacagcatggtactggtaccaaaacagcatggtactggtaccaaaacagagatatagatcaatggaacagaacagagccgtcagaaataacgccgcatatctacaactatctgatctttgacaaacctgacaaaaacaggcaatggggaaaggattccctatttaataaatggtgctgggaaaactagctagccatatgtagaaagctgaaactggatcccttccttacaccttatacaaaaatcaattcaagatggattaaagacttaaacgttagacctaaaaccataaaaaccctagaagaaaacctaggcattaccattcaggacataggcatgggcaaggacttcatgtctaaaacaccaaaagcaatggcaacaaaagacaaaattgacaaatgggatctaattaaactaaagagcttctgcacagcaaaagaaactaccatcagagtgaacaggcaacctacaaaatgggagaaaattttcgcaacctacgcatctgacaaagggctaatatccagaatctacaatgaactcaaacaaatttacaagaaaaaaacaaccccattcaaaaagtgggcgaaggatatgaacaaacacttctcaaaagaagacatttatgcagccaaaaaacacatgaaaaaatgctcaccatcactggctatcagagaaatgcaaatcaaagccacaatgagataccatctcacaccagttagaatggcaatcattaaaaagtcaggaaacaacaggtgctggagaggatgtggagaaataggaacacttttacactgttggtgggactgtaaactagttcaaccattgtggaagtcagtgtggtcattcctcagggatctagaactagaaataccatttgacccagccatcccattactgggtatatacccaaaggactataaatcatgctgctataaagacacctgcacacgtatgtttattgtggcattattcacaatagcaaagacttggaaccaacccaaatgtccaataatgatagactggattaagaaaatgtggcacatatataccatggaatactatgcagccatgaaaaatgacgagttcatgtcctttgtagggacatggatgaaattggaaatcatcattctcagtaaactatcgcaagaacaaaaaaccaaacaccgcatattctcactcataggtgggaattgaacaatgagatcacatggacacaggaaggggaacatcacactctggggactgtcgtggggtggggggaggggggagggatagcattgggagatatacctaatgctagatgacaagttagtgggtgcagcacaccagcatggcacatgtatacatatgtaactaacctgcacaatgtgcacatgtaccctaaaacttaaagtataataaaaaaaataaattaaaaaaaaaaagtatctcccactgtagtacacacagagcagtttccctgccctaaaatcccctgtgctccacctactcagccctccttcctccagctcctggtagcccctgatcattccactgtctccatggtcttgccttttccagaatgtcctgtagatggaatcatacaacatgtatgctttctggatggacttatttcactcagcaatatgcatttatgtttcctccctgtcttccttctttgtaatgctgactcatattccattttctggatggatgagagtttgtgtatccactggcttactgaagggcgttttcgttgctttcatgttttggcaactatgataaagctactataaacatccatgtgccttttttctgtgtggacacaaattttcaattcatctgggtaaagaccaaggagtgtgattgctgaaccatatggtcagagtatgtttagtttcataagaaaatgccacgctgtcttccacagtgggtgcaccattttgcactcccaccagcagcgactgaatttcctgttgctccacaccctcactggcatttggtggtgtcagtgttctgggttttggtactggtatcttagcattgctttaatttgcatttccaggtagctaattttccatcatataatttatttttgtgggtgattagcaggtcagggagctctttaacacagactacctctatttctattttttttagaaaggacaggataaatagagcatggaatgcacatttttctctagcactttattttctcagctggaaaagtgttggagaagtggttttctaggataaacagatgcagtttcttataaagttgattttggcaatgatcaaattccatcagattcctaagatttcctacaggggaaaagtccccaaaaaggcaatgatttttttataaaattcagttctttaactgatggatatttagactaaccgaagtccatgcctctgacagcaaaccacacagacatttttgtgtgttgggttgtaggaatttgcacttgaaggaatgatatttgggacatgtctgaggttgcctctagggggttcaagactccatacccagagggtgactgataaacattgcctgtcatgttgggtattgagcaccaaacttcatccagaaagaaatgtgccattgctggacagtgtaagattgcctctcagcggatcctgactctttggtctgaatctcaccccatgcctatagaccaaaatcctccatgccgactgtggccttgtcattgtggaaagtgccttttcagccgggcatgcactggcagcgctccctgggatacacgaggcctgtctagtgggccagggctggctcctaggttggggattctgcaagacctgtgagtggtcctgggaagtccggtggctaccactgggatgtttgtttctggcttaggtttaatatttgaaaagttttgtgaaatgtgccaggacggattattatcattccaacaacagaaatttcagcataattacatgttaacatttcccctaagcacaagcctccctggttcagggcctggcaaggcaggatgagccactaggctctggtcttcagatcctagaatccaggctggtggggctggagaagtcagccctggattttgatgggagggaggggctctctggggtgtggcccatctccctcatgaagcactgcaacctctccacttcccatttgctgctctcccggcccctattttaattcaggacattactgagattcccttcagttcccagcctctgcagctgtgtggactgccacctgcgggcacacctggggccgcatcattccacctggaatctccgtcttcagcgtcttccatccctgagattccagtttcatttcatcctttgtttccatgctctctgggtcttcatgtgtttcctttaacttctatccttcattctccaatttcatctgcttctcagtgcttgatttcaccaaagtctctatgatttcctgctgctttgtttattaagtcactcatcagatgttgaatggggcctattttggaccgagcactgtgccaggtgctgctgtcacactgagtgagcagtctgaaggtgtttgcatttacgcagaggtacaacttctgacttccaccatgcctggcactgagagacactcccagatgttaaaatattcaccagtcctggagaagcagctggcactgaggctcagcactcctgctaacctacgaagatgttggaatcaatgagaaaaacttcattgactctgaataacattccttcattgactctgaataacattccttcattgactctgaataacattccttggatgaaagaaaaacagaggaagaagagataagaatccatctaaacctactttctaagccctggaggccccagaagtgaaagtcctcaaacacaaattattttactaatttactgagcagacatttctggagagcccactcggtgctgggcactgttgcaggcatgggggtagtgatggggtgacagtggaggctgctgcgctccagtcgggactaggtcctcacggtacctctggaggggatctctgtggttgggacggggataagtggagaggggaggaggctctccaggcccctggcgcctcaatctcctgtcccgtttcactctgactctcgtttccccaaggaagaggcagggaaagaggagacaggattgtaaagacaaggagtagttttcagtaacttggattaaaaataagttgaggttaaaggttgaacttagtgacaatattttgacctacaagaatgcaaattacgtatatttcaacttaatagctaaaatgtgtgttttggagtaaatgtggatttcgattattcacatgatgttgccactggtctgccacaatctagatctggctataggcaaatgaagactgagacagcctcagtagctccagagctgggcagcatggagccgtgaagaccaatgctcatgggggtcactcaggagacctgactatagatccaagtgttgcctttaaacagttgtgtgatctcaagcaaacctcatttctccttccatggggaatggtgggcacaccagctccatgctggtgccggtcctgtcccctgccacacatgactgagtgcccacaccaggcacttgtggtgctgctgatggcattacttttgtttctggtgtcagttttgtttaggcttttggggaggaaaaagcctaacaaaaggctttccaggagcagggaatggctggggcccatgtgaagcgtctcctggtttggtaacaggtgcgatccttcagatgctccccaaacatctctaataaatgcttagtgggttcttccgggaaatgaaaaaaaaagacacctgacgttgttgtttaatatctgagtacacctgcatcttccatgttcagatactctgaactcagaggataggtgaagacctggccaaggcgcctagagtgtccccctgcctgctccatagagaccccaccacacagatgaagaccctgagtgaggagaaagcctgcaaagctcctcaaccctcccctcagctctgtcagccctgggttccagcaaagaccttgcttcttctgtctcccactgggacccctgtcactgctacctggatgcttgttcctcaagctggcacccgagctaccatctccgccctatgatgatggaagcttagttaaatgaagctctttctggagccaatgggctggatcttaagcctcccggagaatgtgagtgtaatttaggaaagtggaaggaatgattgagtctgtgtcctaatccctgagagtctgtactcactgaagtgagcagcctaatcctcctggtacctgcggactcaggatggaatctttaattaccagagtctcatttctgcttcacgagcactaccggagtagcatctgtcgctcaaataaactcatgtgaaaataaagtattaaaatcaataattcagcttggaggtgaaatggaacagaaaaataactttctggcttgcagtgtcctggatttgcaggcggcaagtttcactgactcttgcttctccctctccttggagcatgcgaaccttggtgggtgctggctggcctgcaccagagatgcagtgggggatgcagcttccaccagggtgtgggggatgcactttctggaagaaagggcaacagccataccttcttccagcagctcctgtggccacctccaggtcagagtgagcccccggcaggccccaggctggctctgaggctgatgcagcaggttcagttattctgctgtggcctgaatgtgagtttctcttcacttcatcacattttggcttcaacactgaacagatttcaaagaccacctgaagttccctgtctccaggacgtctctcctgatttctcatttctggagtgattgtgaagagagccaagtttaccagttgtttataatttcactccaggtgcggtgataagcatgcacatctccctttggctgtcacagtaaccctttgaggtaggcgctgccacgtttcccatttagaggggaggaaaaagacgcagggaggtgaggcacctgcccaacccgcatgggcaggtgggaaccagggtccaaacctggccttcctttcctgcctatctttcctctgcggaggtgtcactgccatgctgcacacagctgccatgcagtgctctgttccagatgcctgtgcctgtgacccctctgcccatgaggctgggcacagccactgctgcactgagcttttgtgtcttccattttgtgtgtttcgccatctttttatagatggtgggggatggagtggacacaagagggcggcaggagaggggtgggaagatgtgatcttggggttttctcaccatttcacctgaccagaggccagaacgtcatttggaattcttcggcctttacatccaatgatacagttggggccgttcatccattcctcaacaagcatctgctgaaggcctggtgagagccaggaaccagccgtggagtggggtgggagtgcccaggtgagtccagggtctcagggtcttatctgtgtgggggagggcccattgggggacagctttggggagaagggtgaagggggatgggccctgagtgcctctgaagtgactcagagctgtggcctgaacttctgaaagatgccccttccacctgtcccccatcgccactccttgggccttccacagccaggggtgtcctgctgcctgccagggggtccccacagtggatgacagatggcagaatgttcatgaggcctcactgagtgccaggcactgggaactaagtggtggaactgggactgcccattccaaaatgtgtctctgccattcacgagcgactgtccctttcaagtgtgggccaattgtagtgacaagagtccctgctcacagaaagcaccaatgcttccacagcagagccagccactgtgaggcaccacctcctgggataacaggggaaacacaactaaaacagggcacagggttacctctgcccagccaagatggtttcctgcccttggttagagggagggtgggagaacgacagtggccccacacaccacagagatgacacctgcacacccatccgagttaatcgaggggccttgcttgcacagtgcaaacttccattgtgcagaggtttcacagaaacatgcttgcatcaaccttccttctgaggttgtatggactcccaaattcctgtggctgtgggtcctgcctcccagcgtcctcctgcagccagctggcaatgccaaacacccacaccatgtcttttgctaactagtaatatttctgaaactcgctatgtctgaaaaccagtcacttggaacattctgcagggcaatctccagcctccactcttgaggaaggagaggcagttgtggaagccacacagcccgtgccacagctcaggagccctgtggacctgaggctcggagacatcggccctggccttaggacctactcacttaggaatctcacattctggattcttattttgaactctgtcttcccattgctctaggaaccatcataatcattttgaaaaccaccaagaggagagctgccaaccatcaacacctgctccccagcagagctgaggtttctctgcagccgcctccctttcagtaaggacatctcccctcgcaggtcaccagccctgcccacagctggactctacttgccccgtcctcctaggaagtcccttatgagaagcaaagccagacagactatagctgggggccctaagtcagcagacgggccctgccctccctggtctgcccctgcagccagtccttcctcctcctcctcctcctcctcctggtccacctcttccttcccacatcggcccttccacggccagtgcccctccatcctccccactgcccggcctccagggagacctcttcccacacttgccctggccttccggccgcttctgacccacgtgacagacctgagcttagggtttcgcaggagggtctcaaatacggcatgcgaaggtgcagagctgagtctgaggtgcccaagatgtgatgatagtctgccaaccacctgacgggagaggggcccctgagagcatctctgttagacacgacccaaacagaagcaacaaaagtgctcccggatgtctgaaagcttcagcggctctccaggaggaacatggcctcggatgcctgcacctgggctgctctgaacactgtggggttcagagtgaactcaaggccctgtctggccttagatatttcactgttggtgcaaaattccccagaatttattttattatcctaatgggaacagggaagttcacgcagagggtgtcagccgcactctccaccccttcctgatcatcacccttctcacggagagaagccgccccgaggttccaacatgacgaagtagcgtacagttaaggggtcctgggcagggagccctgagttcctctccccaccgagtctctctgggagtttgggaaagtggtcaggaggggaggccagggatgatttgagttggtgcagactcttcttcccctcagcggggtgggggcttgcagggagagatcaggaggcagctccggaagagccgagccaggcaccaggtgctgcaggtgacagggtgagggtctgcaggggctcctgggcctctgcatcagccccagccagcgcacatggcttccaaggtttccgccttcattgattgctgctggggcacccagcacggctgagtgagcgcaaagcgtcctgagcgtggcgtttggcatggctgatgtttccaagcctcccagcaagccatacatcatgaaatattgatatggttccactagactgctgcacctgacatttgatttatagctttaggtgttcttttttaattctaaacagtcaatgagggatcaaaggaaatgtcatatttgtagggctcaagctcagaggggctcctcggaagccaggaagggaggtgccgtggttgctcccacaatgggccctaccctggcctcccagggaggggctttgaggggcccctatgcaggtgaagacgccccttccctatgccccagcatctcaaatatttaccacgttaaatatcagcctccagaatattgccttcatttaagcttttcacgttccaatgattttttattatttccatcgaccaaaataaatgaagaaaatgttttagactacacttgaaagcatgtaaaaatcaataactggattttaaaagatttaaaatgtcttgaatacattcattttcaaacattttcctctgatctttaaatagcttttcttggagcataacagttttttgaaaagtcaaatatggagcattaagggtataattaccattttaattataactcaatcatcctatctgctttgcatagaaattaaggcttttatgtcaggattttgggcactcacaaatgttcaggagcaattaatgttaaaagtttaatttttttaaagactgagtgtgaactttgcagttcttaatttccttcttgctcagatggggcagcagagatgctcccacttgccgtttaatttttgaagcgagttcatttccccttccgagtcagctcccacatccctgtgacaggcggcgtcacacagcagggaagggagtggatggtgccaggctgctgggcttgggccctgctctgccgtggtgatggcggcttccctgagtccaggctcgcctcacccagcttcctcacccataacgtggccttgtcgcagcccttgccttgtggggttgctgcaggactcctgtgagtggcaacgtgcaaggtgctgatggcagtgtcggccacggtgcatgccctgtgctggcctcattattttccagagtcccctttttggtttgatctaaaataatcccagtcattctgggagtcattggttttcctcctacccggaataggattgtttaaaaaatggtacaaccgtaaatcttatgtattcagagcagtacttattagatcacaaaacagcacaaagccctgagaatctcgcagaagcagggccctctattgctgtgccctccccacaccccatgtgcactggcctggctataaagtgacaaggctgctttcaaagtctttattttgcattaatgaaaatgccatttggctaaaacttaactagattttcattgaattttgccctgagaaggaaatactaaaatgatagattttcccattgtttttccgcgaatgagtaatgtgcttagctcctcactccggaggcataaggttgcagttttgtgtgcgtgtgtctgtgcatgcttgtatgcaaaacgcagcctggacatttttctcccagttaaagccccggtctaagatctggtccatttcctcttgagctgccactgctcaggctggaaggaaaaatcatttttatgggcactgccgtggcaaaataaaataattccatttttagaaaggctgtggcgtaggcccctcccttcctgtatgtttttgctgacagccttgctctgcttcacttttagccgatttttatgttttttagttccctcacttgtgcttaaagtcttacttatattagaaaaaaatgaatggaggcaggcagacataatttaaaaataattattatgccgtatcttctataccttgtaccagataatgttccctgagacttaatcactgaatatcacttacataatcaggcataatcccaagtgtaattacaaaacatcccataatctccacgagcctgacaggcatagtcgattgtcttcgtaagttgttgtacggatttttctagaacactgagggtttcacataattttttaatttttggtgaagggaaattattaaacatttaagtgaacatgatttagttttgatggctctgggagagtcttatataaacaagatcacttctgggaagacatccctttcttaggcgctatcttctggtttgggtttggtgcaggagttggcaatgtttttggggtaagtccaattccctgatgttgctggtgcatccatctgcctctctcactccttgggcagtactgagggctccgtgcccctgggtcccccaaaagcccatcagcagggggcacaggcaggggtaggcctgggggggggtgggtcagtttgtgtggctctggtctctgtgggccggccacgcccctccattgggggcccagcttgtaggggtggctggacacatggctgcctctctgcaccccagccttcccgtcttgagcttggtacccatcccgtcacttccctaaagcctgcctactccctaccagtgcccctttactcgaccctccctcaatccccggtgtgagtgccaggtaactgctggaccctgatctataaaaacactaacattaggagaaggccctgtctcctctgactgggtgtgaagtgttggccactcataaacctgcattctgcatagctgggcaatttaagatggtgaagaatatactatacttttgttagacactgtaaaatctatgtcagtttctgctacttattattagtttcacagtaacacaatcaatcaaataaaacagcaaaaaatccacccacagagaagcgtgtagtcacaggtgacggatcctgtaacaggaacgtggtaaagcccatcatggtatgatttggtaccatttgtttatttttgcaacctcttacagcccataagatactagaagctccctttaaattcaaacactgacagctccctgcagaatttgagaaccatgcaggagtgagagagatcatgggctgggccggagggatgtgggaaagccagaccatttgctagaaacaagcagtaccatttgcactcctggtgtggggagtggtttggattcatttacttattattcatccatgcctttgtggatttctcagtgcacacatcatcgcagagtgctggggttcagattccacctgatctctctgggcactgctgtcctcgtgtacaagtggggcaacaatacttgctcattcaactcagcattgatacaaaggctgctcgagactgtgtttgggaatgccttctgtgacctctaaagtgttgtcaaagtataatttgtccctgtcagaaggaatatcggggagtgtgggaatctctcgttactgtgttggccacagttggaataatctagttcccacatctccactggagaaagcatctctcagatcacaccccacaaattcccgtggtgggtaaagggtctgccagcctccagacaggcatctgttccagcagaaaatgacccagggtagatggaccgtgctccaaaggcttatgaatgtggccagcggccttaatttctgtcgtctgcttataactccatccaaaatcctggctggagatgataaaaaaagattcaaggagctcagagtaagtgggacatgtgacctgctcagatgctgacccatgccacattgtgacagtgacgaaaacagagtgaagaataaggccagatctataggatggggctggtgtcttaggaacagacttccttacacacagagatacagcatatagtataagagcagggacaccccaaaacaatgaggaagtaagttcagtaaaggtttctaggccgactgtcacaagaaagcatgatcttgcctgtggatcatacctcaagatgtattatgggtaggtagaataaaacagaaaaatagcacagaagagcaaacatgaatgtttaccaaacttcctgggggtgggtggagaagatctttcaaagcataaaagcagaaggataagtcatacagctgacagatagatcacctggaaattaaaattttctctgtatcaaaaaccctccatcataatcaaaataaaaagcaaaataaaagacatattcagataatagctatggattagcaagatctcaaacaaaatgattataatcacatcttggttgataagaactcattgcacaaattcctcttatatcagaacttgaaaagagtctattccatgacgaatggatagctggcatttttccttctacagagtgttggggactatgcaatgcatgtttccctctttgtcttgaatgccaaggcattctgtgccctgtccgagtacctaccttagcttgtacttacttcctggaacatgacttctgggaattagacagtataaatgtaatgatgtagctgaatgcctggctagttagagagtcgccatgttgtcttttccttatgaatataaatatttcctttgtatggattcccagcagtgggactactggaccaatatgtgtaaacgtttctaaagtttttggtgtgtattgccaaattgttttgtgcaaggtgcagcccaccagcagtgtgtgcacataacactatcctcaccctctacagcattggggctatgctcatgtagaccaggcctcagctcacctcttactactcccttcccattcctcattccagcatcttcacatcttgcctccatcctcagactcacagtggcctccagccgcccaaccactcccattcaaatggaaagcatgcattgaagttgagtccctcccatgaggctggtaggatgcttcttgccattctggtgtcccatgatgtgctatggagaatggagtgagtctcaataaacatcattgtctttaacatagcaaagtagggctccccaaaagtatgtgaattttaaaagggtgaaggcagtgatttgtccaactagatcatccagatttagggtctggtatctagcatctttcaaatcacaccatgtagatgtcactttgattttaggggtgttgggcttactgaggaggccagtatctgagctcaggcaagacctcaatttcacgtcttagggtatctccttggtgaaggcaaagtgccccctctcaggctaagaaaaaccattggaccatggtgtatcagatagttcttagtcataatatatacaaatttaacaactatctgcaaagtgagaatttttccacaatgaattatttggtagctttggtgttgattttatagctgtccttctgccagagaacagcgatgctgagatttgctgtcagtctgttggtcctatttttctataatgagagatgatgtggtgagctacaaaataagagacagatgataaaataattccttaagaaaaaaatattagaatacaatgggccggcaggcaaatgataaaatgcctctttcctgttttttaagcactgtaataaaacattttggaggtggggcattgtggatgtgcagtgccgtattgtaattgtaaacagaaatgaactggcccagattcagagcctgtggcagcacagggtcattgggattcattgttcagtgggaacatattttactgtgaaatgttctgatgacattagaatgtaaagttcctacaacctaaacaacaggtttcattctgacttccatctgtcatactgaggtaccatatgactctgtagttaaaaaccagtataaataatttggaacccaaatccatcccattggctctttatagttctccccatatgatggtgtcatacagatctctcctcctacacactttgcagaagcactgtccaaatcttgcctcatggaaatcacctcttctctcttgcagagagcaagcccatgatgttgtcctcatccggaagatccctgcctatcctgcctgaaaacagcccattgagagcaaaggtgactgcactgcctgccatcctcagatacagaagtatgctactaacttttaattttaattttttagagacagggtcttcctgtctcccaggctggagtgcagtgacacgatcctagctcacagcagctttgaactcctgggctcaagtgatcctcccgcctcagcctcctgactagctgggactaaaagtgctcatcactgcgccctgctaatattttcaaatttttttgtagagatgggggtctcattatgttgcccaggctggtctcaaattccctgccttaaacaatcctctcatctcagcctcccaaagcgctgggattagaggtgtgagccaccgtgctactgatgctactattttaatatcctccttctcttaaacaaatcatcatactctgttccagggagaatttcccagctacgagggcttttgtctaggttgaaaatggcatgggttggtaagccctgtactctaatgtagaaggaaggaggctaagtaggttccatggacatcattcctgcctgtgggcatgtgtgtcccacagctgattgggaaggggaagagagaggaagggagcatgaatgagaaggggaggagagaggctctgggggaggactttgggttctcggtgagggatgagagccacagaagacacagaaatgctccctctgcattgtttccatcctgcctcctcctccctcctctgaccacccagccctggactcaggagacaccagttggtacctggtgatatttctaaataactcagggcagagaaactgcaggattcaacattcctggctgtgtttttaatgaagcccttgaagcttggtgagaggtgatgggagagatggatataatttcggatgggcactttctgttggtagaaaggactcagcccatttgttaagaaccttgtcttgggaactattttgtctttttcaaaaaactcagtataggatggaagaaaaagcccaggcttcagagcaaggtggactctagtttaaattcaaatgctgctctgaccttctgtctctctccttgtacttcttctaattctccaaactgagtatttgagttagatttcttcatgacttactacagaggtctttggtttaggcaatgtggcaattaatctaggtagtttagggagatttaccagattggagaatgatgagaaaagaagagatgatacctatgaggctaatattgaggaaggagaatacaatattaacaaaacaggcaagggaatttaagccatttggtcatttggagccattaagtgaaggaaaaatggaaaattgacagatcataagagccactggcacatcacccactgtaatacaatattatcttctatgtccagaagaatggaaagtctagaaaaaaatgttatactcgatacactctattcaagaagaaaaggtatggcatttataattatttctacccaagttacttaaggaaaaaacatttggcattaagtgtataattttaaattatttcaaaattcaagttaatgtaattgctctctttttcatgatgtacataaataagatggcatcagtagcccatacttggaacagatttgattcaactttctgtaccacatttggcaccaggagaaagctgacactaccctgatacacttactacaatggtgttattagaatcaggaaaacagtacccttctttggttggttagtggaaagtttttaaaaagtatatcagaatttcaaaaagtattgaaggttaataaaggaggaaagccctttttgttttgtgaaatgaattaacacagtaatacattcagaactgcatctgaatctgaggaagtctatctaaattttagttaatattgtcatcatcctctttatcatacttcacagattctatgggatactttgaaattgtaaaaaaaaaaaaaaaaaacactgttaggatatgtatgacgaaaattacaaaatgctgacaaaaaaatcaaagaagacctaaattaatagagagacatgccgtattcacagattggaagactgaaatagaagaaatgtcaattattccaaaattgacctatagtgtggtgcaattcttaacaaaataccagcaaatattttgtagacatagacaagcttattctaaaatatgtatataaatgtttaagtcctagaataactgaaatgccaactttaagaaaaaggagaataaagtggaaggaatcactctactgaatattaaggtttactctatagctatagtaattgatcatgtgatgttggtggatggacggatgcatgggtccatagagcagaatagagaacccagtaaaggtacaaaggtaattcagtggaggaaacacagccttaaaaaaaaaagtaaactgtaaatcccacatctccatgtcttatacaaaatcttacacaaaagtaactcaaagtagaccacagacgtaaactataaaacttttaggaaaaaataaaggagaaaatctttgggatctagagcaagatgaagatatcttagattcaataccaaaagcaccatccataaaaggaaaaatggaagaaatggatttcatcaaaatggaaagctttcattctgtgaaagattgccttaaagggatgaacaacaagccataaactgcgaggaaatatctgcaactcacttgcctgacaaagaactagtgtctagactacacaaagaactctcaaaacttatcagcaaaaacaaacaattaaatcagaaatgggcaaaagacacaaagacttttcagagaagacgatacatggatatatggataggcacatgataagatgctaaactatattagtcattcaggaaatgcaaatgaaaaccacacgaggtaccatatgagtccacacatcacggaatggctgttgtgaaaagcagtggccacaataaaggctgagaagggcccgggtgggtccctcatgccttgtctgagaggtggaacagtgcagccactctggagggatgtttattattaaactaaacgtgattacaatgcaaaccaccaattaaactcttgggcatttaccccagagggcatggaaatttatgttcacacagaaaatttgtagtgatgtttatagcagctgcgttcatatgagccccaaactggaatccgcccagatgttctttcacaggttaatgcttagacgaattgcaatgtggcttattgtggaatactactcagcaatgaaaaggaacgaaatatgaatgaatgcaagacctggatgagtgtgtgaagaattatgctgagtgaaaagacatgattccaaatacatactgcatgattgcatttatataatatttatgaaatatcaacattatagaaatggagaacagaccagtggccaccagatattaaagttatggggagtggggttggaaggtggctgcatggtcatcaaggggccctgtgggatgggtgatctgtgtcctgacagtgcaggtgggcacacaacctacacctgggataaaattacatggagctaaacaaacgcaagtacaattaaaactggggaaacgtgagcgagccaggggattgtcaatgcctgtctgtctgtgaggcgttgtgctccggctcttcaaggtataactactgagggacactgggcacaggtacatgggctctttctgtactatgtcctagaacgctgtgaatctacaattgtcagaactaaaagcttaaacatgcacttacactcacacgaagttctgggcctcacgccaaacctacaaatctgtactcttgggaagggaagctacagtgtctgctccacatgctgctcaggggttctgcaaaggacccagcctgacatgtcacagatagtgtccatgaacctccgtggacacagagtcctctaccggggggtccctcctcatgagaacatcccgaacgctggggccatgacaacttcatgccgcacctctcttcacctcttcatgaggacttccgactgcacgcctaacactttgcttccgctcctgcaccccaagtgtattctatgctctcacctcctatgttttagctgtttggggcgagggttcatatcctcacgttccagcagcactcctgcatgtactggataattctgatgttttcctagggagggactgagtagcactcccgcatgtaactcactgcaaacagtttgggtgaaatgtaaagtggaattggaagctgacttcctccatatttaaatatttctgtcactcaggaaaagaaataagaaaagtattcaaaacgggacaagaccccgggaccccatctgtttttccagctccgccttcctcctccatggagactgttcaccaggcggttgtgagacagcccctgaagtcctcccacatctttcttgtactagagactcaagcttccttctcagtcctgggagaaggaagaccatgtgggacggaggaaagcactgggcacctgcacttctgaaaacagatgcctaagagccatcgactgccattagaatatccgcacctgagaacaagctgttcattctggaggtgaattaatcatcccaaagcccgggacatagtgattctcctgtttaaactcctaacgcctcagaatatagtttctctaagtttacaatacttgctttgctgagatagtttactaatcaactctctcacaggaaaccattcgaatcgaagagagaaggcaataaaaagttaaaacagtagatatgtaaacagtaagatactcttatcttggaaaactgaatgcaagtgaatttgaccattccccccatacttggtaaaacttacccattttggtgtcttgtccacagagtgaaacacacagagaacaggaagtcactatcttcagctttactgtgctgctaggaactttgcagcacacaaggctgagccgattttaactcactaattatgatgctctggggaagtgccttggtaactgactgagtccctcactaggaaaacatcagaactatccaataactccaggtgggcacccatggaggggcaaaagtgtaactgctgaactatctgaaccattctgtgacgtgggcaaactgagaagggtgatctggcaggaaaggcgagaccccacgagggagatgaccctgtgctaattccgtttctgtcactgtctttctatgaactctgaaaagtaaccatttctgtcactgtttttatatgaacttgggaaagtaacttttctctggatcccaacatgaaatttgactatttttataaaagccgaggaagatggaggaggaaatgagcagaagaaaaagaagaaaaacaggaagcacaagaatgttaaacccatagggctccttcccacaacacagtgcctcctcacagctcagcgtctcctcacagcgcctccccatggcacggcgcctcccgacggcacggcgcctctggtagcacagcccctcctcactgcccagcgcctccccacggcccagcgcctccccacggcccagcgcctccccacggcccagcgcctccccactgcccagcgcctccccacggcacagcgcctccccactgcccagcgcctccccactgcccagcgcctccccactgcccagcgcctccccacggcacagcgcctccccacggcccagcgcctccccacggcccagcgcctccccactgcccagcgcctccccacggcacagcgcctccccactgcccagcgcctccccactgcccagcgcctccccactgcacagcgcctcctcactgcacagcgcctccccacggcacagcgcctcactgcacagcgcctcctcactgcacagtgcctcgtcacagtttagtgcctgcccacagttcagcgcctccccaaggcacagcgcctcctcacagttcagcgcctccccacggcacagcacctcctcactgcccagcgcctcctcactgcacagcgcctcctcactgcccagcgcctccccacggcacagcacctcctcactgcacagcgcctcctcactgcacagcgcctcctcacggcccagcgcctccccacggcacagcgcctccccactgcacagcgcctccccactgcccagcgcctccccactgcccagcgcctccccacggcccagcgcctcctcactgcacagcgcctcctcactgcacagcgcctcctcactgcccagcgcctccccatggcacagcgcctcctcactgcccagcgcctcctcacggcccagcgcctcctcactgcacagcgcctcctcactgcacagcgcctcctcactgcccagcgcctccccacggcacagcgcctcctcactgcccagcgcctccgcactgcacagcgcctcctcactgcacagcgcctcgtcacagtttagtgcctacccacagttcagcacctcccacggcacagcgcctcactgcacagcgcctcctcacagctcagcgcctccccacagcacagcgcctcctcacagttcagcatctcctcacagctcagcacctcacagctcagtgcctcctcacagctcagcgcctcctcacagctcagcgcctcctcacagctcagcgcctcctcacagttcagcatctcctcacagcacagcacctcctcacagttcagtgtctcaccagtactcagcgcctcctcacagcgcctccccacagcaaggcgcctccgcattctgggggcacggattgcagggaagttgcactggaggaaatgacatgcgaggaagccttacagtaacccagtcgggaaatggtgggacccacatgaagcagctcagcaggcgtggagaggcagcgcaggctccggaaatgttgaaatagaggagtcagtgtgtgttggaaggacaacacccatgacgtggagatgagcgattgtggcggcacagggacccctctatgggaggcaaggagggattctggaacccctgactgtagtcaacgaagggcagcatccaggaaattggcagttaacagcagtggagggtggaagggataggactgcaaaatggcattggcctcgaagaaaggctcttaagggtggaaaagtgggtttagaagttgtgttagggaattggtagacaccacgccaatgtgatgaaatgagcagacactacctgaaaatcaaccacgtaacgttcagttattccattcaaacccgcgtcctgtttttttttcttgaacagtgcaaacattattacatacttcaattattcttatcatcatattttgcagacattcctggagcgggacagcctcctgggagtgtttacagaacagaggggatgggattatgccagcgtaaaaatccccctccagagcttggcatgtaaaacttcgatttcattttgcttaccaagaagcagtacaaggccaagcgtagtggctcatatctgtaaccccagcactttgagatgtatgaggcaggaggattacttgggcccagggatttgagaccaggctgggcaacatagtgagacacccgactctacaaaaatagaaaaaataactggtcatggtggtgtgtgtctgcagtcccagccacttgggaggctgaggtgggagaatcacctgaacacaggtgggaaagtcaaggctgcagtgagccatgattgcaccactgcactccagctggggtgacagaacaagaccctgtcttaaaaaaaaaaaaaaaaaaaaaaaaagcaggtctgcagaagttagttgctgtgctaatttatgacatatctggttcagacacactgctctgattaaatatgaagttcacaccccagtgtgggcagcctgtggcaggtatgcagataaaggatttaacaaagcactgcgatattacatttcagcacgacagagagcatctcggcagctgtctgcattctgtgcctgctgccagttgagatgtgaaaattgtcagactatttctaaatggaaatctaggcattcacagtaatgaacatgtgaataaaaaaataaaaacctctactgttaaatttgttccagtgattcttaagagtttaaatgattaaatctctaaaaatgtatcccttgtttaagctctttcagaccagaagcaggatgccctgaccttttgaaattctgaacccactgtccatgtgcgaaggctgtggcctgacctggctgggtgcctgagtcacacccagggcgcctgggttctgtagaaaatgtctttaggctgagtgtcttggtctcctgacccttgctgggatccaggtggtggtttctgccccatcagctcccctgcacttggctgctccatctgggtcctctagtgggtgttggtctagagggttcattaatccctccgcctccctgatggctgcttttaagatctgtttattcgatggtgtgggacaaacaacatccctgccaggcactggtccctgattctggagccgcgaaccacctgggggcttggtttgttctgggaaataggactggacagaagcgtttgtaagagtgggcgggaccaggcaggggtggttatcccgatttgctgatgctcctcatgaaggctccggaccaggggctgtgaatcagggcctcagaactactaaagccaggtagaagaagtgcctttttttttttttttttttttttttctcttaaacacatttagataggacgggaatgttttccagggctggatgacctgttcaatgatgcattatctcttcccttgcatggtattttatgattttggatatttctatgacagtagggaatacctggataatcagtgaattttgcccacgttcttttgtgtgtaagggtggtaatagagacttcttcccaaggagggctgagtcagggtcgattcagccatgggccgtcctagggtgttggcaggcatctgagaggcagcaggtagaggatgtgcagctgtgagcctttcccggcttaggctggccatggtcatggcctcagggcaccatgcttggagctggtgaccttcgattgcatgatatgcaccccaagtactttagagcattctctccacatttgcatgctcactcatttatagaggatctataaatcactctattaatttgtaaaacatatacaaaaatataaatttaaaatgatgagatatgctcagacaggaataaagatgaatttcctcaacctgataaacagcatctacaaaactcccacagtcaacaccatgtgaaatggggaaatgctgggcttgtcccctgagagcagaactggggcaaagatgttggctctcaccagtgctgatggttctactcaacgttgcactgaaggttccagatgaaatgcttaaacccttagaagaaagcacagaagtaaatctttgtgctcttgctttaggcaacgattcattagctaggacaccaaaagcacaagtcatgaaaagaaaaaatagataaattgggcttcatcagaataaaaaagtttggtactttaaaggacaccattaagaaaatgaaaagacaacccacagaatgggagaaaatatttgtaagtcatatatctgatgaggcactgataagacattctcctatgtctgataatggtatgatatacccgaatacataataacattttataactcagcaataagtaggcccaaataaaaatagatcaaggattagaatacatatttctccaaagaagacatagaaatggcaaatggtacattaaaagatgctcaatatcattaatacttagagaaattaaaatcaaaactacaatgagacaccatttcacacccactaggatggctacaatcagaaagataataacaagtgttgacaaggatgtggagaaattggaaccctcatacatttctgatgggattcaaaatgatgcaaccagcttggaaatttctcaaaatgttaaatacattttaactcatcaatcctactgccaagtatatacccaagagaaataaaaacatatatctacataaaaccacatattcaagtgttcacagtggcaatattcataatagacaaaaagtagaaatgacccaaatgttggatggatcagctgacaaatggataaatgagattctggacatccatacagtggaatattactcagctataaaaagaaatgaagttctgacgtatgccacaccctaaagacaccaaacttagagaagccagacacaaatgctcacttatgtgtgattctatttacctgaaatgtccagaataggcaaatcatagagacagaaagatcagtggttgctaggggccaggggaggggaaaatgctaacaggtttgttgtgaggtcagaaaaatgttccaaaattcctatccaaagataagaatgatggttgcagaacactgtgaatatagtaaagacctttgaattgtactttaaagggtgatttttatggtatctgatttatagcccaattaagttgttataaaaatgctgagatcaaagtatcagtaaaagttctagatttttttcctttacctcagtgaatcatctacatatcgcacactttgaagactttaacacactacactagtgaattctggacccatgtatttggaattattcagagagcttttagggtttttcagagatttccttccccatggtatggtggtggctatttgaacagtttgggaaattttcagaaaagatactcctgcagttgtcagattggctgcaacacttggctttggttgacagggctcagggtgccatctgccattttcttcagtcatattcatccgaagaagtcgaagtcttaaatctgcaaagcaggcaagaatggacacacttgctgggtgtggtggctcacgcctgtaatcccaacactttgagaagctgaagcaggcagactgcctgagcccaggaattttagagtggcctggacaacataatgagacctcatctccacaaaacaataaaaaattagccaggtgcggtggtggacgtctatagtcccagctacatggggggctgaagtagggacagaagtgggaggtttgcttgagcccgggaggttgaggctgcagtgagctggtgttgcaccactgcattccagtctgggtgatggagtgagaccttgtctcagaaaaaaaaaaaaaataaataaaaaataaaagagtagatagactggctaactagcatcagttttgttttttttttttttgccatcgaacaggtgttaaatatcttttgttgattaaaaatattacagtaaagaatggcatatttttgatattttgagttgagaattcaaaagtcttccagaaagcacaagacgttggccccctgacctcagaggagagacacatcaaagagaattccccatgtgcaggactggagacttccaatgtccctcccactctaagttgtaattctgatctgtgatggcatctgtccaatagagacaccactactggttaatttgattaattcagatgagatatatcaatttatttgaggaaaaaccccaaagcttcatgtgatttgtttgactaaattgtctaattgattaagttgtaagaatttctctgattacattggaagcagagttaccgttttccctctctctagattttgagttgtccatttttccccatccccgcaatcaatgggagagacaacttgtgttgatggtggcagagccagcgatctgacaaccttcctctgttagcccagatttctggtctccagccctctcctgctattgagttttgactccaattgcaagtggccatctcagaacacaaatccctcagctcataagagaaaagtgcttgatccgtttcttattcaattgccaagatcatttcatgtgccccagacttggctgagttaactcgatttctactagcttttctcctggttttgattaactttgatgccataattgcttagtttggagtcatctgatgttacacaatctttaggcacctagtgatgctttgctgggaagaagctgtggtctcaatgtgtgccagaccctctacctttgtctaccatggccctgtgagctgggtgcccttaccatccaaattttctgcagcacagtgggtcacttgctgaaagaaggcctcacagggagagccagggttcagatcctgagttgggctcccaggtccaggacctcaaccaccacatgaaactgcctctctgtgctcagatgggccccacttaattttgagggtattttttagtctctagaggtaattttccttacacctcagcacactgtttttctcatcatattaatacatgatacctgtaataggcaaagtgtgtatgtgtaacagaaaattttgtacagaaaaagcatgcagaaaggaggctggggaaagagacgatgatgatttatcaactgcagacctcaaagtccaataaaatgaaaaggaagcagcagcccgtgagctactatctgtggggccgatggtgagaggagccgtctgaggtgggattgcctgtgccctcggttcatccaacttacctgtaatgccacagggatgctaattcctagggacaaaaaggcagcccaaacctaaaacacaattcctgcttcctttgctacccagactgatgaaatacaaacctctcaaagaaaacagacatcaagcaccccagtggtctttttacaaacgcccgtagccccattatagaaatgcttacacggcaggttactcagacaggccggaacaactagactggacacacaatgaaggttatttctgccaaggtgtgtctttaacttttcaggtaggcagtaggcaggggccatggcaagacgcagactcatgggcagaggccggaggctgttttgtgtttcctggagcagcggtacggcgggaaacatggaagaagcggcggggtggcctaggtgagtgtttagtaatctccagaaagtggaataattaatttgttaactaatgacattcgtatggaagagatcaggccgcggcttttggtcgaatacatttgaaaatattttatcaaacgccctgcttgctgtgactgtcaagtgccatgagcagcgatgtctaaagctgtcattgtgaggctcgtggactcctcactgtgcttcctacagagaaatatgcttccagagagtaggaatatttctccacacgtgggtgcacacacatgtgcaagtgtttgtatataataaatacatttatagtgtattgcatgtttatatgtgtacatatatataaatgcatttattatcattcgtatctgcaaatctggctactcacatgtaggttccttggtcaagatttataactttaatagatgaatctttaagattgcaaggccgattattttctgtgttatttgaagttttccttttacaaataaagtttcttcaagaagtcaacaatatttgtatagagttaaaattagcctcttattttaatgtttgatttttttaaagggtgtgtaacgtctttgtgaagcacctgtgtgtagctgggccattgctgcaaagggtcctcacttctgggactggagctggtcctcattcctcagtgctttgacaaaaccctcagtgcatctccagaatggcaccagaagattaactgtcattatttgtcctcacttcaaactcttcccagagcttaattctaacattttatcatgactaaaaatcatgtggggcccttgttaaaagtgcagcccaagatagtatggtttggtagctctgggttaagtgcccaggagctacattttaaacatgacacccagccaagtcttacgtgtgtgcgttacaattcaaactgtgaggtcttctcaggggcaatgggtttgtcttatttgtctctgtgtgttccagctacctgcgcctggggcagatagtacttattgaggatgtctgtgagatgaatggatggatggagggagggaatgatggaaggagggatggagggtgggagggatggatagaaggatggaggaaagaatggaggaatggatggagggagatatgcagggatggagggagggatgaagggagagatggaagaaaggatgaagggaaggctggaaggagggatgaagggagaaaaggatagaggggtggatgacggaagggatggagggaaggatggagggagaaatagaggaagggatgggtaaacagggaagaagggtggggggtgaaggaatgggggaagggtagaaggacagatggatggatggatggatggagggttggagggaggaaatgatggagagaggggtggaaagatggataagggatggaaacctgtctcctggcaggaaggcttgactgcttgcaagccactggttgggctataacaaacttgggccatcatttatatcttttctaaaacctgaggaacattttgacatgtcttaaataaggataagtgagtcccatcctaaataggaaatactctgtcacttttctctgatttcaaaagccatcaaagcagaatgtgcacatcccgattacctcattgtttctgcaccagctcactgccaggcttatcctgcttggcacatgcaaattagagagatgcctgcgttacagacccgctgcaatccccgtgtcttcacactgaatttggaattgaatagtgctaaatgggtcttcacatttggctttggtggttaatttgaccatgcatagcatgttttcatatttcttcatgacaaatgtaaacataattagctcttattcaaaaataatttggttgtagaatgcagtgatttctaaacatgtcctccattttaagaaactctaatatgcaaacattcgaattcatggagtgcataaattcagcatctattcttctcacagtgattcttggctttgggcttcactgcaggaggcctacaaacaatgggatcctgtaacgcatttaagatgttacccacttggcaataattggatgactctttaaggaatgtagtagcacctccattaaagcaattatcttgttattgtgtggctatttccatatctgtttctctggttcactgtttcttaataaatgttatcctgtttatctttgtttcctcagtgtcttaaatacccggttcctaatcaatgctttaggcatttaagggtattctcacacatctctgtatctctcaacacttctgaagcatcatgggaaacccacccctcatatttaggaaatgaacatccttacagttaggcagatcatcctgtattatgatgtacgagtaccacatagccatgggaggaaaatgaagggtttaaagactccttggatatttcttcatattataaaataagaatgacctttgcaactctacttaggttcagctgcttgtgaattatgaggggttcctcaaggaatagacatttcctagagcctcctcaccctcagaagaccacaaaacttctctgcagaaagtgttacgctttcttagtccactgaggactccctgtgtcaggtgaagttttattattgtccttagcattgaaagaattgcttgcaggatgtttcagctcatttctttccatcgtcgttggtgattctcagtggtggtaacctttacagtgcatgtgtggtctccccctctgctccgattcctgactcttttcttcttttccatctaaacagagtacacagctctgccacagataatgagtccagatagccaaaaatcaacggacaggagattaatggactgggttattttataactaatccaaataaagatttttcccttttttacttaaagatttctgtgtgtgtgtgtgtgtgtgtgtgtgtgtgttttagatataaccaagaatgaacttttccaaaggtcacttaattactaggggaaaatagaaagtggtccagatagtgcatgtttataagcatgtggtgtatgtgtgcacttgcctccatattaaatttttgggccaaataatcaagtattaggaaacacaaaatacccagagtgattctcactcaggatttagactctaacggcaagctctaatggctcacctgcatggactgcaatcagagaaggtgcacactcaccttagatggcaggctgggctcaactacaccaaatgctgggcatcccactgagtagtccagcttttcagagtggttggtgtcagtgatgccattgaaatgctcaagaaatgagctgaaacatcctgcaaacaattcttccatggtaaggactacaataaaacttcagctgacacagggaggcctcagcagaccgagaaagtgtaattttttctggagagaagttttgtggtcttctgagggtaagcaggtgcatgcgccggggttacccatccctcccaccgaggcctcatatcacctcaactttaccctggggctggagtgcagggattagaataaaatttctgatacccattgtttcatttagccactccaattattgatacgattttactatattgattttattgcatttaattcccatttcaaataccaggagaaaaggaattgggtcataaaatctttaagatatttggtcagactataaaagggggtgccattaattcacaaagaggagaagtcataggatttgcttcccaggtcttggcccagcccagccttcttcacctcgtgcacactatacacactggatgctctgctgaagttgtgttgtcacctgggactgacacgtgcttctcatggcatcatttaatactgtcatggtgctttgcaaaatggggtagaatcattggagaaaatcatcatggctgaaaataaaagcatctattttacatgagaaacattcactgaagctagtccatgtggaaggaactttgaggaagaactacattgcccaaactctacagacagttcgttaaaaatagggagtgtcttaaggaatgtggcaggcatttctccttttattcatgctggcagactgataagtgtttaaccgaacatagcttcagagcttcagcccaaatgcttaaattcactcaaccaaaagctcaactgtcttgggccgcacagtttcagtggactgttcccagttcactgagtctggtccataataactacattgcagataaacttcatttttgaaaccatttttccccatttccaatttctcttcttcagatccctatcatataaaattctcagttttaactatttcctcaaaaacaatcctgtagaggcaaaatgctgaaacaagaaaaccaggccacctagtcaagtgaggtgttgtttagaatgacgcagggttttaaaatggcaagaattctctatttaggttggcctcaaacatggaccagctagttctcaattaggcaatttctgtctgtttcataaatgaatctaaaacatgaatggaaatggtggctcctacgtgggccagctcacagccccagccttaggtcaccccccgacattttggcatggtggatagagaggtggaggaaggatttctaggctgaaagaagacaaatctgccccttcttctccatcagccaccaggttccaggttctggaaacagggcggtgggtgggctgtctgcttccttgcatgggctggagggcagggtggctgtgagctcactcaccccaacatttgtctcattcccagcagctccggaccttgagggctgatcttcccaactcttctccacattccaacaccagcagcctcggctgggtctcatactctggattcaaagcatcgcttctcttgagaggctttccttattttggttggataggatgtatctttccaagtttcagacagtgtttcctgtctgttgggtttctcctccctggaccccacactagccgggttgctcggccacgccctgtgctgagccgagatgtcttcctgccacgcctgtagctgagcatggaccccacagcccagcatagcctcttctcaggttaaccctgccccatggaaagggtgggtcaaatctgcagttttcagagctggcaacatggtgaccacgattcacacatggctaagtgcatcctgcaccttgcattgacccgaagtctacgggactaaggagaagccattttgttttgggtcccattcctgccaactgcacttttaggggaggagtcactcagagccttcgtttcattcatgtaataggttgtgaggaggtggagacaaactctggctgtatttttactgttttcactttcatcttgcctctcacatccctacgtttgctctgattacagaagggattaaaaacagataaacaaaatcaaacaacaccaaacacagcataaatatcaacccatccaggctgcagtggattcttgccaaactttgaaaattctccaagtcaatactcccattagaaaagagcttttctggccatgaaaagctgagcagcagcgatctgcagagggagcgggtgtggggctgctctggcccctgctctgaagccccactgggagctcagaggatgaagaaacatccatcgatagcaggtgccagcccacccgtgaccaagtgcagactttcaaaaaggaatgcattcccaacaatatgacacagaaggtttggaataactgcttttgatagaagttttgacggttttgaagctactctcacagcagcactcctgcattctggcttggtgtctccagaggggcaggggtgggctcacagctgggggtgggcagtggagagggaacatgccacacctgtgattatcaactttcctgtatgctgtggccccagacagcctagagccacgtgggtccggaattgaatcagcacccaccagagaaccacgtgccccacagcggcaataaccggcatccaccagagaaccacgcgccccacagtggcaataaccagcatccaccagagaaccacacaccccacagcggcaataaccggcatccaccagagaaccacgcgccccacagcggcaataaccagcatccaccagagaaccacacaccccacagcggcaataaccggcatccaccagagaaccacacaccccacagcggcaataaccggcatccaccagagaaccacgcgccccacagcggcaataaccggcatccaccagagaaccacacgccccacagtggcaataaccggcatccaccagagaaccacgtgccccacagcggcaataaccggcatccaccagagaaccacacgccccacagcggcaataaccggcatccaccagagaaccacgtgccccacagcggcaataaccggcatccaccagagaaccacacgccccacagcggcaataaccggcatccaccagagaaccacgtgccccacagcggcaataaccggcatccaccagagaaccacacaccccacagcggcaataaccggcatccaccagagaaccacgtgccccacagtggcaataaccggcatccaccagagaaccacgcgccccacagcggcaataaccagcatccaccagagaaccacgtgccccacagcggcgataaccagcatccaccagagaaccacgcgccccacagcggcaataaccagcatccaccagagaaccacacaccccacagtggcaataaccagcatccaccagagaaccacgcgccccacagcggcaataaccagcatccaccagagaacaaagtgtcccgcagtggtgataatcagcatcaggcagagaaccacatgccccaaagcagtgataaccagcatccaccagagaaccctgtgccccacatcggcaataaccagcatccaccagagaaccacgtgccccacagcggcgataactggcatccaccacagaacaaagtgtcctacagtggtgataatcatcatcaggcagagaaccacatgccccaaagcagtgataaccagcatccaccagagaaccatgtgccccacagcggcaataaccagcatccaccagagaaccacgtgccccacagtggcaataaccagcatccaccagagaaccacatgccccacagcggcaataaccagcatccaccagagaaccacgtgccccacagtggcaataaccagcatccaccagagaacaacgtgccctgcaacggcgataatcagcatcagccagagaaccacatgccccacagcggcaataaccagcatccaccagagaacgacgcaccccacagcggcaataaccggcatccaccagagaaccacgtgccccacagtggcaataaccagcatccaccagagaaccacatgccccacagcggcaataacaagcatccaccagagaaccacgtgccccacagtggcaataaccagcatccaccagagaaccacgcgccccacagcggcaataaccagcatccaccagagaacaacgtgccctgcaacggcgataatcagcatcagctagagaaccacatgccccacagcggggataaccagcatccaccagggaaccacgtgccccacagcggcgataaccagcatccaccagagaacaaagtgtccctcagtggtgataatcagcatcagccagagaaccacgtgccccaaagcagtgataaccagcatccaccagagaaccaactgccccacagcagcgataaccagcatccaccagagaacaaagtgccccgcagtggcgatttccttcaggcggaatggggctcttttgtgataactttttcctgagccactttcaccctctcactcttctttctgatgtgtgcaccccaggctcattgatcatggtattgctacattttctttcagccaggttttgtctggaatttagtcagaactatgctgcagctgtgcaggaatgtgtggttggctggcagtgcccacatcttggggtgtcccaacctcctgctcactctcaaagatgggcagttacagtgaagacagtgagagtcaaatccagcttttcatgaatttttaaccctctgcctggatgtcccattttatcattaaaaccaccctgtgatagacccccttcctcagcttccccatgccatggagaaggctgaggcaagtccctcaaacacacacatggccccacagaaccaggactgacaccaacagggccttgactctgaggcctctgcccaactaccatgcacgccgcttggttgtctgctcacattaaacattacagcatcgagaaacattcagggaacagtgactcctgactcctgcagtcttcttcaggtggccattcctagggagaaggaggagctttgggaagccagtctttccctctctcctcctcttggagatcgcagacccatgggaggagagtaccctgagatgctctcagacatgggtggggtgggggtggaaagtctcagcctcatccagccctgcctgtgatgggctagcacttgaggacatcagcagcactctggctctgagttaggaaacctaccgccccaatcgttcagccaccttttctgcatctttgtccacctgactgtattgcaatggggtgacaagctgattaggaaaagaggtcttttgctgtgatcagttctcatcttctctcccacatttattactctttttagttagtcctttttttgaacacaagtctcctccctgcatctcaaaaacaagagccttgtttgtgaatcacataagaaagtgatctccaaattggggaatgcacaaaagttggagaaaaatgttggaacttcaacttaagagacttgtatgataaaaaatgcttttgcagacacaagaacagggtgtggtcatgacctgctggttcccaacaacacaaggagaaagaatggagcataaaagacagatctagggtgaagagaaatgagatctatacacaagacatgaagttagtcagggcttttctgacattggaagtcataggaagcctgtacataaaaaccaggttttcaaacaaccccataaaaaagtgggcaaaggacatgcacagacacctctcaaaagaagacatccatgcagtcaataagcatatgaaaaaaagctcaacatcactgatcattagagaaatgcaaatcaaaaccacaatgagataccatctcacagccgtcagaatggctagtactaaaaagtccaaaaataacagatgctggcgagaaaaaagaatggaatgtaaattagctcagtgggaatgagctagtgggaatgtagattagctcggccattgtggaaagcaatttggcaaattctcaaagaacttaaaacagaactaccatctgacccagcaaccccattactgggtatatacccaaaggaatataaattgttctaccatagacacacaggcacgcgcatgtccatcgcagcactattcacaattgcaaagtcatggaatcaacctaaatgcccatccattgtggactggatacagaaaatatgctacatatacaccatggaatactatgcagccataaagaagaaccagatcatgtcttctgcaggaacatggatggagctggaagcccttatcctaagcaaactaatgcaggaaaagaaagccaaatatccatgttctcacttatatgtgggagcgaaacactgggcacctatggccacaaatgggggagcaacagatactgggaactacttgagggtgaagggtgggaggagggtgaggactgaaaatccacctctcgggcactgtgctaatcacatgggtaacaaaacaatctgtacaccaaacccccacaacacacaatttacccatatagcaaacctgcacatgtacccttgaacctaaaataagagttaaaaaaactcaggttgtgcaggaggcatctgtgtgattgagcagggctgggtcctcctaatcatggctctcccacctgtggccgtgagtcctcacccaagccacctgcctcacaggatttgggtcccatttctgtaagataacggacagggtcaatgtttctaaaattctaccggcatccgatttactcatcaaaccatcagaccaagctacaaggcagggaaataggttcctttgttcagcagcgagaggactcagtcaaggtcatgtgtgaactcttggagcctgcgtggccgtcgcggcaatgacctggtgagaaggtgatgcctcagcatgcccaaagctgcatggcaggagaaggaagggctcagaatatttttcctggtgttgtttgggaataaccctgcctttagtaaagaattaaagttacacttacagagggaaggtaaaaggcaagaattgtcacaaagcataaatgggcgctgaacgctgagtataagaggggagacgcctgggcaggtgacctgacccgccaggccgctgcaggaggccgaccccagcacccttctggcagccacagggagtcgcacacggaccccatgcctttcacagactgtttcccaggaggcaaaatgtcagcaactggtgctaggagggtggtcagagtgaaagccgtggacatggctgtgacttctgggacgggcacggcgaggcactctcacacacactgtactgtggggccccaaataaaccaggaggttggcgtcagcacccacattctatgaatgggcaggagaggagccctcagcctggctgtgctgggggttgggccaggcccacacccgtgtgcccgctgtttctccatgtggccttcattgtgtttccgagctccgtgcataatgtcctccccggccaagaaataaaacagactgtgggacttggtggcaccaaagaggcaggtggccccctcagggaacacagctgcccagaagggcacatggaggaaaccgccgcagcctggcaggtgagccaggagggcacgtggagggaaccgccgcagcctcgggtgtgagccaggagggcacgtggaggaaaccgccgcagcctggggggtgaggatgcttcactcttatgccagacccacctgtcacggtggtcccccctcacgaggcctcgtcagacccagaatggtgtcagcatgggctggactgcacagtccagggactctttcatgggccaatgccctctgaccttagaggtgctcagagaagctccctcctttggaaaccctggctgctccgcaggtgaggttgctcagagtctgcatatgttgctccggacacccagctggcaagaggcagagccaggctcaagtccacatcctccagcttcccagaaggctttcctttggttccatcagaatggacacaccaggaccttttcggcaccctgtggacactcctgtgaccacagttgtcagagctcaactgaccccatgtcctcctgcccttgggaactgagccagcccagcctcatgcacacggctctgctggtgacctggattcccatctggggagctggctggacagaagggctgctgctgtgtttccccccgtgactctgatagtgaggacagcaccccttcttttttgagggacaggacaagaattgtagggtcatgtacagaatccacatggacgcatgactctgcccctttcagtctattcttagcatttgaattcctgtttcttggcattgaaatccagaacaactttgcatggatgctgcaggccgacacgtgtgcttgatggaaggatattcacttagatttctcagtttagataactgaataaagcctccacaccaaaccctgcaacctgagagccattttactaaacacttttcattttactaaaatcatcacaaatgaaccgtggttaaggcaaaagagagactgccggcagaggatgccttccaccactgtgtgtattatcatcatgatcagaaggaaaatgccctgtatttttttaaagacccattcacacttagtgtttgtatagtaactgttgttctgttcgcctttaattttgaatacttgagtgaattcacaattccaccgtgtgcattaatttagaaaaatgcattttaaaaacctttaatcgtggtgccgttgttacaaactctcattccactttattactccccatgcaccgacagggtctcagatgtatgggtgagagagtggccagaatgtggcagtgaaggagatggggcttgagattgggaataacgagttcgtctctcaccaaccgcgagaacccctcagcccctcagttcctgcccctcttgtgggtgctgtgaacacaggtgccctccaactctggggacctgaggttgtcaccgcgctttacttaaaaatgcagcatatgagacagttgttgttgacaggggcatgaactggctttcagtgttactgagtcttgctcttcagaatgatctgggagcatttgtggggaggaagacataaaatgcctcgagatgtggcatatttaaacagatttgacccccagccatgctgcaggctccagcctttacagaggcacttggtactagggaactaaaggcaagagcaaggccatcagaggcagagatgccaggggtgccccaccccgtctcctgctccagacactacctggggcagcaggccgggagccaggcccatgtcaggcgagggcacgtgggtccttgccttctcccatctgcccagggtcctctgtttcccattggtttggaaagctagaatttaatggaaaatactacaggagtgagaaaatataagctccagttttgggcaaaatgctgcagattgcatgtcaatggggacgtgtgcctgtttgctgctcttcaaatgttaccaagaaagcagcccccagcatatgtgcccatattggatacatcatgttgacctatggacatcttaacacgggttctattttctcaggatgtgagaactgcatgtgaacattccatcacagatccttattttcaagatgaggaagtgcaggcccagaggggcccaggactggcccattcccttcggttctgctctgacttcccagccccgcacgccagccctcaacgtgttactccagaaatgggattagaggagctcgtctggattttccctgaaatcccttctccctttcccgccttcctgatcataaagttgcagtgagtcgtgtcagaggaccgaggccttgtctccccagccggcgtccctgggacaagaatgagattgccaaatgccactctgagcatggttcatgcatctgcccgtttcattctcccagctgctctgtgagcgactgcttttggtatcatctcatttaggaatgagaagaaaccagggcacgggtacttggcactcaagggcttaggtcccacagctggtaagcagatgcaggagactggctctggagactaagctcaccaccttctccagggctgtggatggcagccgtgtgacctgtcccctgcccaggagaccactgaagagcacacagatcaggagccaggaggcctcagccctcacctcagctcttcacgcccatcggctacgagaccctcagtaagaccacgggtgcctcgacccggctggtgcacaaggagcacagccatcaacgcctcccgacagcgctcacaggtaacgccctcctctggaccccacgtacgcagtgcaccgaaggcacccccagtggacaccaggattgctgagaagggagctgaaataggctcagggtaattgggagatgaatgggaagagagaggcagtaagagatggagggaggtagagagatacaggaacagagagggatacggagacagagacagacacagagacagagatagagagagataggggtggagagagacagacagagacggagacagagagatactgagagagagagacagagacaaacagagacagggaccgagagagacagagacagaagagggagacagagacagagcgaaacagagacagtgggaatgtgaatcccgggcccctgcagggctatctcggtcctgtggtgcagtgatttgctgagcacggggtgtgccctgcattgctgggggctggggtgggagtggctacaaagtcatttctcatgggaggaacatttccctgttgtttctaaactctcaggaaactgtctgatgtctctaaagaaaccactgttgcctgtgctcgtggaaagctgattcaggaaggggtctggggagtctgggatgtgggtttcctgggtgagcggttgaggggcctctgtggtgactctgagcctacaggtcttgctgctgctgccactcctgggctgtcaggcgacgcctgagccctggagcctgtgactcttgccagcctgagcagtgcttgctccctgcggcgttggcccagactctgtctggagtgggtggtctggggcccttggccgggaggtgcctccctcggctgcctccatctgaggccctccctgcagctctgccccctaccccttgtgccctgctctcctcctcccaccccctctgctctgtctgctgtctgtttccaagggaacctgagttgacatggggagaagcagaattaagggctgtgaaggccccgagatggggtccaggtcccgactgctggctttgggctctatctgggcaccctgagactgtgtgaggatggccgggctgctgctgaggccaacgctgggagctgagtgcccatgcaccccagggctgtcccctcagtgagcccagcacccatccacctcagctctggggctcatgggaggcacaggcaggcatgcaagcgacagcggcccaggaagtcaccaggtgctgcgagaacgatggaaagaggcctgtgtgacaatgggggaaggagagagggctcaggggagagggctcaggggatgggactatggactcaggggaggtgtcaggcctctgagcccaagctaagccatcatatcccctgtgacctgcaggtacacatccagatggccagtttctgccttaactgatgacattccaccacaaaagaagtgaaaatggcctgttcctgccttaactgatgatgacattaccttatgaacgtccttctcctggctcatcctggctcaaaagctcccctgctgagcaccttgtgactcccacccctgcctgccagagaacaaccccccttcttcctttacctacccaaatcttataaaacagccccacccctacctcccttcgctgactctctttttggactcagcccgcctgcaaccaggtgaaataaacagccatgttgctcccacaaagcctgtttggtggtcctttcacacgaacgtgcatgaaatttggtgccgtgactcagatcaggggacctcccttaggagatcaatcccctgtcctcctgctctttgctctgtgagaaagatccacctacaacctcgggtcctcagaccgaccagcccaaggaacatctcaccaattttaaatccagtaagtggcctcttttttactctcttctccaacctccctcactatccctcaacctctttctcctttcaatcttggcgccacccttcaatctctcccttctcttaatttcaattcctttcatttcttgtagagacaaaggagacacattttatccattgacccaaaactccggcgctggtcacggacttgggaaggcagccttcccttggtgtttaatcatttatggggacgcctctctgattattcatccatgttccactgatgtctgatctccgtggggaagcctgccttggtcattcacccacgttcccttggtggcaggtcaattgtggggacgcctgccttggctgctccccacaaccaattctccatgcctctacccttccctttaaacttgcctccttcactatgggcaactttccaccctccattcctccttcttctcccttagcctatgttctcaggaacttaaaacctcttcaactctcgcctgacctaaaatctaagcgtcttattttcttctgcaacaccacttggccccagtacaaacttgacaatggctctaaatgaccagaaaacggcactttcgatttctccatcctacaagatctaaataattcttgtcgtaaaataggcaaacggtctgaagtgcctgacgtccaggctttctttcatacatccctagtctgttcccaatgcaactcatcccaaatcttccttctttccctcccctcagtcccaatcccaagcgttgctgagtctttcctctttccaatcttccttttctacagacccatctgacccctccgctcctccccaggctgctcctcgccagaccgagctaggtcccaattcttcatcagcctccgctcctctacccaataatccttttatcacctcccctcctcacacctggtctgacttacagtttcgttccgtgactagctctcccccacctgcccagcaatttcctcttaaaaaggtggctggagctaaaggcatagtcagggttaatgctccttttctttacccgacctctcccaaatcagttagcgtttaggctctttttcatcaaatataaaaatccagcccagttcatggctcgttcggcagcaaccctgagatgctttacagccctagaccctgaaaggtcaaaaggtcatcttattctcaatatacattttattacccaatccgctcccgacattaaataaaactccaaaaattaaattccggccctcaaaccccacagcaggacttaattgtacacctcgccttcaaggtgtacaataataaagtagaggcagccaagtagcaatgtatttctgagttgcaattccttgcatccactgtgagacaaacccccgccatatctccagcacgcaagaactggaacgcctgaaccgcagctgccagggtttcctccaggcccgtttacccgagaagcttgctacaagtgccagaaatctggccaccgggccaaggaatgcccgcaacccaggattcctcctaagccgtgtcccatctgtgcaggaccccactgaaaatcagactgttcaactcacctggctgccactcccagagcccctggaactctggcccaaggctctctgactccttcccaaatcttctcggcttagcgcttgaagactgacgctgcccgatcacctcagaagcctcctggaccatcacggatgctgagcttcgggtaactcacagtggaaggtaagtccgtccccttcttcatcaatacggaggctacccactccacattaccttcttttcaaaggcctgtttcccttgcctccataactgttgtaggtattgacggccaggcttctaaacctcttaaaactccccaactctggtgccaacttagacaatactcttttaagtactccttttagttatccccacctgcccagttcccttattaggccgagacactttaaattatctgcttccctgactattccctgactattcattgccgccttttcccccagttcaaagcctccttcacatcctccccttgtatctccccaccttaacccacaagtataagatacctctactccctccttagtgaccgatcatgcacccctcaccatcccattaaaacctaatcaccgttaccccactcaatgccaatatctcatcccacagcatgctttaaaaggattaaagtctgttatcactcgcctgctacagcatggccttttaaagcctataacctccccttacaattcccccattttacctgtcctaaaaccagacaaggcttacaggttagttcaggatctgtgccttatcaaccaaattgttttgcctatccaccccttggtgccaaacccatatactctcctatcttcaacacctccctccacaacccattattctgttctgtatctcaaacatgctttctttactattcctttgcacccttcatcccagcctctcttcgctttcacttggactgaccctgacacccatcaggctcagcaaattacctgggctgtactgccgcaaagcttcacagacagcccccattacttcagtcaagcccaaatttcttcctcatctgttacctatcttgtcataattctcataaaaacacacgtgctctccctgccaattgtgtccaactgatctctcaaacccaagcaccttctacaaaacaactcctttccttcctaggcatggttagatactttcaactttagatacctggttttgccatcctaacaaaaccgttatataaactcacaaaaggaaacctagctgaccccgtagatcctaaatcctttccccactcctcttccacttccttgaagacagctttagagactgccgccaccctagctctccctgactcatcctgacccttttcattacccacagctgaagtgcagggctgtgcagtcggaattcttacacaagagccaggaccgcgtcctgtagcctttctgtccaaacaacttgaccttactgttttagcccagccctcatgtctgcatgcagcggctgccactgccttaatacttttagaggccctcaaaatcacaaactatgctcaactcattctctgcagttctcataacttccaaaatctactttcttcctcatacctgacgcatatactttctgctccccggcttcttcagctatacttactctttgttgagtctcccacaattaccattgttcctggcctggacttcaatccagcctcccacattattccagataccacacctgaccctcatgactgtatctctctgatccacctgacattcaccccatttccccatatttccttcttccctgttcctcaccttgatcacatttagtttattgatggcagttccaccaggcctaatccccacacaccaggaaaggcaggctatactatagtacaagccaccagccctcctcttagaacctctcatttcctttccgttgtagaaatctatcctcaaggaaatcacctctcagtgttccatctgctattctactactcctcagggattattcaggccccctcccttccctacacatcaagcacggggattggcccccgcctaggactggcaactcttaagtccctcttagagtggatagatgatctttgctggcagaagacccttcaatactttcaccctgatgaagttctattctttcccattcttagggcaccctctacctctccccagctatctccaccacactatcaaccttacccattctctcctagccgcttctaatccctccttagcgaacatccgctggctttgcatttccctttcttccagcgcctacacagctgtacccgcttacatgcagaccgggcaacatctcttgtctccctacacttctgaacttcctttaacagccctcacctttaccctcctgaagaactcatttactttctagacaggtccagcaagacctccccagacatttcacatcagcaagccaccgccctcctccgcacttacttaaaaaacccttctcattatatcaactctactccgcccatatttggacctctcacgacacaaactactattcctgtggccactccgttatgtatctctcagcaaagacccactggaattcccctgggtaacctttcaccttctcgatgttcctttcctcctcatctccaaagcccaactacacacatcacagaaacaattagagccttccagttccgtataacagacaagccctctatcaatactggcacacttaaaaaccagtagttattgctaggaagacaccctgtatttcactccatccttggctaccttccccttgctcatcagactctcctcccatgccctcttcttgtttacttatacacagccccgtaaataacagaggttgctcgtagacactcgaacaaaaccgtatccaggccatcaccaataattctacaggactattccacaatatcaccccttaccacaaaatcatccttcagcttaatctctcccactctaggtttccacgccacccctaatcctgcttgaagcagccctgagaaacatcgcccattatctctccataccacccccaaaaattttcgccgccccaatactttaccactatttcgttctatttttcttattaatataagaagacaggaatgtcaggcctctgagcccaagctaagccatcatattcgctgtgacctgcaggtacacatccatctggccggtttctgccttaactgatgacattactttgtgaaattccttctcctggctcatcctggctcaaaagctcccctgctgagcaccttgtgacccccacccctgcccaccagagaacagcccccctttttcctttacctacccaaatcctataaaacggccccacccccatctcccttcgctgattctctttttggactcagcccacctgcacccaggtgaaataaacggccttgttgctcacacaaagcctgtttggtgtcccttcacaggtacgtgcatgaaaagaggagcctcaggggatgtgacaatgggcgaaggagagggggctcaggggagagggatcggggagcagggccctcctgggcatccttgggatggggaaggtggcaccccatgtgctctcccacatcccctctcctctctcggatgcacctctttcctttctctggttcatttaaacgttggcttttcccagttgccatctcctttagctgaccctgtcctttttggtgtaatgatgagtcccaaaggaagggggctcagccatcctaatggagccattgtctaccccagggaggctgtaggctctctgcttacagagccaccttcccatggggagcaagaccctctagcctctgagctccatggaggtacccaaggcggcaccagcccaggagggcagtggagcccctgcaggcaggtgacccgatcctctccagcttgcacctccctgagggctcccacgaggctcccatgtgttcaggagtctccaaccaccaggacatgatgcccaggtatgtgtccctcccctggctgcccacctcctcccacacagtcgggctctgcagtctttcaatcaactcttccctgccagtcagcccaccgtggtttctccctgtttggaactaataacaaacactcttgtcactcttgctgtgctaaatcatagacctctattttaatgaacagtgttctgtgtcctccatcagcctaaagcccttgggggctgggaggatggagcaggctggagtcttgaggatgagccccagccccacagaagctgagctctgctgtctgtaactgtcctccctgctccacccctcagtgactagactttggacgtgggactcaggtctccggaaactcaacgtccttctctgtaaaacagacctcaaaaattttaaatgagcgttactgtgcatgtaaagcacgtagaataatgtgtgacccagattaagtgcctgggaaatattagctgctaatggcactgttgttatcatcagtaatcatggctgtggaatagagacaagtggtgaagcttggctcacaggccctgcttaactaatggacagtcatattaaccatatttgaaaattccaaacatggtattgggaacctataggcttaaatacttatcagttacatattacaatttcacctaacatgttttagtaggaagtagggtggcagaagctattatataaatgtatatcgtacattgcatacattgtataaacatacattgtgattgcatgtacattgcataatgtatgctgtacattgtatatatgttgtgtaaacatatcacaattgtatatacattttatacatatgttatagaaatatatagcatacattgtatatacattgtatacatgtatagtgtataaatgtatatcatacattgtatttacattgtataaatgcataaatgtattgttaagcatctacaaagcctctagtgcctcattaaggaaggattttctgaaagtttttttttccatgtgtaatgacaatgagtgacctctcgctctttttctggccgtcagcacctctttcacagacccaggacacgaagaaagccagaaggtttggggatggctggatctgcaggactgtttttccttccctaaaagagcaccttgccttcctgcatggaccacaggatggtgtgtgtggccacaaaacccagaaggtgaggtgctgaaagaaagcaagctgctgggatcattcctgcttcaaagcaggtgatgtggccacaggcgcatgggaagaatggtcccagagacacaggcagccagctggggtggaagggcgtcctggggacccaccccctggagggcttcacagagaacagaaccgcctggggtgagctggtggaaaacaacagaacttcacacagccccaacgatccattaccaggacccagaacctcagcttcaacgaggctctgcttgtccccagtgactgaagcctcccagggcacttagctgacctggggatgatggaggggagttggggctttcatgctggccttccagggaagccttagggctggcccaagtctggaggaaaagctgcatgtaggagtgacaccatcttaaagcccattctttggaagccatcatgatgaaaaatggcacacactgttcttcaatctcacctccctccagccttctcaagcaaagcaacaacaacacactcatcaccacttctaagacacgagaactaacttcaaacaagccaattgtgaaatcctgatttttctccttaagtaagttatggaattattgaaaaccattaggaaggaagggctgattcctacctaactggtctctcttcagtcttctccctgagttacacactgagacctttgccacgacagaaatgacgttcgttttaaccccggattcctgggctttatggtcaggagggttcttctagggcccccactcacagcaagccctttgtaattttacacgtaagtgaaatcaacagtgactgtctgcacagggggttaaaagagttcctgtcagcaaaagggcagagacgtgaaaccgaactcaggacactgcaaagatgcttggctcctggcccacttgtgattatccctcctccattcgatttattcacaaagtgagtgagactgaatggctggtttctagccagaggggacttcaatatttgagtgagggagacaggaaaagacccaaaaatcgttagtgtccccaccctaggacactggcatatccgtgacctctctgagtgctctgagaaaaatgagggaggttggtgggcacagtggcagacaggtggctgctggagtctccctcttcccacgggaccctcctgtccctggcaccacaatctcacctcctttctcacttttcagttgcaaggagggatgcatggtttttttagcaaataaaatataagacatctggttaaatttgaatttcagataaataattacaatttttaaatgtaagcttgtcactgtattttatctggtaaccccttgcaaggagcctgcagaccccaagcaaatgtcttcccttaatctagaaaacaccttcacccaggatgggagcgacatgagccatcaggccttttatttgcttttaatatactttggtgtgggcataagtatcttaaataattgaacctgtaattgcaccataaaaacaatgatgctaatacaaataacagccaacaagcatggagcgcgtactctattgttgtagacacacgagccccagaaaaactctgtgcagaggagaaaactgagccacagacatgttagcaacttgctgaattaaagaccttttggtaggtctctgaaacgctcacacaggacaagcaggtttttcctacgtttgcacaaagctctgctgactgtaagtctttctctctggtgtagatctatatacacacatatgtgcatgtgcatcctgcacaaatagtgtgtgtgagagaggaagtaacagagagagagacagacagagagagaaggagaaaaaaatcaccctggacttagctctgggcatcaaagaagtggcttcatcttgacttgctgcctcaactgattgaagcaatcccaataattggtcatgatttttctgcaaggattcagctgcgtatttcttggtgtggggacagaggatgaacccctcaggctttcctctcactatggtgtctctggtgggaacagctggggatgcaaagccattatgatgtcggataggagagaaacctgctgtgccctcagcccttgaggattgcttggtgagaatgcggagccaggtccatcccaggaggaaaaggcccaaactctaggcagcttctcccagggacttcacagacactttttatgtcttgaatacctgcattcccagacccaaacccacagttcccagttcaaacacctggttctagtgccttttccgctgcccagggatgccccaggtgccaccgctcccagtctctccaagtctttacgcaaatataaagaacttctcactggcagggaataattcttacaaggctgtgtggcaaatggaaagtttttttttttcagcaaaacaaagattcttttaacatttgtagaaagtcattcaaggaactgtttctgaaggcactactttggagtttggactgagtgtgggagagtgcggggtgagggtgtgtggacaacagggtgtctttgcctgacatgaaaatttaaaaaacaaagaaataaagggggtacttgagggtgaaagataaactcacaaacaagtcaataaacttccttttcagagttactgagcacacaggtgacttttactgatttatttatttttactggcattatagtttactttattctcctttctaaatagttttcacagaaagaaaatgctgaaaagcattcctttatggttgcgtttttgcttaggaattcttttgatgctaggggtggggagcaaactgaagagagatgtaggttttgtgattttatcattttttatgatgatgcctccaggtagcacatatttatatcctgacacagtcttgttcttacttctgagtacccagttaacctagaggagtcttgagtggactgcagatgaggagagcatgaggggtttgcaatgagccaggcaggtgcacctgagcaggcactgcccctatcagctgatactcatggagaggagactggcctgcaaaccctctgccagtactgtaaaccctacatgtttaggtctggtgtgagttctaaggaatctgataaatgcctgcctttgtcactctggctgactcggatcccatgaagctgatgggttagatgagtctgatcctgagaaacacccccgggtgcaggaaatagtgaaaatcagatacgaagaagccacacctgtgattttaatctttatgaaaatatcatgcttctgaacttcctctttcaaaattcggatgacacacaagtctatcgtacgtcatctttaccactggagggtggcttcacgtgtttataaggaagctgatattgtgaatcccaacctccaccacaacgctcacccttacagacacactattgcaggtctccgagggcctttgggaggccctgcttcctgcgagctgtcccggcaggacagagactcttcccgccgcggccctgccattccaggctgaggctgtgagcagcaccatgacaagctccagccgcagtggctctcaacagtgtgggtctctgaccacccgacgagctggaagtgcagaccgctgacctcccttgagaacctactgggttcttgcagtaggctcctcagcggtgtctaaacacgccactcagatgattctatgcaccatcacattggaaacttttttcattgactgttacttaatgagaagacttccctccgggatggttctgaagcttccttcataggagcaagcctttggcggagagcactgagcagacgtgcagcatctttgctggcttctaccgaaacaccatggatccagacgtggttttgtggtcctgcacgtggaagccagccctgcgtggggtgagcctgggactgtgggcagagaacctcaagcaccgggccggcacccaagtgcagagactgcatcgtcccagcaggaggcgctgcttccaggctccctggacggactccgggagggcggcctttccccccagccccagaggtgggcctgcccttttccgagcgtgggacacagcccaggaaaacgcatggcttgtcctccagacacaggtgctaacagggccgtcagacaagggccagggactcaggcttttaggaatttcagctccagagccaccatgcagtgggaccaggggtctgcgtggacaggaagcaagctgtgtagacgggggtccatgaagtagagacagggttttggggaaggttggggcagggcaaggaggaaaagccacatttacagcaatttctgaagtcttttcattttttccccctgaatcacatccataataggatttgaatttaataaactgctgaaggttcctggccctgagtcccagtgtcctcccagcccccgcccagctgtgggtgtgcatggggagcggtacgagggagggtaaaatgggccccttggacgccgcgtgcagagcagagatgaatggcccgaaaccctcgcgctgctctgcgcccttcgtcatccagtcggggtggttagggactgtcagagaaaaataatttagcggccatggctctaactgatgtgctgcattctggggtcaaatgacttttacaaagtagtagtgctgcctggtttctccatcgtgagagctcagggctgacaacatgaaagaaaaaggcactgcagccagaattcactgacattcttcacatttcacatgagtgggacgcaggaggggggctggggagggtggagggatgtttcctgcttaacagattcaacagaagagtggcaggctcagctgggtgagcaaggtatcccagcgacgggggacacgccccagaccatgggtggtggggcttctcagaggaggtggcaggagacccgagcctgccaaggttgcacctaaggtcacgggcagcattaggagggctctctcccagtctccccacccccccatcccccctcccccaggctgcaggggtgaagtggcttccaggacggtcactggcaagtttaagctacagagagtgtagaaacagggtgaaaaaggaagagagaagggagtaaataagaaggaggtgtaagaaaagaccaagccaggccccagcgcccttgtgaggaagtgcccagggacttatgtggaagccatccttgctgtctgccaccttgtttttacttacattgtgtttttatttgagggcgagtttggacggcaagactgatggagattgtggtctaaatgcctctaacccactccttaaaatgaccaccggatgttccacaagtacttgaaaatgaatgaatggcttcccgagaggcagaaggcaggggtgtgccctaccccacgccggccaagagttcaacaagcattggttgacaagtgaatagtgagcacttgaacccagtcacaattcaagatgagggctctgccatgacgcatgtggtctgtgtcaccctgcagtctccctgagcagtgtctgaggttcgagtgggaccctacattcgtgaagagatttatcatctccccaggcaaaataacagattctgtcctaggtgttgtgatgtaacaatggtagcgatcacagccataacttacaattattgcatacttacgacgagtcccgcactgggctaagtgctttttaactatgtgaaatgtttctttccttgattgatgccaaaatgaataaagataattttctgtatctgctacattagtgatgcccacagataattctgaacatgataagagaaaagataatttgcataaatcagccattgcaagacttggcaggataagattgttttaaaatggtatcagaatagtttctgacagataggaggcaggaaaatagggtctggaggcaggaacataaggccggtgcacactgacttcctagagctgaatcaaatggaaatacttcagcgatgacaggaaatgtcctctccatttacacagggcctacgccgagtaaccaatggaaatctctagagggtatttaaaccccagaaacttcagtaacgggctcttgggcccctgtgctcaggtgctcccaccccgtggagtgtgctttcatttcccagaaatatctgcttttgttgcttcgttctttccttgctgtgtgggttttgtccagttctttgctcaaggcgccaagaacctggacacctccaaccggtaacgcccagacagttgagaacatgtctggagtgagtgaaggtaatcgcaggttagaaggcggacccacagctgcgcaggaaggaaccggaggggtcctgccgggcagagtgaggcccagctccccactctcgctccggcctcctcggcctcccagcgcgattctcccttggaccagggaccccgtctggatcctgccgggctggcggcctctccggctgctcccaggcacagggcgcctccctggtggaaaacttgaccccaattttacccggcacgaccatccgaccctacgcgtggagacccagtcacggacgaaacctggcacgggggacccgtccctccccctgcagacagaggcgccctggccgctccccacccggcctcgctgtctcctcccgggcagccgcattgtcaccctcaaaaccgccggcagcacctgttctcccatcaatcacctcaccaggccgggagacattctttcccctcccgctccacgcggcctctccttctccgagaagcctggacgccactcccaacagggaaaggtcggggtctcccccgcgcccccagcgccgcccgttccccctgcacccgccgcgcccctcacctgcggcattggcgtcctcctggccctgccgggcgcgtggccgggcatctggatgtcgaacagctcctgcagtgcggcctgcgcggcctgaccccgggccagcttcttgctgcgccccgagccctcgaacgtcctgccgtccacgctcacggccatcacgaagctccgcgcgcgccgctcggccggttctgccagacacacgtagcgcagcccggcgcgcaggcggttcagcagcaccacggggttgcgctcgcccggggccgcgggggtggcgggggtcgggcccaccaggtccagcgcgcggcacagcagccgccgtcgcccgtaggccgcggacagaagcgcggcgtccccggggcggcctcccgcgagtccggggcgcggcgccgggggctcgaactcctggaagagcgtgtcggggaaatcggcctggtcggaggtgaagtccgtgccggggcccgggcccccgcccatggccaggtgcgcctggcaggcgttggggaactgcacgaaggacctgagtgccagctccgccgcgcgcatcttggccttcttcttggtggggcctgtgccctcgaacgtgagcccgttcacctccaccgctaccgcgaagaccggggcatgcaccgggcccgtctgcgacactgtccggtactgcaggcccggcctcagctcgtgcagctgcaccagcgcgttcttgggcgccaccgaccacgacagcttcttccagaccagctgcagtttgcacaagtggcccccattcccctcctccagcggccgcttcctcttcgcgccgggcgcgccgccccgggcccggtccccggagggcggtggccgcgcggccaggttgcccacgttgcggttctccttcacctccgcgctgctggtacctggaggggagaacagaccagtcaggagcctgggcgggcgccggcaggtcgatgggcacagcaggcactccctgagggtccccgtcccagcgacctcgccgcccgcgcccccaggtcaggcctgagaaatgactgtggccgccagagagagggagcccctgggagcctatggcccatgcggggaagtagcgtccttggtcccttgctgagggcctgtggctaggagctgtcgtcttctgggctggctcctgttttaagtgaggctgtgtctcacaaacagacaagcgcccctgactttgtacaagttttgggcaatgtcaaaggtcagagaggcctttcccggggtggtgtggtctagtgtcccccttcccacctgctacagggacctccaggcccggtgcccaatgcccccccaatactgagggtcagggggtccggcccccaaactctacttcctcactcacagctagaggcagacaggtggtgtctcctgagaactccctggaggaaaccctaggagctggcccaggtgaggcactgcggccttggggtgagtccctggcctttctcctggagaaggggcacacctattcagtaaatacggttggtcctctgtattcctgagttccccatctagggattcaactaactgtggagagaaagtattcgggaaaaaatggatgaatcactacggaacgtgtacagacatttttcttgttattagtccctaaacaatacagtataacaatgatttgcatagcgtttacactgtattaggcagtatgcgtcatccagagatgatttaaagtacaggcatgcctccttgttcggcttcccaggtatcgtgttattcactaatccaaggtttgtggcaaccctgagttgagcaactctatcagcccactgatcccacaccatgcgctcaccttatgcctctgtgtcacattttggtaatttttttttttttttttttgcgacggaatctcactctgttgcccaggctggagggcagtggcgcgatcttggcccactgcaacctccgcctcccagattcaagcgattcttctgcctcagcctcctgagtagctgggattacaggcacccaccaccacgcctggctaatttttgtatttttttagagatgggatttcaccgtgttggctaggctggtctcgaactcctgacctcaggtgatctgcctgcctccgtctcccaaagtgctgggattacggatgagagccaccgcgcctggccacattttggtaattctcaaaatatttcaaactttcccattattatatctgttatggtgccctctgatgcctgatctttgatgttactatggtgattgtcttggagtgtcatggatcgcacccacttaagacggcaaacttaggaactgttgtgagtgttcccaccgctccacggaccggccgttccctcatctctctccctctgctcaggcctccctgagaagccccaatattgaaattaggccactgaataaccctgcagttgcccctaagtgtttagtgaaaggaagagtcactcctctctcactttaaatcaaatgtagggagaaggcatgatgatggccaagatgggtcaaaatctggtcccttgcaggaacccaggccacttgcttggtttctgcccctgggagtcttaccaccttcatcagactggcaagcactttaaaaagacctgtaatgtcgcagtgttttcaggtaggtaccataggtcggtggtcaggagcacaagcacagctcctttggaaagcattttgggagcttcgggcaagaataaagaaacacacaccttactcagcaattctgccactggagatgcatcctagagaaaccttcatacacagaggcagaactgaacaaaggtgtgcactgcagcatgctttcacaaaactgaaaactttgaaaatgcccaagtttctatggttagaggaatgatgagtcatcagtgaaataatcacactacagaatactatatagcagttgcatgtaatggactatgtctgtatgcttcaatgtagatgaatctcaagaaataggatgccagataataaaattgacttgcaaagtaacccataggataggatattattataagaacaccgacgttctatattcttcatgcagccatgcgtctgtgacaaggctgctgatgcgtgggtaataaagatccagtccagtctcccctggagagtgtaggagggaagtgcaatgaggggctggggggtgacttcacgtgtgacttcagtgctttatttcttttgcagaaaatgctctgaagtccatttagcaaaatcatcatttgccagctggggtgatgaatgcatttgatgatgatttaatttttctggactgaccatcctggaccactgttttctggcaaagctgttccattagggaatctcagccatggatggccccacgacctgctgggtccatactaccctcgctggtgaatgtgcttctggaaggctccatgagggtttactacaaaatactctgagaattatggtagtgagctgtgcccttgccccaccctgaggcttggctcatgcagaacctggactttgctgcttcccattgccccagtcagccctggggagggtattaatgtccgattttctcagtggggaagttcctttactgaggttgcagagtttattagttggtcgcagtgcagttcagtcctaggcatcggatcaccctcgtctgtgttgttgctgtaaaggtgattttatggaaactgattacttccatcattgtcttggcctatgtacagtaacacccttttctgggccctctggaagaggaagatgaagctgagcccacaggctgccccacgtgtgaccggatggtgagctgtcccaggcaagaacacacaggcttcccttcactcattggctttgtccgtggggacaggctcttctgccaggtgtggatgagttttttctcattaagcaagtggaaacttgaggcaatttttacagctaacccacaacttagaaatagaggttgagtgcggctggatgttgacacgtgcatctgctggccatgtggcccgaaagtcaagcaggaatgaggcctggctggcccagccccacgctccccgcccctcagcttatgacatcgttgttggagaataataaaaacatacatttcataggcacaaaagatgcccttgaaaatcaggcacctttgcgaggtatcctgacattggagaatgttcttctcacgttgcgcgctgcctgcccgttcagctcggggtgaaaacatccggctcttggcctcagctatcaccaccacctgggttctcctgccgaaggctctgggctctgctttgaaagtgctctctgtttgctaaaatctctatttctcatttgaattttttgaattgtgaggtggctctgttgttttctctggcaattatgtctaaaaaagtattaggtttggggaggtaattttgttcaaaatgtggatctgagagcttgattagttataggtgcacaacattcatttacagttgatggcggcagaaaccgttaccttctgaggagaaagggctgagtgcaaatgcttttgttaatcattatgcactttgggtatacatatagcactgctctactgttgagtgtgtttcaggccaagggtaagcagatgagattaaccatgggattttccaaattgaacttaaagatggagcaaaaaacccaacaagatcaaccccccaaccccataccagattgcatagagatttgcctggtactctgtaatttcttattgatttctcgcaaggtggggatggacgagactgtcagtgtgattacagtggctggcgttattgcatgacctttgctggatctcagatcagaactcacagcaacgctttgccgctagctgcgctgaatgcctcttcctgactcaatgtcctacgactctcagaattaaagttttccatggtataaaccatgaatgtcagattgtggtataagagcctctttcataataatcaataattgataataagagcatacttcaggggcctgtcctggacacaccagctgggccctctggggggtgatatcacctgattagggtttggaatcctctgcacaggccccgattcccatttccctgacgtgggagcccagcacagaggccacagcccagcggtggcctctgcatggagctgtggggaacgggggcgcaggggacactcgggctctgctccatcgtccaggggtacgtgaccctgggcaagtcactcagtctggccaactgattttttaaggcagaaaatgaagatttaaaaaatatttgccttacaagtttcttacagggacaaacggaggcagcacatcaatgggctgagtgagagtcggccgtgagggaacatgggacgcattttgaaaacacagcagggaaatggtggggcagacacttctcatcctcctctcagccgcatctcgcccaccttgcttctctctgtccgggccctacttctctccctgctcatctttttccctgagcttctccgtgcactttgcaggaattccagggaacctgaaagaagggtttccagggcctcatgtctgcgagtcgcgagctgtggctggggttgcgtctccctccttgagaggagtttttgagggagttttgctccctcagaagggccgagagcagcattagcttttccacacacaacaaagcctcctctctctctctggttggcaaggcaagaattcgttctcacaaaaccttccagaacctactgagtcaggtaacagtgcaggtgcctgaggcatacgaagggaaaaacaggctttgcctctttggtccctcaggcccaagtgggagaagccttgacactatgaccctgtgacagtcctggggccgggctgggtgagggtgggagccgagctcgccctgtggcagtcgtggggccgggctgggtgagggtgggggccgagcttgccctgtggtcctgtggcagtcgtggggctgggctgggtgagggtgggagctggtcctaggggagtggcgctctgggctctgaggctgttggaaaatggaggagctcacgtccaggtgccgcccctggcggcctcttgctgtagtgactgcatgtgaaccactcacagctttaacgccgactttacaaattaactttttttccttccacacggaaggtattaaatgtgttagactcccctccccgacccaggaaattggtctcatttttttctccatataatcaacaggtttctcacactcagtcatcgtatataaaaacctagagataaaacatcaggagaccaggaaaacacctgcctctaagtagaaagctattgatggaaagctattgttgacgcacctgcttggtgggtcttagatccgaattcctgcactcaccagggtctctactcaataggccacaccctgggggtgaggggacctgggggactatcggcctcccctcttcatgctgccctgtggaagttaccccctggattgtgtcccaaacccctcactctttctctgtgcgccccaagtctgggtgttcccgctggccagcagggaagatgatagcggctgttacccacacaaaaggcagtggaaggtgcaggtgatcatttgcttgactgtggtaactacttcactaagtgtaagtgtaacgaaacatcatgatgtacgcctgaaatatacacaataaaatacattttaaaaagtcagcctgacttaggctcacaaagcctgattagcccaccaatggcagctctgccctttttccgagagggtgggcatggccacgcccctcctgagtcatcccctctgtctctgatccctagagcaggcacactgagcttttccctggctcccactttttgtactttgtccctgtcttctctcaggaagctgtctccaaagctcgaggcacagattggtgaatggactcgttgtctctggggcacagaggtggattccagtggctgggtgctggcagtgtgacctggcccatcacgcggttcacaaatggaacctaccacatgggccttgttagatcaatggagacagtgcgtgtaacagttttagcattctctgtcaaatgttgcagacactcagaatgcgtgatttcagcaacacatcaaaaagataattcatcatgatcaagggggttttattctagagatgcaaggatgaatccgcatctacaaatccataaatgtgatttaccacacaaacagaactaaaaacaaaaaacatagggtcatctcgacagatgtataaaaggcatttgataaaatccaacatcccttcatgataaaaactgtcaacaaactaggcattgtagacacatacctcaaaataataaaagccatctatgacaaacccacagccaacgtcacacttaatggggaaaagttgaaagcatttccctaaggactggaacaagatgatgtccactctcactacttctacttaaaatagtactggaagtcctaaccagagaaatcaggcaagagaaagaaataaaagacatccaaattggaaaagaggaagtgaaactatctctgttccctgatgacataaatgtgtgtatacctaggaaaccctaaagactcctctaaaagactcctagacttgataaatggcttcagtaaagtttcaggatacaaaatcaatgtataaaaattagtagcatttctatacatcaataatgtttaagctgagaaacaaatcaagaactcaatcccatttacaatagccacacacacaaaataaaatacctaggaatacatttaaccaaggagatggaagatagctacaaggagagctacaaaacactgatgaaagaaattgtagacacaaaccaatggaaaaccatcccatgctcatggattggaagaatcagtgttgttaaaatgtccacattgcctaaagcagtcggcagattcaatgcaatctctatcaaattccaacattatttttcacagaattagaaaaaacaatcctaaagttcatataaaaccaaaaacagaccctgaatagctaaagcagtcctgagaaaaagaacagatccagatgtatcacattgcctgactttaaattatactacaagtctatagtaagaacaggatggtattggtacgaagatagacacatagacccacggaacagagaacccggaaagaaagtggtccgtctccagccatctggtcctcaacaaagctgacaaaaataaacaatggggaaaggacatcctagtcagtaaatggtgctgggaaattggctatccatatgcagaagaatgaaactggacccctatctctcaccatatacaaaaattaattcgacgatggattaaagacttaaacataggacctgaaactataaaaatcctacaagaaaacctaggaaaaacttctggacattggcctaggcaaaagatttatgatgaaggccccaaaaggaaatgcacaaatccagaaacagacaaagtggacttaattaaactaacaagcttctgcacagcaaaaaataaaataaagtaaaataaaaaagtaaacagacaacctacaaaatgggatgaaatatttgcaaattatgcctctgacaaacggctaatatccggaatctgcatggaattcaaataacttagcaagaaaaaaccaaacaactccacaaaaaattgggcaaagggcatgaacagacatttctcaaaagaaaaaatataagcagccaacaaacatatgataaaatgctcaacgtcacaggggaaatgcaaattaaaatcacactgagatgtcatcttaccccagtcagaatggctattattaaaaagtaaaaaaaaaaaaaaaaaaaaaaatccaacatgtttgtgtggatgcagagaaaaggggatgcttgtgcactgttggtggaaatgtaaactaattccacttctatggaaaacggtacagagatttcttaaggaactaagaatagaaccaccatttgacccagcaattttactgctgggcatctacccaaaggaaaagaaaatcattacataaaaaagacgcctgtacgtgtatgttcacctcagcactattgacaatagcaaagacatgtaaccaacctaaatatccatcaacagtggatgaataaagaaaatgtagtacatatacaccatggaataccatgtatccataaaaaagggtaaaattatgtcctttgcagcaacatgaatggagctggaggccattatcctaaatgaactaactcagaaacagaaaagcaaatactgcatgttctcacttatgagtgggggctaaacgatgggtacacatggacataaagaagaaaacaacagacactgaggacttgagaagggggagggaggaatgggtaagattcgaacaatcagctatcagtacaatgttcactatttgggtaatgggtacactagcagcccaatccccaccagggtgcagtatacccacgggacaaacacgcacatgtatccctaagcctaaaataaaattaaattaaattaaaaaaaagttttgaaatgacctatcaaatgttgcaggccctcagaacacattaattgtgaccatgaaagacactgtaagctgccaacaccttttgagggcatgaagagggaggtgtggggcccatctcacagggtggtgccagggatttgggatcaagaggtttgaagggcctgcattataaaaatgatgtgatttggaaaatgcatttatttgcacttggaacaattcaaatagacagttcaaaatagagtataagaattggtgattcctttagtccactccgaaatttattatcccaaataattattattcttgccggtcataattgcatactcatagtatattagagctgggagtaggtctgcaagaaactcatatgcttacaccagggcagacggggaacacttgctatgttagctgcacgtcaggattcttagaaaggtttagcatctaaccaaggagatgaaagatagctacaaggagagctacaaaacactgagaaaagaaattgagacacaaacaaatggaaaaccatcccatgctcatggaatagaagaatcaatattactaaaatgtccatattgccccaaacactcagcagattcaatgccatccctctgtcaaattgccagttatttttcacagttagaaaaaacaatcctaaagttcatatggaatcaaaacagatcccgacttgacaaagcagtcttgagaaaaagaacagaggaggagagtaccactctctgtctgtctccgtgtctctctctgtctctgtgtctctctcggtctttgtctcactgtgtctctctgtctctacccctgtttctgtctctgacacacacacacacacccacccacacacacacacacgcgcgtcttgttggtaaaggctcctcagagtcactcactcagactggaaactgattcttaccaacccctggagggctccagctggtaaacagtgcctgagtgtgtaacataaccagtgcgtgtacgagtgtgtgcccgagcatgtgcctgtgtgtgcacatgtaattgtgcatgtgtgactgtgtgactgtgtgcatgcgtgtgtgtgtgcattatgtatactttgtgtggatgtgtgtgtgtgcatttgtgtgtacacctacatcagctgggtgggaaatggcaggggaactgagcagaaagcaggatggcatggtggccctgggagacagcacagctcccctgccctcttgccctcactggggctcacaccacacttcttctccctggaaaattcctgatgtggactccatgcacctttcctaatgagaccacgtggactccgcgcacctttcctagtgagaccgcgtggactccgcgcacccttcctagtgaaaccgcgtgggctccgcgcacccttcctagtgaaaccgcgtgggctccgcgcacccttcctagtgaaaccgcgtgggctccgcgcacccttcctagtgaaaccgcgtgggctccgcgcacctttcctagtgaaaccgcgtggactccgtgcacctttcctagtgaaacccgcttccagtgagactccgtgggtggcatcccggccacccacgccctggcatgtcctcctgcctctgcaccccagccaagcacctcattctggagacctcttagaatgaggcatctgtgaactgtggcttctctgaggtctttgtgggcggcaccaggttttcagagagctgcacgtatccttccactgtagaaattagagaaaagcaggcaaataatttggaactattgataaataccacaagccagggtcataggacgatcatgagcaatttgaaaactcagggaggcatctgcatgggaaaatgcaaaatgaaatgatttccatccacttctcccacgggcaccctccagagcctcatacgcacgtgaccttgtttgatacggtgtccggaatgtggtgctaagtctaaagttttaacgcattaaaggacagcatctgggggagaaaggccaacgctttatattgtcatgactgtggtgaaacttttgctttccaagtggaagctgttccggttgtgcaaagccggatggcctaggctgctgtctttcaaaggtggagagcatgtgcgggtggggccaggccgggtgggtctgccctccctctgcccgccgtatgcagcgctgcgcttgctccagagctcaggcatcctctcctctggctcccgccgtccgtcctctgctgggccgtttgcacgcccggcttcccctgtgcggtatcattgggaccgcatgcatcactaatgacgctgcgtgcctgcgggtcagacgggctcccgggagttagtcaggcagcgcgccacgctacattggaagagataatgttgcttctggtgaaggttattctgcggccgagcagccctttccctccatgaagccccacttagggaggggaaggcaggtgcctgggttctccagggcaaggcagagggtctggaagcgacaggaggcaggctggggccgggggtgggaggcagtggctcctggcatttgtggagtggacactggcaggctgggcagctgcagaagggcctccttcaaagactcgtcacgcaggaccccatggggctgggcctgtggtgcatgggactcaggaaggagcaggtgcggctgtcaggaaacctcttttcagcacaactccagggcccagggccgcctttgtgccgggcagccttgggctcagctggtcctcgcagaactgggtcggatcccaacctctgggcggtggtcagcagagaggttacagtggccagatggcagggactcatggctgctcagtgttggaagagaaaactcctcagaattaactgccccagggcagacacgccttacaaacgtggagttgttcggtccactcagcccagaccagcctgtgggtgatgggcttccagatgcggctcccaggcccacttcccgcaggtataggcatggtgtgtgccctgtgagcctgttccccgctctgcacccttagatgaagggcactcagtcccagacaaaagccatgaccctgtgaggttgtgggcatccagcatccacagggaagcacatggtattccccaaaggtgcaatacacgccaggtgggatgagaactgtcctcgtattggagcccttagacacacagactcacagggtgtgaaacacgggagaccggaggaggcagggcaaggtcatgtgtgctcctaccacccacccttgctcctgacatatgtgcgtgcacacatgtgcacagattcacacgccacacacatgcacacacgcacacatgtgcacacacatgcacacacgcacacacacaccacacacatgcacacacacacgtgcacacaccgcacacatgcacacacatgcacatgacacacatgcatgtgaactcccacaccacacacgtgcacataccacacttgccacacatgcacacacgtgcacagacacacaccacacacatgcacacacacacatgtgcacacacacgcacacacacgcacatgacacatatacacgtgaactcacacaccccacacacgtgcacgtaccacacaccacacataccacatgcatgaacacacatcacgacacacacacacacacgcacatctttttctaccttcccgtgcatctggattacaaatggataaggccgcgctggcaatgccacagggatctaggaagggagggctgattcatttgccggtttgtctttgaacaatctatgaaaataaagtaaataaacagcatctacacaaaggggagcaactagtacattggttgaaaatgagactcctcaagcatttcaagagcattttaactaccataaataacttaaagttattgttacctctaagtttctacccattagcatggaggctctgagagttacataatgttcacagcccaaggcagcttggctgccaggacagagcctgaaaggcttccagaaagtccagaaagtcttggcctcatcaggccctctcctctcctcactgcccagtgtgggggttcttatgggagggcagggggaaggagaagctcctacgtggggtgggcacgtccctctctcaggaatctcacgggcagagcagtaactttcccatgtagtcaggtggtttatttctccaggtcttggcctctagttgctacagaaaggcggctgctgcacctctgtaagtttgaaaccattcgctccgcaccccaaatgtcctctggcccttgctgaagcttcatttctttttctcctgagggagaccagctccagccgggatcccagcagctccaggtgtggaagaggaggaaacagtgaacttccccttcccacgtgtttccaggtccacacgtcaggctcagctttggtggggcaggggggtgggtggggggggttgtgtgctcctggggtgtgtgtgtgcgcatgtgcttgtgtgctcctggggtgtgtgtgcgctcctggggtgtgtttgtgtgcacccctggggtgtgtgtgtgtggtgcgtccctggggtgtgtgtgtttgtgtgtgctcctggggtgtgtgtgtgcgcatgtgcttgtgtgctcctggggtgtgtgtgcgctcctggggtgtgtgtgtttgtgtgcacccctgggatgtgtgtgtgcggtgcgtccctggggtgtgtgtgtttgtgtgtgctcctggggtgtgtgtgtgcgcctctggggtgtgtgctcctggggtgtgtgcgtttgtgtgcgcccctggggtgtgtttgtgtgcgcccctggggtgtgtgtgtttgtgtgtgcccctggggtgtgtgtatgtgcgtgtgctcctggggtgtgtgtgcacacatgcacatgcctggtgtgtgctcctggggtgtgtgtgtttgtgctcctggggtgtgtgtgcacatgtgcatgtgcgctcctgggttgtgtgtgcacacatgcacatgcctggtgtatgctcctggggtgtgcatatgtgtgtgtgtgctcctggggtgtgtgtgcgcatgtgtgtgtgcgctcctggggtgtgtgtttgtgtgtgctcctggggtgtgtgtgcacacgtgcacatgtctggtgtgtgcttttcactttctctatcccagatttcagaagtagtgatcaataaatggactcatctggaaattttccagtttgggtcaccagagaacagaagcaacctgtgtcaaagcttagcttgaatctcaagctgtgctagagagggagcacagagtctgggcccagccctctctagtgccggcacaccctcctcctaaccccctccttccacgtctagaagagaaggggtccaaaagagggcattgaccttcgctctggtcctgacactcaaaggctgtgatgctacttttgcagaacaacctccatttccagtatagttaattattatgctgtctgggaagggctgtgtttcccacgctgatggcaaagtacacggctccccttgcagacccctcccactgcctcttgttggtctgaccagcaatcccagggtcacctcgcctcctccccatcccgtgacaacaggcgtgtgctgacctcttcctggttgaaaaaggagccatttgccaggtggtgttaaaatttgaggagctgttcacatggtgtggaatgtctcgtcttctttgttaaatgcctgacaatttgctgtgaaccagaggccagctcctgcagccacacactcctggatcctcacccctgcagtctgctcccgagatgccgctcagatccctttcctaaaccagcctggtgccatcctgaggacactgcttggcccctttccagtttcatgtgccagaaatatttgcacggtgtaggggggctcctacccagccctttccttgttaaatacttgtacaaaccgcgctctaagacaccgtgaccatttttctttctggtctgatggaaaaacaaaggaaggagaggagagaatagtccaagaaaactggttaatttcttggaataatttctcagtcccagagacattactgacactttcctgccctttaggtaaggaagggatgccaggtgaggatgggactgcaggtgcgggtaaggttccaggtgaggataagattccaggttaggatggaactgcaggtgaggatgggactgaagatgagaatgggaccacaggtgaggatgagactgcaggtgtgggtaagactccaggtgcgggtgggaccacaggtgaggatgacactgaaagtgaggatgggaccacaggtgaggatgagactgcaggcaagggtgggactgcaggttacagtaggactccaggtaaggataggacctcagatgaagacaggattgtaggtggagataggattctgggtgaggacaggacctcaaataagaaaaggattccagctgaggacagaattgcaggtgtgggtggggttgcatggaagatggggattctgtggaggaatgagagcagatactgtctctccaggtaagaccaaacagaccctcccagatgaccccaggtatctcaggttttggggactgcaggggacccctgcacaaaggatacaggggcctttgtgtacttcggggaagggaagttgcttactgagggtgtcgtcatcctccgtgtttgtgatgccaggactcaggtgcttgaaaggagcgaggaaggttgacaatatgcttactttatctggaaagaaaagaacaggaaatgcacttttgacatggagttgcggaaaaactcaatgcttttataagttcttattactgaatgttggacaagggaggtggagaggtcactttggtttcagccatttcattctggttcagtcttttattgaatatctgacagcattttatcaaattcctctctccactcaatttaaaactctacgatttccttctttctccttctcttattttggcatcccccttcatcttgcccatgtcccttaaaacttgctatctccagggcgacaaccttgcatctgtttacaaaatcctgggtagggcagagccttctgtcgagatcatttcacagagatgggctaaaacaagtaaaacaatctcacaattaaaagagaatggtgccaataaagccaagactatcttttcctattagtgcagaatttgctttctgggcttgacatgcattaaaaataaaggacctgtcacttagcgggtgtttggcagaagtagaggaggggaggagggagctagcggtgtggggcagagcatgcacagtcctcccggaaacggccaagcgtcctcaacgcggtggctggaattccagggactgcctctgcctgaagcctgtggccaggtaagcaaaggccaagcaggtcctgcctcctgggtccctaccacagtgagtgcagcacagctgtggaaatagatccaaccaggagatgccgctcttcaccaataaagtatgcttttttactcccatggtctcagcaatttatttcatcaatagcgagattaaggaatggtgggtttgaggtatgattgagagaaataaaaatgactaataaagggatccaaaagaaaagctccttaatttggagatttccaccacctaaatgaagccaccgcacttgggagtattggttcacacggcagaactcactgcactgcagaggagacgccaacagagacacagcacagggatcccctggctcccagacatcctccagcccgcacggttcacatgtgccattatgaacctggaccacactgattaagacgccccaggtggaaatgtcagcgttgctcatccaacacggtgcagagcgcgacagaagcatgtcctagcatccctgctaagttccagggcactggctgtggtattggctactttgctaagtgggattcttccctctgttttggaagctgtggatatccgcggacgggatttcccaggaggtcactgagtttacatcaccctgtaacaaggacggctgtccacaggtgccccaccgtggcactgtatacctccttcagtgtgatttctcaagaaaacatgaactgctggtttcatctgcccttggccttcaggcgtccagactcagcctgaaactggctctttttcttttgaggctgagcctgttttctccttagccaagatttccagagtccaggagagttcccattgaaattcattcgggagcctgttaacagctgttgtttccagtagggacgggcaacagagagaacaataaataactcaaatataaaatgcctttaccttctttgttctaccgaacaagaataaaccagggaagggtttgctctcctaaacccttgcagccgaagctaatttactaccagagaatgaaatatcttgcttgaattataatttcattaagggagtccaataatgttacactaagagtgtgaagctcaaatgattcagtctggaggatctcaagatgaaattacatttttaataaagtagggctaccagccaaacactcacaaaaatgcactaaactatttcagactttactttagcaaaattgtaagatatttaaggattgttttagatccatcaaagttgttactttctgatgttgttagatttatcaaataaaaattcaggacatccagttaaaattgagttttagataaacaatagacaattttttcatatatagtcatttctaatattgtgtgggacacacacatatatatttgtgcatatacacacacacacacacacacacatatatacttaaaaaccttattcatggtttgtctgaaattcagtggaaggcaaaggacttcaatagacatttctccaaggaagatgtactaatgtcaataagcacatggaaatgtaatcaacatcactaatcattagggaagtgcaaatccaaaccacaatgaaatacctcctcacacccattaggatgtttattagaaaaacaaagcaaagccagaagataatgtgttggtgaggacatggggaaatgagagccctccgggaatgtaaaatgggggaactggcagttctgcctgctggcgggtcaatgcccaaataatggaaactcaaggagagatctgcatcctcatatcctcggcagcatcgtgcaccagagcccagaggtggaagcaactcaagtgtccttcagtggatgagtggataagtgaaatgcggtacagccaagcaacagattaggcagccttaaaaaaagggaaatcctgccatttgcaaccagtgtgcatgaaactggaggacctcatcctaagtgaaatgtcaggcatagaaagacaaatactagtgcatggtctcactcacacgtggaatctaaaaaagttgaattcaccgaagcagagagcagcatggtgctgccagggtccatggggtgaggggagaaaggagagagtgaggaggtgttggtctagggtacaaacttccagtgataggatgaatgagttttggagtcttaatgtgcagcatggggactctggctaataacatgtattgcccacttgaaatgggataaaagagtggattttaagcatcctcatcccccacaatggtaactatggctggtgacagatgtgttaattaatttttggtgatcgttacccaatgtatatatcaattcatcgcattgtacaccttgaatatattcaacttttatttgtcaaataaacattttaaaattaaaataaatatggaaaaaacaatggcaaaacaaaatcaaatgtaactgggcatcctgtattttctctgacactcctagttatgcctaaccaacttctctttccacgagtgcagtggacttcagatttcatgggacagcttgagcaaccaaactgaagcaaaggaaacagaaggccagcagaattgctaacacttatttattgctaacaagtacacctgaaattccaactatgatctgcaatcaccgtgaaggcacataagctctgggagagaagcaattatttccaagaaagggcagaccgcatctttagagtgttcttagaaaagaggtgaagaattacatttttaatatagaaaaagtacaacagaagttctttggcatcagggcctctctttgtggtttcctcggaactcattgtccatttgggatctgatgtatattctgttagttcaatacgagtggaactctgatattcagctaattcgattttttgcatgtttctcattgtcatcttttggaaatctggttttactcaagcttctgatgaaaaaaggatgccatactttttttttttttttgcctcagttctggaccttcggagtgtgccaggagaagctgcatcacagggctccccacgctaccgccgcctccccaccctctgggtaatgcctagaagaggcggctgggctggccaggtgttactctagaaacgtcaggggtcggctgggcactccccactcctcagctgctcacatcctgggttcttgagctcgggctcccatcatcgaatatggaccagctggaaactgacctgggggacgcagtggcctggggccggccctggtctaagagtcaagagtctttttcaggaaaggtctgatggccgtttttaatgtacgacttgtaagttccaggacacttgctttataaaccttgttactcactgtggaataaatggcatttacctgaagcaattttatgtattttagggggcatctgggtgcacatctggagggcacagcagcccttgcctggaaccacgtgcagccatgaagtgcagttggcatctgcaacactgaggttctgaggttattgtcggtttttcatattacgaccgtttgggagaattactacactgtcagggctgagggaaagagatactcactggaataatttttaggtattttcagatttcctaatcatcttgtttagaaacaaaatgtcctgagttaatagtttacttattgtttcttgttaacatcttggggtgaggattttccttgagtatgattaaaaaaaaaaaagcgatggcttattttccctgaaaggcacatgtggatatgccagcagtttttcatgcaatatcaggaattcatgagtcccctgaattcatcgccttccccagaatgcttgatatgaattatcaggctttaagaacatgtggttgaagtattaggtgttagtgtactttgaaaatcaaaataactgcacatactgaggatacctggttacttggttattagtcacactgcatagtcactgggacacgtcttagctttcttgatgtatttattctgcaaagaatctgagacattgagaagttagcggatgtgcccaggactatctataaggtcctcagcacgtcccaggcttccagcctacagttgccttccacactgagcaaaggctgcttaaggagatcctcattttcctatctttttctgcccgagtaaagtttatccttgtagtggctgctgaattttctggatttttcttccttgcctttgcctttgttaaattttattgaaccttctatgtttcatttatcctatctttaagatcagaacagcatctttgtttctcgggccacaaaaggaagaatagtgcaataaatagtttttaattcaagtatgaaaagcatttaaatttagggtctggttaatattttgtagaaaaatcagatggactctcctctctgcagaagtaatcacatacgatgtgttcataaacaagttactggggttggctaaaagccccagggatagacggtgcagaggaacattccctcattgtgaagaaggagagccagttctctacgcttcccggtccaaggaccgtgactcaacaccattagcagagtggggcacagtgagttttcagttctgtcttaccaaattctttctgatctattgaaaccaaaaagggaaatggtaagtgcattatagcctcctccaaagtgagtctggagaagacaggagtgtgtgaagtgatcttgagcccacatcacagtcctagaaagggcaggaaggaaggctttgctggccgtgaatggacaagcctctggccaggatgagggagttgcagctcaccagctgtctcattgtaaacaacagcaaaactggacaaagtctatgaaacaaccgttttcagagtttggatgccaggcagtgcgtgaccattgttcctgagaaaaggaaagcatgagagtgcaccccacagctccacaacttcccacctggaagctcttttcagcagtagaaaagtggacctggagaagaacacagcagcactgataagttgagaaggcaaaaaccaaagtttgcactgctgagacaactagaatttgagggcagaaggaagctgcttcagagatctggtggggccactgctggatttggttgagactcagccccacatgagaaggagagactcagatttcacagagagcagtggctggggacctgcgagctgaatgaaaattcaaatgatggcacaatgctgaaagtctggcattctgatcaggcggagtcatagatcactgaagagctaggattcagctgggattgtaaaaaggtcatgttttaggactaggaatactctagtcctagattaagaactgccgtgaacatgcgctaacaaagacttaaaacaagctttgaaatcatctagttgatcatttcaactagaaactggtcagtaataaactacccttggtcagtaataatctacctgctagaagaaaactcaaggaacaccgtgaaatccatattctgaacaacatggtatccacaaagcccagcaaataatgatagagtaatagtaatgacattgctagaagtgagaagcagcaggagaatatgaccaatcatcagaaaaaaatatagtcgaagtaaaaagatctaatgatgctgaaattagcagataaggacattaaatagatgttagaaatatttttaagaatttaaaaataaaggggatatgataagtaaatagatggggaatcttggtagagaaatggaaactatataaataaaacaaaaattctcaagctcaaaaacataacatttgaaatgaaaaaatttactggatgggtttcacattggatatgtcactttgcaaaacatatcagtaaatttgaaggcagatcaatagaaacaatcaaaactaagcacagggagaaatagaaaaggtgaaaaaagtgacagactcaacgatctgttggacaatataaagcagtctaacttatgtataattggaattcaagaaaaaaatggaaaaactgttaaggtagaaaatatactttaaataatagtttaaaagttttcaattcttttagacacatcaaatcacagatccaagtatctcaatcaaacttacatagaataaatctgaagaagactgtaccaatcagcacagccagattcctgaaaacaaaagatagggaaagtattttcaaagtagccagagaaacaggacatcttacatacagagcaactgcaatgagaatgacagaatacaaatcaaaaatttgctaaaagactattaactctttaaatacaagataatgacagtgtactgtaatgtttattgtatatttagaaaatatataaaaagagcagcacacaccttgggatggggtaaatataattattctgttgcaagtttcttcctttgatcatgaggtagttggctatgataagttaaacatgcatgctttaatctctagatcagtcactaaaaataatacaaagaggtatagctaaaaagtcaacagagaagataaaatagaatactaaaaaagattgatttgttgaaaaaggcaaagaaagagaaacaaaaaaattgaataaacagaaaaaaattagcaatatggtacacttaaatccaaatatatcagtaattacattaaatgtaaatggactgagtactccaattaaaatgcagagatattcaaattgtatttaaaaaacaaaacttatattttttattgctacaaaaacttacttcaagtataaaaatatagacaggttaaaagtcaaatgactgaaaaagatacatcatgtaaatgcttattttaagaaagatggaatggctatgttaacaatagacacagtagttttcaaaatatgaaatattgccagggattaagaaagacatatcacaatgatcaagtcatcaagataatataatacttgttggtgtttatgcactcaacagagttttaaacaacatgaataaaaaactagcaaaatgaaggagggtagaaacatacataatgctagtttgagattttaacattcctcccctagttactgatagaacaagtagtgagaaaaaggtggtatagaacaaaaaattagaagaactctaacagctaacttgacctaagttacatttatagaacactgtatagagtatttgctgagatggactgtacactacaaaataaaaaaggtctcaataaattttataggtttgagatcataaaagtatattttctggccacaatatagttatgttaaatatatgtaacaaaaagatatatggaaaatctgtatatactcagaaattaagtatcaccattgtaagtgacccaagagttaaaagagaaatcacaggaaaattaaagcctctttattctcagtgataatgaaagtataacataacacaatttgtgaaacatagttaaagcaatgctgagagacatattttagctctaagtttatgcttatattagaaacaaagaaacgtccaacattatctaagcttccactgtcagaagctaaaaaaagagagtacatcaaaccaaagttgttagaggaagaaactactaaaattaatagtaggagtcaaaataggaagtggaaaaaaatagggaaaaaaccctaatgaagcaaaaaaattggctccttgaataggtttgataaatctcaagttagattaatcatgaaaaaggagaaaaaaacttccatgttttctaattagaaataaatgaggggatcttactatagttcctgcagtcattaaataagaatatgggaataatgtaaactattgtatgctagtcagtgaaaaacatatttgcaatgggaacattctttgaaaggcaaaaactgtcaaagttcactgatggagaagcagaaaaccagaagagtgcaatatatattaagtaaatttaattcatagtaaaaacaacctcacatgtaaactaggctcagagagctccctctggtgaactgcaagaaatatttaaagaagaaattataccaattctgtgcaaaattttctagaaaaatggaagggggtggactatcaaaattatttgatgaggccaatgttaatctaaagccaaaaccaatcaatgatgttataagaaaaaaaacctacagacccatggtcctcacgagcagatgagtttttaacaagatattagcaaatcaagttcatccctatataaaaatgttaatgtatcatgaaccagtgtggttcatcctggaatgcaagattggtttacagtttgaaaatcaatcaatgtaattcacaaccttaacataataaagggggaaaaataatagtatcttaaaagatgcagaaaaaacatttgagaaagacatgccaaacctccacactcatatttacaagctattgctaaaataagttaaagataaataaatagaaagatacaccattttcacagaattcaagattcaatattgttgtaatatcaattgtctcctaatttatctatagatacaaaacccattcttcatgaaaattctcaccacacaaaggactagaagaaaatttcctcaaattgatacaggacatatccaaaagttataactagtattatatttaatgacgaaagagtgaatgatttccttgtggtactgggaacaaggcagggatgtctgccttcaccacttctattcaacattggacagaggtcttagttagtgtcataaggccagaaaataaaagtcatagagattggaaaggaagtagaactgactttatcctcatggcatgatcatatatgtagaaattcctaaggaaagatgaaaacaactaccagaaataataagtgaattcagcaaggtcacaggacagaactccaatacacaaaagtctacatgcttctatgtaccagtaatgaaaaagtggaaaattaaattaataaacaatactgtttggacaaaaaggtataaaatacttaggtataatctgaagaaaaaaaaagacatgccaaacctctacactcacatttacaaacaattgctaaaataagtttaaaaagacctcaataaatagaaatgtatgccattttcatagaatctaaggttccatattgttacaatatcaactgtcccctaatttttctatagatatgattcgatctcaatcagtactcttgttgaaattgaaagataattttgaagtttatatggaaatgcaaaagacccagaatagtcgaaacaatattgatactgcagaacaaatacaatgtagtaatggcgtaaggctagataaataccagtggaacaaaaggggaagtctaggaatagaatcaagtctgtatgatcaactgattttcaacaaaggtaccaaagcaagttgatgaagaaagtctttttaataaatagttctaagaaactagacaacatattgaaaaaaatgattctgagccctacctcacatcatatgtgaaaatgatcacaagatggatcacagacctaaatgaaaaagctaaaactataaatttttaagaagaaaattgaggagattactttcatggttttcatttaggcaaggatttcttagctaggagatagaaagcactaactacaaaagaaaaaaatgacaaattagttttcatcaaattggaaaaattcagcttgttgaaatacactgttgattaagctaaaaggaatggatagattgggatgatatatttacaatcaagatgactgttttgtatccagaatataaaaactcttgcaacttaataataaaggataacaaatctccacttataaaaagtgggcaacatacttgaacagaaacttcactgtggaagacactacaaagacatacaaatagccaataagcacttccaaaagaccagcctgggccacatggtaaaaccccatctctacaaaaaatacaaaaattagctgggtgtggtggtgggtacctataatccctgctacttgggaggctaaggttcaagaatcgattgaaccggggaggcagaggttgcagtgagctgagatcgtgccaccgcactccagcctgggtgacaggcagagtgagactctgactcaaaaataaataaataaataaataaataaataaataaataataaataaaaaataaaggctgacggcgctacatgtttacatgtcagtaaccatgtggaaaatcagagctcatcccctggtatagtaacttcaagaaactttggaaaatgtcttggttgttaaacatacacctttcctacgaattaccacctccacttctagatatttaaccaagataaatgaaatgtatatgttcacaaaaagactcacatagggatatttattcaaactattcgtcacagcttaaaatgggagatattccaaatgcccatcaagagaagaatggatacattaattgtggtgcatttatacaatgaattactcttcagtaaaacaaaacaaaatgagtgaaatattaaaattttacattatgatatagatggatttcaaaagcattatgctgagcaaaaaagtctgggcacaaaaaggaatatgcagtgtggttccatttacataaagttccaggaggctttcagcactccgtggagaaagcagagcatgggcatctctgaagggtgcttgtagattgtggggaagaggcggaagtgggcttctgctgctgaaatgaaaagatgctgtatttagatggggcatgtgctacatgtgtgtctgcatttgtcattggactgtaacatgtgcggtttgtacattttgctgtatgtaaattatacttccattattaaaaacaattaaaaaccaaaaatcatgactggacaagaaaataaatgatgtaaagcaagcctcaaagaattgttgaatctataaagaagaaaattgaggatgatagatattaaatgaagatctctgctaggaaagcatatctgcttatgcctctacttatcggactttgggtttccgttttcttttttattccccctattttatagatgtgaaagctcaaatatattaaaaagccttagacattgcaataagaaaaattacagtctcaaagacaaagtccttcagagccaactttggatttgcagatcctctgcatctacataaagtgaagggggagtaaccagtgaggggcaaacaagagctccagaaagctgcaagctgggatcagaactgtgagcctcaggcctgaaggaaataatgtatacagtggtccatttccaagacaacgtgccttaaatcggcttaggtcagcaaactacagaaaaaacaggatatactaggcccttgcttggatagccaacacctgctttttggctcaccccctgcccccttagttgccctcacctgaaccaaagaagtttagtctaagatgaaagtttactagcctgcgaaatagctcattttgtctgttcttttcagcctgcccagctacttaggtcacaagtcaaatacctgaagagcccctgagctgactgggattgcaatgcattgtgggttgcaataaaatgcagtaagacaaccctaaagaaaacacctaaagctcctgcccaacaaccaataggcgatgtctgggaagactgtgacccccccatagtgctcagcctatgagggactgggggagggacctgtgcactaggggataaattgcttgttgaaactgtgctaggtgtgcctgcccatcagacacctgatcttgcaagcccatcattaaaagactcactatcgctgttctccgggtctctaagtccattctttgggtttggacaagtgagtttgtttctcacaggcccaaccacacatgccttggtggtctctgaggcctcagtttacccacgatgatttgagggactgtgaaaagatcaatgtttttggagtccactttgtggattgaaactctgtttcatttacaaacagtttatcaaacaatttttagcaagtatgatgaaaacttaaaaacatcttttggtgcgtgatgttatgtcagttatctggaaacttattcatgtgaaataacacattggctggaagtttcaataaaaatgataataaaatgataactgccaggatgtctaagaattggattttttttttttttttttttttttgtgagacacagtttcactctgtcacccaggctggagtgcagtggtgtgatcttggttcactgcagcctcaacctcctgggctcaagcgatcatcccacctcagcctcctgaatagctggtgcccaccaccatgcctggttaatttttatattttttgtagagatgaggttttgacatgttgcccaagctggtctcaaactcctgagctcaagcaatctgcctgcctcaccctcccaaagtgctgggattacaggtgtgagcccccgtgcctggtcagaatttgatctaatactctacctcctaaaaagcactaaatatttcataggataggctattaaaaatacataaatcgagcactttgagtctgtccttatttcaaaaattgaaagtgaggtttgcacttctgcctttcccttttgtgggccatgtccattccacatcttgcaaagctctgcactcctgaacagttacataaccgggattggggctgacagttggagtccacagaactctcttggtgccctcaggctacaatacttcagcctctgttacaagtttccttctcatgttttccttttgccaaaacacgctctgacagatggcctccctcaggcttgacccactttctccatagctgtatattcgaacagaatacaggtatgtcttcaaatggatgcacttctatctaaacacaaaagcaaatcagtgtggacaggtggaatgccctgagaagcaaggggatgattaacctccacgcaggcaggaggaggagtaacattgcagacgaaaggcaaggagttcgtctcacaggtttttaggaggaacatgggttttacaacgccatctccaagctcccgtcctatgaacaacacagggagctcaggcaacttttaaagagattctgggtctgcactgtgttttgtaaaacacgagaaggtttgattcttttggtgaatgtttcctggcaatttcagagatggattcataggtttggtcctgaaagcgtccagttaaaacggaggtggcctgcggtgtcagccacatgttcactgtcatgggctgaatgatatcctacaagaattcatgctgaagtctaaccccccagtccctcagaatgtgaccgtatttggagagagtttctttaaagaggtaattgtgttcaaaaaaaaacatacaactcctaatttccttctcaaagtccccacatttgtaggaagtagtctctctgtgaaagtggcagtgagcctctggcagtgacaggagctcctagtagctgtgcatgtagaaacatcacttccaactcatagggctcaaagcagggctagcaactagtcgcacagccaaatttgagctattggtggaatgtgtccatttttcatggtttaatttcttcttctctctgttggttaaaatgtttctagtattttttagttttaatttttgtgggtacatagtaggtgcatctatttatgggacacatgagatgttttgatacaggcgtgcaatgcataacaatcatatcatggaaaacgtggtatccatcccctcaagcatttatcctttgtgttacaaataatccgattatactcagttattttaaaatgcacaattacattattattggctctattcatcctgttgtgctatcaaaaactaggtctttttcattcttcccagttattttttgtgggtacgcattagccatcaccaccttccccatctcatggtttaatttctaaggcattttgttctcttaccaggtagctttcctcaaagccagggcactgggacattcctgtgtcaacactgggacctgtgacagggcacggttttcacagcgactatggtactgtgcacagtctcaaagaccacccaggccacgcgttatgcaccacgctccagctaaccttggaaaaagctgaaacgccaacacagacacacaccagattgttctgtgtgcccttccagatgtgagcggtgggcacagatacaggtggtccttcaaatgattgatgggaaaaggtgactccttgcaagaaagtatatttaaattaggaaaatagtctaaaggtgtgtgttcacacttcacaaggagaaactcacagctttccaaaggattagccaaggctcagccaaatttgcaaagttctagacatgagtgcttctcctgggggtggaggctgcagaagttgcctgacatcatcctcgtcctttcagggtggtgtcctccgtgaactctgccttagggtgtaatcattaatagcacttgctccactcactcgtcccaggtttagaagagaaagcgcagagccatcccacgtatgaaagaagctcctttgggaggcaggtggcctgaaggcaaccacactctaatccccaatcagcttctgattccaaggccaaattcctcacgtcctactggaagcttatctgattgttctgtaagatttctgagtccatctactcaaaactggacaagtatgtcctgtgaagatgcagtgtgtccttgttcctctgatccacttaacgccatccacccggggcccagcctcaaggcccgcgggtcacctctgcctacctgttgccctcactgcacctgttaagtgcctcagcttctctagagggtccctcctggtgtttctctgctccacagcctgctcctgctgcttcggttctcatctgggctttgcaataatctcctattcatcatgttcaccaatctatttgttaactggttgccaaagtcatttttcttgagtggatgttgtgcaaaggcccaggaggggagagggagtgacctcgtggaatttcacggaggttcgtgtgaccagtgctggggggtcaaaggtgggtcacgagccacagaggagcaagtcaggcccactgggctccctgcactgcatgaagtcactgacaacctgcctggggcctgaggaacgtcaaagggtctgaagccagggcctgagatgagacttgcattctgcaaagacctggtaggagcgtctaaggggaggagctgcttcccctccctgctaaggaagagggtcaccccatataccaggactcgctgtgcacaggtcattttttcttttcttttcttttcttcctccctcctcctccttcttcttcctctctctctttctttctttcgacaagatcttgctctgtccccaggctggagtgcagtggcacaatcacagctccctgcagcctcgaactcctgggctcagttgatcctgcctcggcctcccaagtagctgggactacagatgcgtgccaccataactggctattgttttatattcactagagctgagggcttgctatattgcctgggacctcggcctcccaaagtgttgggattacagatgtgagccaccgtgcctggccaagattttttattctccaagcctaatctgttctttctgaattcactgctcagagctccggcccgacagctgatgacaccgtcttgaatcgaagcctaatgcacaagtcaggctttaagccccatggtgagtgggtgagccagggaccttggccacctccctcctgtctccaacctgggactctccgacggtcctgggaggagctcgctgaaggcctcagcttcacagaggtcctgacagttccttgataagagaatggcaaggtccttcctgccctcctctaactcctccagccctgatgaccgcagcctcatacttgctgttactgcccagcccagggggcagtgatgggccgccaggcacttctccccagcggggcgtctgctccctgagggcccaggctgcctcctcggcgcctccaggttccagtgcaggggctgtgagactcttctgagtgctggacctccctatagctgttgtcctcatccctgcgacgcagaccatcccggcgtcgcagaccatccctatctgcgtcctgggcagctgcgggaatccaatgagacaaggaccgggagtgcagcagggtggggggctgccctcctgtgatggccaggctcggctcactgtgtctcatagcggctgccttcagcgcccccggcttccccaggccttgctgacgcttgcccttctgaagccagtcatgaccagcactttgctttattttctactgagcttctttgaatctggaagtgcggcatcgtgaaccctcctagcagggtgccctgtcctccgctgaccggactgagccacattgtctgctctgagtccatgtttcttcagcactggtccaaatgcgggccatttctcaccttttctacgcattagacattctagttaactggaaagcgagcaatgatcgcgtaagtaatttgtttagagagcaggtcaaagagttaatagctgagcttgcaagtctaaatctaattatttcctcagcactgagctcctggctggtacacgggatgggttttattattttgagcctcccgactcttctcctcgtgcgactctctccagccttgagagtgctgccggactgaacttcccatccctgtccccaccccctcggtgacccatcgcagctgcacgggtgggcgcccacgcctcggccgacgcagccttcacgcccgtctctggtgagtttgggctatttgaacaaaggatagaaaagcctgtcattcattacttccatcattcatttgttcaacaaaaagttgccaggcacgtgctgtgtcccaggatcgaagaatccggccctgagctcctgtcctgctccatttcctccctgccatccccgcctgcagtgtccctgtgacgcctactaaccgcccgcctctcccctcccgagtgcaggcttcctgggtcaccgtcctcctctcccctcccgagtgcaggcttcctgggtcactgtcctcctctcccctcccgagtgcaggcttcctgggtcaccgtccgtctctcccctcccgagcggaggcttcctgggtcaccgtcctcctctcccctcccgagtgcaggcttcctgggtcactgtcctcctctcccctcccgagtggaggcttcctgggtcaccgtcctcctctcccctcccgagtggaggcttcctgggtcaccatcagcctctcccctcccgagtgcaggcttcctgggtcaccgtccgtctctcccctcccgagtgcaggcttcctgggtcaccgtccgtctctcccctcccgagtggaggcttcctgggtcaccatcagcctctcccctcccgagtggaggcttcctgggtcaccatcagcctctcccctcccgagtggaggcttcctgggtcaccgtccgtctctcccctcccgagcgcaggcttcctgggtcaccatcagcctctcccctcccgagtggaggcttcctgggtcaccgtccgtctctcccctcccgagcgcaggcttcctgggtcaccatcagtctctcccctcccgagtggaggcttcctgggtcaccgtccgtctctcccctcccgagcgcaggcttcctgggtcaccatcagcctctcccctcccgagtgcaggcttcctgggtcaccatcagtctctcccctcccgagtggaggcttcctgggtcaccatcagcctctcccctcccgagtggaggcttcctgggtcaccatcagcctctcccctcccgagtggaggcttcctgggtcaccgtccgtctctcccctcccgagcgcaggcttcctgggtcaccatcagcctctcccctcccgagtggaggcttcctgggtcaccgtcctcctctcccctcccgagtggaggcttcctgggtcaccgtccgtctctcccctcccgagcgcaggcttcctgggtcaccatcagcctctcccctcccgagtggaggcttcctgggtcaccgtccgtctcttccctcccgagcgcaggcttcctgggtcaccatcagcctctcccctcccgagtggaggcttcctgggtcaccgtcctcctctcccctcccgagtggaggcttcctgggtcaccgtccgtctctcccctcccgagtggaggcttcctgggtcaccgtccgtctctcccctcccgagcgcaggcttcctgggtcaccatcagcctctcccctcccgagtggaggcttcctgggtcaccgtcctcctctcccctcccgagtggaggcttcctgggtcaccgtcctcctctcccctcccgagtgcaggcttcctgggtcaccgtccgtctctcccctcccgagtgcaggcttcctgggtcaccgtcctcctctcccctcccgagtgcaggcttcctgggtcaccgtcctcctctcccctcccgagtgcaggcttcctgggtcaccgccctcctctcccctcccgagtgcaggcttcctgggtcaccatcagtctctcccctcccgagtgcaggcttcctgggtcaccgtcctcctctcccgtcccgagtgcaggcttcctgggtcaccatcagtctctcccctcccgagtgcaggcttcctgggtcaccgtccgtctctcccctcccgagtgcaggcttcctggggcagggcttcgcctgcttcctgcaattgtgtccagggcgcaggaagctgcccagcacaggcagtggcactgacacggggtgaaagaccatgagcgctcctcgggacatctggcctttcacctgtgcatggttgggagggagacgggtttcttccttggtcctcccactcgctcctgtttttcagggcccctcctctccctgtggagctccagtgaagacccctctccaggagcccctaaccccagttccagataaaccttctgtttttcctaaaactgtcagaacccagttctggtgcggaggtaagacaactcaaaaacgtgtatttgccgtttctttctttgagaaatctgtaataggctaaggaacaattgatcaatataaataaagttttaacggtggaatttcaggtatcagcatagatggagaagagactttcgtgcctctgaccctcaaattacccagctctcggctctgcgtggattggcgtgcccgtttacctgagaggccaggttcacatttgggaagaagagattttctccctccgcagcagcagcgcagcctgcacgaggttgctgggggaaacagaccgctctgtctttggggtcttgatgggtagagtggtttgccagagaaccaccgaagagccttccagggacttctaagagtgggcacttacttcagccctgggaaatctctcctcagagcctggcacaggttttggtatcagcggggccacgacaaatgttcactgaatgagtaaatgaatgacatggaatgtaggaaacacgaaataaaatgaactgagaagatttgcagggactggttattttgtccatctccaaacacagaggaaacaccctgactccccctggccgcctacaggggccaatggcagtcagtcccctgtgctgaagtgccggctgttttctaagaggctgaaggagggtatttatagttcatgggtaacaaggagaaaccacctctggagatctcctcctctctcagaaatctttgcgatgatatgaagagggatggtgttttgggcccgtgatgggtgacgccaccccagatttgcagatgagacccttttatgggacaggtgggcactggtcaaatgacatttataaagaatctggccaatcatatctttttttttttggctcctggttttcattaccactcagcatttcccacctttccgactgaagctcagtcaattagcagggtctagcagggtccccggcctggtgcctggggtccctctgcctctcagcttcccgggaagtggctaatgagtgctgagatacaagagggggagtgtgacagatgctctgtgggggtcgtcctgctgtgtgatgatcacgccctgagacgcattcgtaaatgtggtctttcctacgttcagggtttttgtaatattatttgaaggatgtaccagcttgtcactgagtgtgccagggaaccactgaccagggaagtttatttgtgctgtgtcactaggactatgagtaataataacaacaataataatgaaacaaagggaagaaaacccagcagggggctgcccttgagagtgccctgagggacacacaggaggccctggtgggaggctgccccaaggaagccttgcattctaggatgtcacagcctgcatctggcctgtgcttgggaggtgccagtgcagccacactttccatttctgtctcttattttggaggttggctttgagggatgaggacaaacgtgaggagcgagaattagcaggttcagatcaggggaaaagcatgaaccgcagatggaatggggtgtgtggtgggcagggttggaggcaccgctgagcgtgggcagagaggggacaggctccagggctctgcctgccacgtggagccagcacctgcagctgtcctgcgtctgtctctcctgcgtgggtcggcagagcagcgtgggctcccccaggccaattccaccgcagggctgagccctgggcctccctgagtccgagtccgggcagcagttttaccataaaaggcgcatttagcaaacacacctcagggcctggactctgtgtcacaacttcctgaagtgcacagagtgagacacatcgtggtgaatcgctggcctctcactgctcccagcaaccagcaaagcaagtcacggcagcacatggagatggattttctgggagaaaggcagccgcagtgctctctactagatgccctgaaaatcaatctgcagcccactccagcctggtaaaattagatctaaaactggttaatttagtttcaggagtgttttcccacctgatgccaggcctgaagacaccatgcagtaaagcaccctgagctactgccagcccgtgctcctcctctgggtggggacaacgcagtgctccatggcactgaggggctggtgcccgggacgagatggcactgctcccctccccacctggtcactgagagcctccttttcatgctgttcttctgcgttccacacggtttgtaaaaaggcgtggcatgtggatggttttaatttgcttgagtgggagggcttatggctttggagttggagccctgggacagctgaatgttctagaaagcagctgttttgcagctaaggcctcagcgacggctgagtcagggagggccgggaacgacctcaaggcaggagggaagaaggcctgagaatcatcactgtctccaccggaaccttaaccgctggggcccctgaccacgattggaaaactggaaagagcaagcgcagtatcagagagtcccaggacccctcgccagggccccagcctggcatgaaatgggattacatgcctcccattgtgtgtcccggcagccacaaacaccgtcaggcccagcgtcaccctccccacctcccggatgagaaggagcctccggagcagctgagggacccactgtggaggcagccgggtgggggacggcccggtgtgtgtggtctggtcgtgactttcccacaaggcatcacccatgggaaggaggcgtgatgatggtaagcagcacagagccctgcggggaccagggttttggaacaccccggccttcggtcatgctgcgggaagcctgggtcctctccctgtcagagaagacagctgggttctggggtttcacagcacacgggtacccccggttccaggactgaccatggagggcaggtgccagcgctgttcggggcctccggtgatggtcccagctcccttcccacaaaggccaggtgcagccttggaatcctctgacacttggatccccatggattcaatgggagctcgcatgctgtgaagaccgcggtgcattttaaacggcaccagcaaggaggctacactgtgtatcccgtgtccccatttctaccgaagagcggcggcttcacggcggtttgggagtggggtccaggctctgttctgcagagtccctgtttttctgtgagcctcacgctctctagaggagaatgagccactgagcaagcagtttcttgcttgtctttagaaaactgcagcgaggcctggggagcggttcccaaagtgtgttctgccaaacacaaacaggtgctagtgcccagagcatttccacgagcgtgtacttgtggagggctgagttctacagaattaagcagatttctttatggaagggcttcccggggcttgtaatgcacattgtgctgatacaatttgaaaatctccaaaatggagtaaacacacagcctctctcatgaccttggaactcgattttcatgagcatctcacggaacttctgttccacgagacagactggagaagtgctgacatctggggtgtcatgaggcctggctaatgtcttgggaactgccctgcagacatttcctaagtgaagcagcagacagacctcatttagcctgtgctgagccccaggatgaggggtagggaaggaaggctgtctcattctgctctggtccaaagtcagtgtttacgcgtgcgcgcgccggtctggccaggggtagggcgccttctaaaatctacttctgagcgatttgctcatcaaccgctattctgcacacacacgtggggagcctgccacgtgcccactctgctttgcctggtggggtcgggggagaatagaacagagggagtttcactgagaaaaaatgctgtgtggaattggtgcgtggttagcataaaggaagccacttagctcacacaggcctggaaatgcgggctggtgcagtatgtcatttacatcaaactgtgaattctcaaatatgtgaatcaatcaaagacggctgatggaggggctcagccaatggcgcacactgtcatcgagtcggaggcggccccacttcagtggagagtcatcctgccttcctcgccatcagctcccatctccttctggtcagaggaagcctcctccctggggccacccctcctgccccgcagcttcctgagtggatgaggctgacccctcagctccaacgggggctctgattaacctgatcagcataaacctactctcctggcaaaaagggactccacaatttgcagtgtccagtgtaaaacagaaatgttcgaaaatcactaagaatttcaagatggcgccagcagagcatgaagctgaggccgggaccttccaagtggaactgggccggctcctgccccacgcccagatgccaccctcctccctggtgtttgttccgtgaggggcacaggactcagctcagggcggcggaagtccgtcttcctgctggggcaggtgcgctcgtgcgcctggagctctgctgggtcctgcaggcaccgtgtgcggctctcgtggaagcagccggaggtggggatggagaaaggccggctgctgcctccactggaccctgaccccagccgctgctcaactcgttttttcttttctgagccagccgctgctcaacttttcagttccaagagccaagattgtgccttctaacacttgcaaccaaagaggtcctgattcgtacaacccttgtgaccaaatatctcaagcgtcttctctgggcttggagtcccccatgtgtaaaggggcaatcacgatgtctctttcagtcattgcgggggccctatctgggtcgtcactcacaccccgatgcaggagcaaggctaagcttggtcctggtcaggtgtggactgtgctccttgaaattatatatacgttttttaagggcttttgctacttttgtcagtgagagccattctcatttattcctgccttattcatgccagaatgaaccaacttaggcagcagctctgggtgagctaacggggaagccacttcgacaagctcagagcttgcactccacgtgaggggcccggcagctgcccactctgagggagggcaccgtggccccgggcgtagctgatctgcagaccccctagctgtcattctcagagctgcagcctgggacccactcggcctgcagcaaggacaagttcctctgtaacccacaggctttctcatgcaatgcagtattggaggcacgtccctcccagtctcctgttgcccctaaatctgctttcattcatcattgtagtgctcctacagtccccacgtcctagcctcccctgctcctgcctccccgattggaggcagttagagcacacctgtgtcatctgggtgtgtctgcagggcactgtcctgtgaatatcaaccaggccagtagttgtggggagcgacattgcaccccagggtcaccagccaccccccatccactctcagcaagccagggtcaggggcttcctgtggtgcaggggcttctgtgtccccacagctggaaagctctaggccaacaaagatgaaacagctcccagcgcagggcccctgccacctaggtgctttcctaaagatgagctctagaggccaagctgcttacttagttaaaacaagcgttttggctcagaaggagcaggagaagctgctgccaggagctctatgcttggccatgagagcaggacacagggaagggcatggaacggctcacgggggacctcgggagatgcccaggctggtctcgcaggccctaccactggggacctgatggggctaagcatctccccttggcaggtgctgagatgcccctcagtgcccagcacaaataattctgcagagatgctgcccatttgccggctgccatccagcagacgccagggagacgctgcgtggtgatgagtgcgcaagaaccagcgtgggctccactcctcccgcctgtgccctgaaaaaagtgtgtcattgtgtcacttgattttctcagtgacaaccatgtggggctctgcaggtagaaaagtgaccacttgtgtcaggcactgagctgagctgaatccaaattcagcaaaacctctcctctctggtgcctggcgagtctcttaaagctgctcagagacctgtaagctcgccggcttcggggcaagttccttccgtttgaccggccaacagtgacattcgtggacccaaaggaccctggacagacccctgagggaaagtgatgggcaattgttttgaactctccaaaagggagctggaacagaatatattaggagcaactttcccatcccagcgagacttgggtgaattccccgggagctcacgctttctacattggtccttttcgttagattgtttaaggacacgcagcttgttaaagcagcaggaccctgtgtccctttatgtgcaaattaaatctcaggtcgatgcctcctacatacaattcccggcgcctgcgtggaggatcgttgcgtcttcagaaactgctcccagctccgagggctcccagagcctgtggggtcatgcgggggcccagctgacaaaccacagaggtaacggggcagaggtaacgctgcccaggccccattatgcatgttgatcctgtgccagatgcagtaagaggctcagtgctaaggagaattcacatttaccacaccttgactgtgttccaaaaactcatgaagcattcattgatttagacatgttccctcaaccactgctcgtggggtcttctgagctacctacaattactctccttccaatcttgagcttcaatttgctgaaactcaggctggctctagcgcctccacaaaatgagagatctccagaaataagggttcaagattcaatgtggtcaggagttcgggaccagcctggccaacgtggcaaaaccctgtctctactaaaaatacaaaaattagccagaggtgatggtaggggcctgtaatcccagctactcaggaggctgaggcaggagaaacacttgaacctgggaggcagagaggttgcagtgagcagagatcgcaccactgcactccagcctggaagagtgtgagattcagtctcaaaaaaaaaaaaaaaaaaaaaaaatttaagatgtttcttgggaaatgtaccagaatccacccacatctttacaatgtatgttgaagcctctaagaagctgtgcaccaagatacacccatttattaaaccccctagatacacctgtttattaaacccttcgccaagatgcacccatttattaaatccttctccaagatacacctgtttattaaaccttccgccaagatacacccatttatgaaacccttcgccatgatgcacctgtttattaaacccttcccctagatacacccgtttattaaacccttcgccaagatacacctgtttattaaacccttctccaaggtacacccatttcttaaatccttcccctggatacacccatttattaaacccttcgccaagatacacccatttattaaaccatttgcctagatacacctgtttattacacccttcacctgtagacttgggctatgtgttattctttttaaaatctccagccatggtggaggtgtggattttcactgcgatgagcttgctgaaggatctgtggattgcaatgtcaccctggccctcacccagctgctctccttgcaggtctggttagcccagggcctgcttccttctgtgtgtgggccctccccaggggctcaggcagggagctgaaggacacacctcactctcaggacacttgctgtctgtgatcaccttgccaaggtacctgctttccatccagctctaaagccgtgtgggctcggtacccgggaaggagagagtggcctgggggacctcgtggaaggctggaggggtcactgaagcccacagaggatcacctcctaaagtgtctcctttcttcttcatctctgtggcttccctacctggggaccactggtcgctagaaataaacttggccttgactttccctcctatgggttgatgggtctttcaaactttggtggaactcccagacaatttaattttgggctgtgttggctagggatgttcccttttcccaggttgtctgaaataaagaaggctttggcgggggagccctggcaccccttgtgactgctgtgaaggtgagtgccagggtggatctggggctgcccacgggttcgatgacaccaacgccctttcccccattgtcaaccccctggccctgcagttggggccctgattcctgcacgtcccaggactggacgaggattgccggctttcctacttcacagatgatgaatggggggagtggccacagcttgcaggaaaagaggaggagcttatgcccccctcgccagaagcagcccatccccatcctccccagaagcagccttccttgggatggccagggacgctggtgatctgggccctgggggatgcgtctcctcctttggctgtgcggctgcataaagcaggcatccataaagcccacttatttttacgaccttgcattaaattaaatgtgttattttatgcaggtgcttacaaagtccactgagtagcctctgatggctccctggttccctgacacagtggcaggactggcacagaccgagcggaccccatactgatttgctgttctcgggacagcacaggaacagccgggcagcaccactgactcctgggaagcaggacgatgacctgcagtcacctgcagctcctgtgctgtcctctgtcttctacaagtgccattggaaggggtcccgggtccgacgtctccggcgtccttctgagccactgctactcctgaagagggtacaacggccggggtggggtctctggcttaacccctggcggtggtcccattggtgacccactggcctttttctctgcagggctaggctgcccttaaaaaatggtttcaggttgagagagactcagaggcttggggaagttgacggtagggggcagggagtcattgcttcctggggcctcagcctgcattctgttggattatgcctcagcccaggagtcccggctgcccttcctcggggcatagtcctagcccagcactggcagagacgatcttcctggggcttctgagaattcaagatcctggcatcagatgagtgacggtgttctgagagagctcaacctgcttcccaaggtggtgccctcccccacctccaggatggaagattctcccgagcatgtcctgggggttgctctcgcccggcctccatccccaggccctccttcccctctgcatgactgttctgtggggggaactgggcagacagacccaaagcctcccagcagaagagagaagtgaggaggctggaggccaatgctttctttgactctaaaatgaattatctcagtattatagaaaatataaaaatatacaataatatttaaaaaggaaattgcattgtcacacaccccaccttccaagggctcacactgttaattattttgcagaatattttatactgtcttagcttgagaggcaagatattagacgaatagaaattggatttaatttgtaaatatgggtgcatgcatccttcttaatgaagctgagatcatgctttacatggtttggcaatcccctttcccatttaatattacattgtgaacatttttcattatctaaaatattctttaaaacacgagttaaaatgtctacataacacattccaatgaaaatatatcccacagcatggtcgaccattcccagattgctggatatacagggagcatcagtgtttttagatattgtgtagatacgtgctcacatgtgatatgcatattattaaggatgctgcactgaacatctttacacatgagtcttgaaccacatctatgatgatctttcagttcacactcttagaaatgcaatagctgagcgaaagggagtcaagaatgtcagggctctcgatttccaaaatcaaattagttttacagtcacaccgagtcccagggccacccgtccagcatgaatatgcccatctcactcaacccttgccagccgtgagtgcaattttaaaagcttgctgcccgtcggaaaccagaaagtcaccctatggctttgacctgtccttgttggtaaccagggaggctcggctgttgtgtgtcttggtgagcctgtgtgaatcctttgttcactgggctctggatttcacttgcctcccagcctctgtggactgagagagaccacggccacacactggtagctgggaattgtgtctgcaccagcacacagggagtggcctgggtcttgctctgtctgcctgggacccaacgcctgctgcaggctcagaggatgagggtggccgcggctcctcacccactgtggctgcagctgggctggccgggttgtgttccagagctgctggctccgtggtggtggcgtcagtgattgcagaggaggctgggccggctgtgctgctctctggggagacctaatgagctcctgctcactcctcaggctgatgcccatgtctcagtctaccctggacccttggacatgctctgttcacaccacatacccctgaagcacgcttggcccacggagcccccgcatccagcccggggcaggtatctctgccttcctcgacccgccctgcctgacagcgggctcccaccttcgtcgccccgccctgcctgacagcgggctcccaccttcgtcgccccgccctgcctgacggcgggctcccacttcgtcagtgcattctgcaaacttgacttgacctgcagccaaacagagaatttttctcttttcagatgtttcatctctgtggccacctgaaccccatctgcgtggggcgtgtggcttggccatcgctgtggcaacggattctcagtggtgctgaggcctggtcgtggtcatggtgctaaggcctggccgtggtcatggggaaggattctcagtggtgccgaggcctggccgtggtcatgaggaaggattctcagtggtgccgaggcctggccgtggtcatagggaaggattctcagtgtgccgaggcctggctgtggtcatagggaatgattgtcagtggtgccgaggcctggctgtggtcatggtgccgaggcctggccacggtcatggggaaggattctcagtggtgctgaggcgtggctgtggtcatgaggaaggattctcagtggtgccgaggcctggtcgtggtcatagggaatgactgacagtggtgctgaggcctggccgtggtcatagggaaggattctcagtggtgctgaggcctggccgtggtcacagggaatgatcctcattggtgctgaggcctggctgtggtcatagggaaggattctcagtggtgccgaggcctggctgtggtcatagggaaggattctcagtggtgccgaggcctggctgtggtcatagggaaggattctcagtggtgctgaggcctggctgtggtcatagggaaggattctcagtggtgccgaggcctggctgtggtcatagggaaggattctcagtggtgctgaggcctggctgtggtcatggtgctgaggcctggccgtggtcatagggaatgattgtcagtggtgccaaggcctggctgtggtcatggtgccgaggcctggtcgtggtcatggggaaggattcccagtggtgccggggcctggccgtggtcatggggaaggattgtcagtggtgccgaggcctggccgtggtcatggggaaggattctcagtggtgctgaggcctggccgtggtcatagggaaggattgtcagtggtgctgaggcctggctgtggtcatggggaaggattctcctcgctgctgccacgagcacagtatcagggatggaaaggtttgggccagaggacttctcaggctgagataatgtaatctcatttcctgagagcaaaataacaaaacaaggagtgatgtattcccttctccaggcgggcagacaacagagatgtcaattaaatctaaaggcctgctcctattcagcagaaaatggctgctgctctagaaatattacgacgttaaaaggagatcactggagtctacataactgttgatggtgtagcatctgctccaactgcctctcctcggtgtctgccacagcggctgcggtggttttcctgtttgaagaccccctgtcctccttcactttcagggtcagccagtctgtgctttgattcaccacggggatgagcaggaatcgtcggtgcaattttacctgcgtaaacaagcgaaccttcttccactgagcttctgccttgagacgtctgtgagtgccgcctgatcacttggtgagcagctgtttcagctgcccggatggagggcagtccagtcagttacggcctctccctctcccgagctgcgccctgtcctcctggaggcgaagggctgagtctcagatcccggactttggtgcagagcaggaagacctgtccttggtctgctccatgctgtgctggtgtctgcgctcctccctcagggcgcctgcagggaaactgcatcctgctctcctctctgcagcctttgggaccagggcacggccatccagacacggccttagcttccttgtctctcctgggccaggtgggcaggtgagatgcctccccagcctccgtgggcctagagaatctcaggggcctggttcaggccttctgcacctgtctgctccaggctgcatggtggctgaggcacaggtgcgtccgtgaggctgcggggcaaccctggcttcgggggaacacagtgctgctccttcaagtgcaccggaggctccgtcgttagcccacccgtccccaccagcccagggcgggaccagcccacagcaccacgtcctctccaggccaccagtgggaggttcaggagaaaccagggcttccagaagcaatgttctcctaactcttacccaagttactgctggacccaagattctgtgaacccaaagcgggaatttgaagctttttcctcctcaggtgactttctgactgtatccctgggccaggttagcttcactaaagcgacaggcaccacagatgtggtcctgggtgggtggtggggacgggcggtccgtgctgagtggacacgttgcagcaacaccacagagaccccacagtgtgtcgggtgtgagctccgccggcaagaagcggatcgaaccatccgtgcaaggccactgtaggtgcttcctgaaacgccatttacgaaggtcgtagacgcaagtgcctgacctacagcaagtgcccctcagcgcttgataaatacacacagttctgcagcaaaagctattttgtttctctgcattttcaaccaaaatttgaaagacattgctttcagctagcagtatagatttctatacataaagacctgaaaactgctatttaaaacagcctttactcagagtggacttagaaacgacgcatcaggctgagaggagcagagaggcctgatgtgttcattcccttcttgccccggtcaagttatcaggaatttgaggagagtgcttgtcttccgagaaattctcagacttcagggcatgcgttggggaaggatgtggtcaagatgtctgtgccttgtcaagggcccttttctccgctgagctgaggctcgggacgatgctggacgggttcggagcgtgctgcatcctgcgagcccggagacctcggggctggttagaggatggctcagttcccaggaaaccctcgggtctttaaaaggaagtcgcaaaccctgttaaagagctggacttcttttgtctgtttactgtatcgccttgaagtctttactgaacagttgattaaaagatgtgttttttttttgaacaaataatttaaaaaatttataaatccatgtttaaatgaaacctgggctttagctatgtgaggttgtgactttattattattattatttttgcttttaaaatagttctctattttattttaaagcaattatatccatacattcaaaaaagtccaaaacagcagaaaatatttcctttgagccaacgcataaagcacaaaataatcctcatatctgccagaggatgggccggaccgcgtttcaggtaatcaactcaggagcaactgaaggcttccgagggtaatggaccacgtaatgagtcaatttgtggttgccaggtgcatccctgctcagacctgggcggggcaggtgggtgtgggggcacggctttcggggctcatcctcccgcaccacctgtgggaagctacgttgcttctctacgtctcaattttctcctctttactataaaaatagcagctacctcatagaattgtcttgaatatcaaataaggaaatccacccgcagtgtttttgtgactttaacgtaggttccttttccttggttcatttccctgctggtccccagccgcccaccctaatggagaggggtcttgcccactgcctcagggctggcgggagggtggatgggccctcgggctgtgggctccatggggatttgggcatggctgcttctcagcagaggagccacaggagcttggcagagcccagccatgcatactctagaatggtctagaacggtctgcaggcaggagacgggtgttagaatccacccaggtggctgacagcctaggaaccacttgagcagttgttgtatggtgagggcgcagggcccagccagggcagcaggggtcccagtgagaacatgagtgggagatggtgcaggaagggggtccccagccaatgtcccagccccaatcccgacactgacacagcactggggaagggggtgctctgtggttagaaacggcgtcgggtctcgcagaatggaggcagagttccagagcaggaaagtctatttcatcatgcccaagctctcggtcttgaattcacacaaaaaacatgtgggtcctaacagtgacccagccaatgtcagcaatggcttgtgtaactggaataccataaattacagctgaagtgcacacagcctgtgtcgtgcacctgctcgggtctaaccatcttatgaaagggtcctcctatcggccctgttttgcagagaagaaacctggacacaggaagcgcagccgtgaaccctagggcagggaagccaagattctcactcaggccctgcccctggggccgggccttctgttctgcccagcgacctctcagcctcaccttgagaatcttacagactgagcgctgatgatgctcccgggcacaatgacaaattcatcgttttaattttttggtcaaaacccaaataatctttagtaaaaaccgatttgtaaattatgcatccattctgccatgatggatagaaaagttttgcgatacccagtgaacactggggatgagttcagttaagcaggtaaagaaatccttgtcttgcaattgcaggtctcacggtgatgtcctctcagtgaagcccaaaaaacaatgtgtgctcgctgggtgccagacccacatcaggggctctattcgttcttcagacgctgttcaggtcccactccctggaagcctccctgatactcctttcctcaccagctcggctcagggggctgccctgcacagccatggcctccagccagttatcctcactgtcctggaattgctcaacctacccccaacccaggcttcgtttccttgatggggggaatacagtaagcacttagctgatgggcagattattgggaaaagctgagtgtcgggagaagctgaggcagtgcttgcatgtctgacataatgtaaaagagtcttagaacatgtctggtggccagggtctaaaaccccttgtggtctttggaacaccaagctctgtgctaaagggtggaaggctaccctgacgtaccgtaatctaagcccagggcataaaatccctcgtggcttggatagaatccagggctcgtggctctggaatgtgtctagacttgctgactccttgctccttgctctcccaggatcgattatatcttgagtgaaaagaacctgctctccattatctcaggtagcagagcaaatgctaaactgtcacagctgtaaatcacgtgcttaatgcaacatgccctttcaacctccacattctcatcacctgtttctttgttggattaccaataaatagcatgtgctcccagagcttggggcctttgcagcctccatgatcacgatggcccctggtcccacctttacttctcaaactgtctttttctcaatcctttgactccactggactttgtcacccccatgacctggtgttgggtctgatcaccccaacacagatggacagaaggatggatagagagacagctggctaggtggatgatgggggctggatgagtggctcatggatggttagatagatggataaaggaatggtgaatgaatggatagataggtggatggatggatggtggatgggtgggtggctatatggtgaatggataggatgatagaaggtggatggatggatggatggatggatagatggatgatagatggatggatggattggggaatgtttgggtggatcatgggtgggtggatggatggtggaccaatggatggatggtgaatggatgggcagagggatgatgggtagatgggtggatgtatggtggatggatataaggatgggtatatgtatagatgggtgggtgaacagatggtggatggatgggtggatgggtggatggatgggaagatagatgggtacaagggtacatgagtggttagatgctggatggctgggtgggtatatgacgatagaatgggcagataaatggtgaaatggatggatggatggatggtgggatggatgggtggatcatggatagatgggtggatataagaaagggtatatggagagatgcatagatgagtggatgaatagatggtggatgaatggatgacagatgagttgatgagtggatggatgaatggatgattgatacatgagttggccagataaacacgacacctcttccgcatggtaagaaatatttgggaatagggtgactctctctaattaagacttcaattacttttttgtttgagtatgtgtcatgaaatgataatttgattggctatttcttagtcatttcatcaagtcaattctatgcaaataagaaaactgccataatgaagcagattagctatttattaaaattaaaaataatttaatttacattaaggctaaaactaaattagaaaagttatttgtttgattctattgatcatagagtcaaaataaaattatcatcttatgtgaaaaattatcactttctcaattgccacctcttccatgcagccctatttattgcccctaaagcagtagtgtctctcttctctgagcattgatggaactcctagggtagtcatattatagagcctggatatgaggctgattctaccactcaccagccgtgtgatcacagcctactgggtgaatatctctagaccactccataaatgggaaataacaataggaccaaactcaagacccgccatggggcttaacaagcagtacacatgacatcactgtgccatccgtgaagatctaagtagacattacttcttgtgattgcctgtcttatttccctcctgcaggttcttagatggactggtctgtgaatcacatgaacatatgcggttcatattcataaacacttattcacacacacacagatatgtacacacatgtacatttgcatgtaagacaggatttggcaaatagaagatatttttgaataaatgaattattgggcaactcatgctgccaaaagttgagagatgaaactaaatgaaggcccaactggggtgagtgtgcctgtgggtgtttgttaaggggacgccaatcattctattgcacttcagttatagctggttcctcctctaacctactctggggtccaaagtcagcacaggaggcccagaggagtgagcgcctggccattggcaggcccctgtgggtctctctccctctgttgattcacagcctccctgtggatgggccgtggggagagctagagcaggtaactggctgggatccaggaaaggcccttgtgaggctgcacaggcaggggccctggagtttctcacccaggctgccctgatgcacacaggtccgtaccatgcacctggctccatcaccacccttgtggggtctgggatgatggcagtcaaccaggtgctccactccagagaatggggcccatgaactcactcagtctccatgagagccagatccctgccagtaagtcacgtggtgaaaccccattaggtcagccaaccttttcacattggcagcgcccagcttgctgatgtgggagagagaaggtgtcggcctggggcatgaccatccacagctgagaagggaggtgggtgcagcacgggtccccctgaaacattccatgtggagacatcagaccccccggcttaggagttgttactgcaggagtgtttgagaaactgtgtggatggtggcctgcagtgtagaccagatagtcaggaagcatagatcagatggccagaaagtgtgggatataatagatgggcaggaagtatagaccagatggccaggaagtgtagatcagatggtgtggaagtatagaccagatggccaggaagtgttgactagatgggcaggaagtgtagattaagacagtcaagaagtgtagaccaagacagtcaagaagtgtagaccaagacagtcaagaagtatagactagatggtcaggatatgcaaactagataggaagtgcagaacagacagtcagaaagtatagaacagtcggtcaggaagtatagactagatggtcaggaagtcggtcagggtagatgaccagggagtgcagcccagagggtcgggaagagatctgatgagcgatttctaaggcactctgctaattgccctgcattaattatcttactgactcaaaagaaggatgaagggttgtggaaggatggattttattatcattcctattttacacgtgaacgaacacagtggagtaagtgatattcctaaaatcacatcaaaacaggcaggtgtggagtttgcaccgtttgcctgacacatggacaggagtctgtgctctcttttgtctgggttctgtattggtggctgggtggtttttgcctccccactcttcactcctgtgctatgggccggcgttgcacctcctggggtgggcctcactcctctggactcagcgccctgcctggcctgggctctgcgtgcttcttagggtgtgccatggctgcccctccagggctcacagtagatgcctgcatggcaagtggcagccatgtgcgttgaggccacgcgctgtgggccccaaggcacctcaaagtttaggcaggaagagcagacgccagggtgcatggggaaaatggcggacagagatctgcatatttgtttacagatcacaatgtttagaagttttaaagaataagccccttgcagtacatttaaaagccgatgaaggtcactccacatcctttgctgagatgtctggggagacttgactttggagcagacggcccaggcaaggaggttcacaattgcacctcctctgtcggtggagggacgtttccgtaaaccaaagggagtcgcccatctaggatcaacttcatcgtgttagttatggtgttttgttaaagtgtccacagaaaccaagcagcctagtcctggtgtggggaagtgtctccttagaatttcaagtcggctatgagcacccctggagttcccgggaaagacggtgggctcagggtcaggcctcgagctttaagatgcagcggggacctgccctgtggctttgctctgtcccgggcagtcccatctcctttctccagggctgctctggcagatcccctgccgagacgccacgggggagccttgttgtatgtgggttctggctagaggcagacgaggcccaaggtaccaaggagaagctctgatactcaaatgtcacttaactaatttccttccacgcaccaacaaaataattggaatggcattgacaaggggaaaaacagcccgcagtaaaaagcagttgtccgaagcttctggtgtcttgaggaaattatttccgctattatctttcacacagggctctagactggccagagtagtccgtattattatgtgactatccagactatttcctcctcagtgccctagctagttttgggccgagcaacactgatacaatagtgattttaaactcagtgagcattccaaagttcagcaaatacatcaagcctttcaaagtttctgcaggataactgagaaaaaaaaaaatctatgtcttgatttttgtcagttgtcttggaaaatttcccttttctgttttgtgcgtgctgtcggaaaccagccaagtgtgtcctgcgcccctttggtatgtaggctgcatggtcgaggaaagaaaagggttcacttggaaccctggatcttggttgcatagtgtggctaagaaaagggatgtttagacaacactggttttcagaaaaatgaaactaaagcaggagcctaaatatacacaaaaatgtacagtgatgtgtcttttttttctttttgagacagagttttgttcttgttgcccaggctggagcacaatggcatgatcttggctcactgcaacctccacctcccaggttcaagtgattctcctgcctcagcctcccaagtagctgggattacaggcacccgccaccacgcccgtctaatttttgtatttttttagtagagatggggtttcaccatgttgatcaggctggtctcgaactcctgacctcattttattgatcattttatctttttggtgtctaagaatctactcccaatttaatatataattttagcttagaatttaatgtatggacagtggaaacttactatcaaacactttaaaaaaatccagcagaatccatatgagaagtttatcttggctcatgcatatgctcccctatgtaaaccgagttatagcaaaaccacgggccactttatggagggcacagcctcactgggcggaaccggtacccagagggacggtaagcccagatggttggtgctgcagtaaattaagcctgatatagagatgtttgtgggttttattaaagtctcatgatgtctctaagcagttcttgttatataacagaatgaattatatcgtccaaggttattgctcagataacctactggaaatgatagttttcctccttcatcacatgaatctaaatgttaactaagcgcttgttagcttttcacatcacatcggagggattcgttagctctcacatctctgcatatgtgttttaagagtctttagataaaagatgaatcaaagtgattcagttctgtaagttttggactagaaatcagagtctctctggacatcatccgagtgtaaaatgtagcacaaattgcctttaaaaattaataatttaccaaatctatcagctatgcccagtctggcttgagaagataagtaaaataaatattgtaaagtcaatttttaataatctgtggcatgaaatttaagcacaagagaaaacatttagcaattaagcaggaacattcggtgcatgattaaatgtgaataataatacatatttaaaggcctcataacttacctgctagcaggaaatatttaaagttctaatctactacacagcacagctcatgccgtttctttgtttaatgagctcttgccttgtgattttcatgtttgagcagttactttgtaagtatttttacatggacagctacgtgtaaggctgacaaagagtagcacagacagatatgtggtgggggattgtcaggccagcgcagccacggaaaataatatgatcagatccttcatcatgctggtaaccagtggttggctgtattcatctaattattgagacagcacattcacatccgagggattttattataagaggtttataaaatttagagttgaagctgatctgtctctatctaccaaatagaagctggactcaggaccatggtttttcatgatgaagaatcaaatccttgataaatgatggcaggtcctcatcttccagaaagagggaaaaaaaaaaaaaaaaaaggcagaggaaaggaaatagctcggctgagaaacagagagcgagtgagcacagcgctgacagagagggagccgctgcctgccgctgagaacacaggctctgcacccagggcacagaagcaggagaagatgtaattctcgaggaccacattgattaacgcccgcccagggctagccacaaattagagccccgtcctgaaagaagcagtgctatgtcttgtaaggcatgcttccaaaggagcttgcattgcacacaccccggagcaaaccggcaagtagagaagacggacacttcccaatgaaagcgaaatgttcctgcctgccctgcgccgctcggttctccttcctctctctgctctcacagggtggtgttacacctccactgctctccatctagtgtgtttgtgcaacactcgcctccagggggagctcgaagctctcccgcccttcacctctgatcagagcactgatgtgagtcaggtccccaggatggtgggggcaccggctggaggagggcgggggctccttcagacctgccttgattaacccggaccaaaggggccctctgcactggagcgttacagtcaaagcacagcctgtgcacctgcccgtcggttccatagtgtttgtctgctgcttggtttgtgggacaggtggctggtcaggatctgcaggacctaaccccacccacgctcagctgtgaggagattaaagggtctcagtgtctcagggtcaggttccaggctggcttcttgcgatttcacagaagtcactaaatctttttgggtaacaatgggcttactcctaaaagcagtgggaggttgggggtcagggagcaatttgaacttattcttctctagattctctttcattacagagtcttattcacattgaataaatgtttattcatacctactgtgggccagacactatcctgggccctgggactatagcagtgaacaaagtggacaaaaatcctgcctttataaaatgcacatgctgagagttaagactcacgatgctcagatggggctgctgttgtggaagtcaggagagtccacgctgttagtgttgactgtttgttttgtcctttccattgtaagattcaccccattgcctcctaaagtgaaccccagggcagggaacatgttgacagggaggtggtctaatctaaatccagttagaacactcggagagctcctagactgaaacagggagaaggaagcacattttggatgattgtatttgttccttgatgggtctgctgaggaagagctatgtacccattgcatgtgctatttccatctcaggttatttgaagagaatacagaggagaagcagccccaggtacctactctagtggcagagtggcaggcttgaggtgcctgcatctgaaagctgctgtgagttagggaagcccccaccaaaaggcccaacaatgggcaacatcccccatcaaagccatggacatatccctggcaacagacttggctcttaacttccacgagtttttaagccaaggttggcaagaggaatagaacggggacgtcaaggtacatcaaaggaaagattcaaaatatatggaatccatgaggccacataggatatttcacagctttatgcttttctgataaatcctggaagacttaatataaggtcaggagttttcagtgctctgattcggtaaatttatttacagagacagctgtccgagggtggaataaggactcgggagtgagagggaggcactgtcaacactttcaggccagaccagcggctcacgctttggagaccggggctgcaggtgagggcacaggtggacctcaacccacctggacactccaccagaggggaaggcacagtgagaggcagtgccctgtggctgagctgacggcactggtcttggggcagggagaggagcccgtaggtcacaatggccttggtgaccccagcctgcaggtcacatgtcccttacctgggagccatctactctggaaaccatggatacctacacatctgtgcaaaattgacacagtgcctcagttatttgggtaaggctgaccagtgaattctgataaattgctgtaacaatgaccacccatctgtcaatgtgtcaccaagcataggctgtatacactgtgcagactgtaaggatccactgggctttcggcctgcggcacccaggtatgaagggcattagcgtacctcctatggccacacgcaaactccgcctggggtctaccccatcactctccactccattttgcagatggagcccaccgagtctccctagaaacaatggcttggatcctgggagcagtggcacccacctgtctggttcttatggccgagagccctgcagctagatgttctgtgagcctgtgttcccattttatggagactcagagaggtatttgccttgtgcatttctcctggagcttacatcactgaaggggacccttggccagcagtctctctgctccgagtccccgagtctccacaggtggccatggccattgggttccagctcagctcccacctttgccaccgccttcccagccctcgctaagctggagtcctggcccgggcccttgtcccagcttcacgccattgcttacacccttggccccctcccttcctgaaatcactgtccttcttttcccctctaatctgagtcctgtttattccttaaaactcagctcaactcccctgttctcactgagggattctgcaagcctcctagaaacccctccggcctcctggctcctgagcacccggccttgagcctgcagccaccttgcccagcactgcttggtcctggcagtgtggctgctgcgtgttcatggtgctagggggactcaaaggttctaggggaggcagggactactcttcctaggcctagttgtctttgctaccttcctagggcctagtgagttccatgccactgtgtatgcagtaggtccactatgtatgcagtaagatcactgtgtatgcagtaggtccactatgtatgcagtaagatcactgtgtatgcagtaggtccactatgtatgcagtaagaccactgtgtatgcagtaggtccactatgtatgcagtaagatcactgtgtatgcagtaggtccactatgtatgcagtaagaccactgtgtatgcagtaggtccactatgcatgcagtaagatcactatgtatacagtaaatccactacgtatgcagcaggaccactatgtatgcagtaagaccactatgtatgcagtaggtccactatgtatgcagtaagatcactgtgtatgcagtaggtccaccatgtatgcagtagatccactatgtatgcagtaggaccactatgtatgcagtatgaccattatgtatgcagtaggtctactatgtatgcagtaggtccaacacatatgcagtaggtctactatgtatgcagtgggaccactatgtatgcagtaggtccactgtgtatgcagaaggtccaacacatatgcagtgggtctactacgtatacagtgggaccactatgtatgcagtaggtccactatgtatgcagtaggtccattatgtatgtagtaggtctgcaaagactttgctgattgatctgaggaaggataagaggatatgaatgtttttcctgtggctctgggagtaagaagcgtttagggctacacacctaactacctcctggcctaatggatgctctgtgggcctgtgtgagagcaagaagaaaggctgaacacccctgtgagaaccatgtcagagccgtggctccaaaaaccacgcgagatggcatgctctgaggcctcttcctcgtgtttaatgactcgtggcaaagtgtggattctcgcggatatttacaaatgacttccgtttaccaccggacagttctattgctgagtggtctgatttcctggattatgtcctaagaaagtttaggacaatgcccctaaagtggtcatttagtgcccacggaagcttggtgctttgtgtgtcatgatggtgcatcaggagtttgcaaaaaaaaaagagagagataaataaaaagtaaaaggcacagatggggcatggacagcttctcattgcttgttccatgtgatggaactcaacacatctgctctgctgcggaaagcatctttgcactaatttgtttgtcagtgtccattgagaggacgatctgtcatcctgtcgcattttggttgccccgagatgtttgaagacaaggctagccacaaattggaactgtggccactggggagtaagtggtggaaaccaccagctgttctaagtaacatcaattgtgatttttttgtaaagatgaaatttcaacctaaggtctccaaaagcatttatcagctgcatgaaaaaaagctaatcaccgtaacagaagagtgagtctcttctaacgcacgtcctggggtgcgtgcgtggaagccttgttacagctggaaaagcaagagaagggggtggtcagaattcaatgagcctggagcctctgttttgctccatggtattttaagtctttctggtcaaaggtaacaagcattatcctgtaattggactacggtttcaggaacaagaattgagatttcattgtgctactgcatttgatttcctgatcaaatgctgtgatctggtcatggttctcctgccctatataccacctgtttctcaggatactttacgctgaatggcattcatttatttgggtttttgtttccctgaatccattttaatcttcccggagcatagagactatgctttgtcctagaacacaatagatgctcaacaaatgttgctttgattgaatcaattcaagtttgtatccttcaagcaatacctgaagtatctaatcttttatactgaatgtgttgctgtccaggattccagggatttgcttgcatactcccagtcctctgtcactgggcaggtctctgtggagcaccgcggtgtgggagcctgggctcgctcactccgcttagatcttgtagaagatggttggatctaagcagaaccttccatctacagcctctcaagttgccaacccataaaaaccagctgtgctcctggctcagtaacccttcagtccttgcctttctctgacttctcttccttgtcagcaggttagtttgtagcctgaactgcatgatggagattgagctggatctattttaattgccatgaagacatcatgggcaggaagcatgcatgctggaatagattagcaaacattgactcctcacgaaagccacagccttccaactgcaactcagtggtcagaggaggatgagcaaaagtggaggacagagaatgacccgacgtggagctgagcgggtgagggctaatctcacagaggcatgttactcaaaaatgcggaaacaggttctttcaggaggttagagtttccttcctcgactcaagcagtcattctgagcatgtggcatttgtcagaaggttgtgtttatgttttatgcttgatctataatgacacaacaaaactcatatagagaaggggaatcaagatctgatgtgtaaaagagcctgtggtttaaaatatggaggtattttgggctccctggtgagaggtgaggccaagcaatgcagcacacagatgagctctgcagtgccagcctcattaggtcggcctgcgtggtcctctgaaatgtacagttctgttgtcgtcactgtgtataaacagaacaaggagagaactgccttattcctgggcactggcctttttaaatcctttctttttctctttaaatttcatgttcccttgtcattgttgctgtaaaaccgaagccctcttctgcgtggcgatttggagaacacagtcagcatgcacacacatcattcttcaggtgcagttatgacagaaggatggtcctgtctcatccctacacctgtgaggcctcagttctgcctctctcccctgttgtggccttggaaggaaaagcctccagctctgagtctgctgccaggtggaggttcttccatttgataaggtgaggagcgtgaatggatggagctgagcttctgagactcggagaccagtgaacctgcttgccaccctgggcaagagagcccaggggctggcccaggagaggcggcaaggctgtgtgcagacactttgcccctggttgactcctgacggcgcttactccaccactgcatcccttctataccctgcttctcccttcagacaaggggcagactcctaagaaggcagctttgtgttggacaaaacacagtggggacaggaacctaaagcagttgtgaaagagccggaggacccctgtccccaaaccctgcccatcgggaagaggccacagagctatgtgtcggccccacgcttgggcagaccactgcaggcacgtgtgtactccgctgggctccaggggcctgattttttaacttatccctgagattgagttataaaatttagatcctccataagtagactcacatggagtcccagctgatttctgataagggtggaaaaggaattcagtggaggacaggtcacctttttagaacatggtgtgggagttctcagatgtgatgctgagtacaattcataaaagagaaaatgcagacatcagacctcatcagaattaaaagctgttctgttctgcagaagactctgttaagagggtatgagaagctcaagattaagataaagtatttgcaaaccacatgtctggcaaaggacttatgtctaaaaaaatataaagaactctcaaaacttagtaacaaagtcggcaataccattagaaacgggcaaaagacaagaaaagatgtttcactgaagatgatatacagttggcaaataggcatatgaaaagatgttcaatgtcattagccattaaggagatgcaaattaaaactacagtgagatgttaccatatacctggcagaatggcttgattgaaaagtggtgaccacaccaaatgctggtgaagatgtagggaaactggatcattcatacgttgctggtgggaaagtaaaatgttacagccactctggaaaacagtttggcagtttcttataaaactaaacatgcaactaccacatgacccagaggtcacatttttgggcattaatcctggaggaatggaaatttatgtttgcataaaaaactgtacatggatgtttatagcagctttatttataatagctccacactggaattagtccagaccaggtgttcatcagtggtgaatggttaaacacaccatggtcatacacactgctcaacaataagaggaaatgaactatctgtatacacaacttagataaatctcctgggaatcatgctgaatgaaaaaagccagtcccattttttttttttttttgagacagagtctcattctgtcacccaggctggagtgcagtgatgcaatcttgatctcggctcactgcaacctctgcctcccaggttcaagtgattcttgtgcctcagcctccagagtagctaggattacaggcatgcaccaccacacccgactaatttttttgtatttttagtagatatgaggtttcaccatattggccaggctggtctcgaactcctaacctcaagaaatctacctgcctcagcctcccaaagtgctgggattataggagtgagccaccacacctgcctccaaaatgtttttatgcctattttttttttttttgacagagtcttgttttgtcacccaggctggagtgcagtggtgctatctcggctcactgcaagctccgcctcccaggttcacgccattctcttgcctcagcctccagagtagctgggactacaggcacccatcaccacgcccagctaatttttttgtatttttagtagagatggagtttcaccatgttagccaggatggtctcgatctcctgacctcgtgatccgcccgcctctgcctcctaaagtgctgggattacaggcatgaaccaccacgcccagccttttattccttttatatgacatttttgaaatgactaaactatggaaatggagaacagattagtggttgtcatgggttagagattgggggctggggatgggagggaggggggtgtgcttatgaaagggacaacatggggaccttgtggtgaccggatgttctgtgttcttcacagtgatggtggacgtacaagcctccacctgtgataaaattacacagatttaaacacatgcacttacacacacacacacgcaatcccacacacacatacacacacggacacacacacacacacggacacacacacacacacggacaaggaaacaagtcaaacaggaaatctgaataaggtgggtggagggcaccagtgtctatattctggtctgaatcaggtgggtggagggcaccagtgtctatattctggtctgaatcaggtgggtgggggcaccagtgtctatattctggtctgaataaggtgggtggagggcaccagtgtctatattctggttgtgatggtgtgctctagttttgctagttgttatcatggagggaagccgggtatgaggtatgtgggcacttctgtaatgcctcttacaatggcatgtgcgtccataaacttaaaagtctaattaaaaattgttaaatgcttacagggttatatgagttttatgtttgcacaaatctcataatcaaaatcttaaatcatgatcatgaactgcagtggtgctcctggtgctgttttagctgatgaaattacattaacttgccttccgtaggataaaacgctcatcactcaaaagtgtacctaacagcctgcaaacaacataaactgaaacctttagtatgcagatggaaattctcattctcaataagaagactccgtaaagagaatatggtaaaatattagcctatagatttgggcccaacccacatggatgctgcagacgtgaatgcaggacaaaggttattgctctctctggtacacacatgaagcctgtctttccatgagaagcagtctctgtgagctctaggccttgcaagaagcatcattcagcttctatattctgctgatatgtttgcttaaatgaagatgcattagatatgaatcctgctgggctggtctgcaccatacttattaagacagtcactttgaatacctgattttaggaatcctgctaaagattagatacaatctttctcttccttatctaactgcttttttctataactgctatttttgcttttcctcttctctttccctcctctctcctttttcctcccctgtcttactcctctctcctcccctcatctcctttccttgttgctagcaaaaccactcttaaataacagctaagggaatttctctaaacagaaatgaaataataacagaagaaggcttagggcttcaaaatggaaagaacaacattgaaatgagtaaaaatcgtgctaagtatccttttcctcatgtggcgctctctatatatagaggatacttacgacaattggatttagaaagtatggagtgtaagagaactaagtgaaagtgaactttctatgctttactcgaagtggcaaggcactgatgtcagtagaccatggtgcagtgtagttgcatactgagatacaaagagcaactgataagaaaactgtaaaaggcaaatactaaaaaattgtgaataaatcaaggtagaatccttaagaatattcaagtaagccacagtaatgcaaaaaggaaataagcagaatgagaggcagaggaacaaacaaaacaaataataaaatggaagatttaagccttgatatgtcaataattatgctaattgtaaatggcttataacactaattaaagacagagattggctgagtggatttttaaaaaacccacaaaaacatgattcaacaatatgctgtctatgtaaaactcacttaaattacaatgacatatatggattgaaattaaaaggatgggaaaagatatactgtataagtagtaattaaaaaatcagtagccaggtgtggcggcatgcatctgtaatagcagctacttgggaggctgaggcaggagaatcacttgaatctgggaggcggaggttgcagtgagctgagatcatgcctctgcactccaacctgggtgacagagtgagactccgtctcaaaaaaaaaaaatcaggagtgtctatatgaaattatataaagtagactcatagccaagaaaatcactgaaggccaagagggaaattatataatgataaaaggatcaatccactgggaagacataactatcctaaatttagtgcatgttccaaacaacaaaacatcaaaatatataaagcaaaaagtgacagacctgaaatgagaagtaggcaaatcaatagttaccttggggtctgtcaacaccctactgtcagtaattgatagaactcctagactaaaagtcagcaaggatatagaagacttgaacaacaccatcaactaacaggatctaattgacattttagaatattgtcacaggatatgtcacagaattgccatcagcaacatagaatacacatatttttcaatttcttctgaaacactcatcaatatataccatatactgagctactaaacaaatctcaacaaatttaaaataataaaaatcatatagtgtgttccttgaccataaaggaattaaaccagaaatcaataatagaaagacaacagaaaagtcttcaaacatttggaaattaaacaacacacttctaaataacccatgtatcagagaaaaaatctcaaaggtaatacaaatgcattgaaccaaatgaaaatgaaaatacaaaagccacagtgttaagacgcagctaaagcagtactgagagggaaattcatagcacatttagcacttatacatatttataattgatctagactgcttacattagaaatgaagaaaggtctcaaatcaatggtgcaagtttctattttataaaactataaaaaacaagaaaaataaacccaaagcaagcagaattaaagaataaagatgagagaagaaatcaatcaaattgaaaacaagaaaatagaaaatcagtgaaatgaaactagttcttccaaaaaatctataaaactaaaaaatgtcttgcaagactgagaaagatacacaaagagagaaatacaaatctctggtattaggaatgaaataggtgctattactacagaacgtgtagtttttaaaagaataagggaaaactatgaacaattttaagttcacaaattccatacttagaagaaatggcttgtagaaaaccataaactgcaaaaactcaaccaagatggaatagctaacctgaatagtcttataaccattaagtgaactcataatttaaaatctcccaggaaagaaatattcaggttcagctccccgccacacttcagattaggtcaggcacccacttctgctttagttcctgttcttttccttcatgccatgcatcacagttcattataatatattaatatgattatcttattaagccactctcccagaatcctataaattccatgactatgttacttattttatgtctccagcataaagcctgacacctcatggaaaatgcagagatagtaactgaatgaatgaatgaatgaatgatatctttgaatgatagaaacatagctctcagggtgtcttatttaacttgtgatatattgagaaattgccctagaatatcaagatggaatttgtttggcttggcaatgtcttcatcattgacaaatattagctcatgaggtcagtcaagggctggctggctagaggaaaaagtaaatataggtatgaaggaagctcacgcccctaattctctgaagttttacacaatagagtttgtcttccatttcatgaagtctcagcccgtgactgtgacctttacctttttacttttgctagaaatattttttcatgagggtattttaatctaggatgcacgttcacttatctaagtgaaaagtcccaagtcgaaaagttccaaatctctttaatggaggttgcaattatgacttatttcctttgtctgggaacataaccttgctgtctggctgtggtacagattgccattcaatatacttatatgagtatgcttaatatgaatatgcttattcaaagcttattcaaagaatcaatgcaaaggtccccagggctccactttctcttttgctttgcattgttattgattattgtccttggggagatggtcaccttgggcagggaaggcccaggcatcccccaagggcaagggtggttctgctcagctggaagccagaatctcgcacagccatagcctcttcctaaatatctcctgaacaatgaatacgtggttcaatggatcctcagttttaaaggagatcccaggtgaagatgaacctggctgatatacatccttaaaaagaaaaaactaacaagccaaaaaaatctcccattttctaaaaaaatcctggtctggaaagaattcaagccatgtcaactccgatgtaagctttgggaatggaattatcataatcaaagagaaaatgaagtgaagagagtaggaagaggagtcatgcaaggaaaggcgaagcttgagaaagaacacggtgggatagccaggaccacagcattctccgaattgtggcagctggtgtgaaatgagggctggggtctctcgtgtgtgcccaggacatcttgcatgcatggaagtgctgcactggccaatgtcattctcactgccccacaagcctgcagggaggacgtatggtttgctctgtgactgattttaaagtgatctcagggaagaataggaaaaggcagagagtattgtcaccagggaagtggattaaaacgtgtggataagctgctgggtcgaagtctcctgcaaccctcatcacctccttacaaaaggaatcagtccggcttcccagatgcggacgttcaggtggtgaggttgtcggtgttgaggttgttgtttggccaagatcacatccatagatgactgaggggtggagcagggattcgatccactttgtccaaccctgagcctgagtgtctctcccaggcccacctcccaccaaccctgagttgggatgaggactgctgccctgccccactgacaggaaattgtggggagaacaatacaggaagttggaaatgcagcgcggagataatttaaaggatcagtagcaagaagttccatttatgtgtatagaatgtctaaaaaatttaaatgattccttcagaaatgtaataattttataaatataggtctaaaatgaatcaaagtttccgctaagatacacctcggtggaccctatatggtggcattaccattatgctgttgactgtaaatgtaactgaatgtgcaattatggtatcatttgacaagttggtgcatattgaacacatactatagaacacggaggctattttaatatttaggtgctgatttttttgtaatcagaaagaaaacaactatattttcaagtatacgttaaaaaagggtttgagtttcaggtgaagctattagattccgagaaggctgataacgagagatttaaaataacacgaagattcaggtgaagctattagattccgagaaggctgataacgagagatttaaaataacacgaagaggtgatgtacacagaggccggtatgagaaattccacattaactgtaatttgaaaatgttttgcctctcaccgctttctgcgttttaaatggaggtgtctggccctcactctccaaggcctgctgtctttgtgtcaggtttcagctcccgctggggcctcagatgtgtgggtgtggcaggccaggtctcactaacgcaggcctccgtagcaactgtttcagtattgactgggtggtgaagttgaacatcagaagccagtgcccttatacaacggctggaataggacaaaagcccaccaagagttttgcccgggcctttcctgggccttgaagcatgacaaaacaacgaaggcattcttaacaggacccatttagaattaaacaagttttactgggggtctgaagaaaccccccaaacctccatgatttagcagcagacaagataagggtaatcaccccggcacctggaccatttagatgacgtaaactcactgaggctccagaggaaggtcttcaggactcgaccttagttatagactagaagaagttcatcacttatgtctttaggggaatgaacacttacacgtagacatagagcttagaaggtacagaagctctggaaaactttgtcattctgagttggtctggcgatagtttctgctccttctccctgtaaccagttacagaaataaaaactccttcctcctcagttcatctgcatctcgttattgggcagagagaaatagcagcccaaccctcagtttggtccgggaacaagggcacttgggctcacagcttcgttgggggaagattcagatcctcaaaaaattgaagcacagcacggacctgggtcccctgggaggccgtggagcacgagggagggcacagaacccaccctggcccgaggccggctgtgcctccaatgagaggtgtccccgggctgtggatgcccaggttacggggaaggtggtgctggctggggggctgggagcagatgaacggcaggagctcagacaggtgttggtgagacaagagcggggctcaggcctgcttccaagccgatgcttttgcataaaatgaactcaagggagggtgtgaagctttcctcccctcagtgttactcctggtggagaaagcttgttaaagatgttctaatctctgctgtggtaaaagacaggaccattaactcagggggcctgtgttccttccgcttgagggcagagcctttgctgccccgggctgagcctccttctgcgcaaggaccattaacgagggggcctgtgttccttctgtctgagggcggagccttcacagccctggactgagcctgcctctgcaccatcctgcagtgtcctctcatccaaactgtggccgccctgccaggcccctctctctccttccacttcctgggcgagacttcagggttcacagcatcgttccaaaacctgcacgggagaatttaaactcaggcctgcctgcgtccagctcgggtcctgtcttgtccctggctgccacctgcctccctgctggccaccccagcaggcaacgtgaggctggaaggatgtggcctccgggaaggttttagtccacatgtcactcataatacgacattcagcaaaatgagtaaaaacgtttcgaagggaaaatgattttatagaaagggatgggtaacctttatgataaaattgctttgctagagcgtgttgcttgtgacagcaccacctttctgttcttgacaatgtttgtcttcttaactaaacaaacgttagctgagttgaatgaaattatgtacgaaccagagaagtcgggaggatgtttgaggctcgagcccccgtcatcaccttttgtaatataacttcattttgtaatggaagtggctcttgcgaggctgtgtgtgtgtgtacgtgatatgtgtttgcatgtgcgtgtgtgcatgcttgtgtgtgggtgtacaatgaacacctctattcaaatagagcagctcttcagaagccacttggattgatctgttaattttccagaattttacaatatggagaatcatcacaagggaaacctatactaccctagcagctactttttaaaaattctttttgtaattagcctaggtctctttttgttttaaagaaagtcttcactgatttttaacgatcacacttacttctcgtgagcaaaagccgataatgtctgcagtttgaaaggtaattatgcctggcttctcatccagcagctactctgatattccaaaataataatgttaccattggaactgggttattcttcatacgatactttgtagtattgtaaccatctttataataataaaaaggcatttatattatgaacacttaattttttgttttctaagatttcccacctctcaaagcttttaggaaagagaacattaaaagatgttaatgcacacagatacatctcaatttccctcggggagaagctaccttaactgccatttcaagttttacatttttgctttaaacgagtgatttcatttaaataaaaaagtcttattttctgtgatgaaaattcagctgctccttgtaaccctgaagcatcttgatttattattgactatatcctctttcaaggagaatattcttctcaaagacattatgcaggaattcttatattgcttactgtttggcattttctattaatctcaccacatctgttttcatgctatttggataaaaaaatcagaaaagtatagtagttacatgttttgataaatacaattgcaagaatcaacacattctgttcacctgaaggagcctgtctaatgtatgctgttagttgcattaaggaactcttagaaatttaaaaagcatttttaacagggcaaaggttttcttcagttcttttgtaaaaaaatgtacaaacttcactaaaataaattttagaaattactttgtaaaagacgtaaatgggaaaaaacattttatatgaatttgtcttccaaaaataatttggtatacatatatatatatacacacacacacatatatatacacacacacacacatgcacatatatatatatagctaactttccatatgtgtgtgtgtgtatatatgtggatgaacgtaaagttagttgtagcttattatgtcgtttctatgtatagttgcaattcatacatatttatagtacatatccatagagtcacaggacacacatgcttatggtacaaagactaagaagcgactccagccaggacgcttacagcagacacgcagccacgggtttattaggagcccgagtcaggtctcttatttgcacagcagttgtgtgcctggctgtgcgctgatctaaaaggcatctcctgccctaagagagttgagtgactcacctgagccgattgggaaattattaaggcaagaaatatgggaagaagggagggatccaagtgcatctgagccctgatgaggatcctggccttggaagagcgtcctgggcaggagtggggtttggacagcgatagcgggtcctgtggggaaggaagccagcatttcaggctggagcgaagcttctttggaggtgaaaagtgacacggaatgtgcaggaaacagtaaaacttaaaatgggcagaggatatgggacgtgtagggcagatggaataaacaggagcagaataactccagttaagctgagcagatctgctatctttaatcttcaacgcgaggctccccacctggggtctcacttcttaggaacattatgccagctggcatgaccccgtttactcatgagaaccgcttcgtccccttcccttcctgccacctctcactccctcctctcctttgggcagagtggctgaagcagggtgggcagacaaaggccctgaagaacactagctctggccttgggagtgagacgcaccttccttcccctcagtggacagagcaggtccttcactatggggctcctgagtctctcccaggatggaggcaggcccttcacgacagggctcctgagtctcctcagtggacggaagcaggttcttcactatggggctcctgagtctcccccaagacagaggcaggtccttcatcatggggctcctgagtctccttagcagatggaggcaggcccttcatgatggggctcctgagtctcctcagcagatggaaggaggtccttcatcatggggctcctgagtctcctcagcagatggaggcaggcccttcactatggggctcctgagtctcctcggtggacagaagcaggttcttcactatggggctcctgagtctccccaggacagaggcaggtccttcatgatggggctcctgagtctcctcagcagatggaggcaggcccttcatgatggggctcctgagtctcctcagcagatggaggcaggcccttcactatggggctcctgagtctcccccaaaacagaggcagatccttcactatggggctcctgagtctccccccggatagaggcaggtacttcacgatggggctcctgagtctcctcagcagatggaggcaggttcttcactatggggctcctgagtctctcccaggatggaggcaggcccttcatgatggggctcctgagtctcctcagcagatggaggcaggtccttcactgtggggcttctgagtctcccccaggatggaggcaggttcttcactatggggctcctgagtctctgccaggatggaggcaggcccttcatgatggggctcctgaatctcctcagcagatggaggcaggtccttcactgtggggcttctgagtctcccccaggatggaggcaggttcttcactatggggctcctgagtctctgccaggatggaggcaggcccttcatgatggggctcctgaatctcctcagcagatggaggcaggtccttcactacggggcttctgagtctctcccaggatggaggcaggcccttcacgatggggctcctgagtctcctcagcagatggaggcaggttcttcactatgggactcctgagtctctcccaggatggaggcagactcttcatgatggggctcctgagtctcctcagcagatggaggcaggtccttcactatggggcttctgagtctctcccaggatggaggcaggcccttcatgatggggctcctgagtctcctcagcaggtggaggcaggcccttcactatggggctcctgagtctcccccaggacagaggcaggctcctcaggatggggctcctgagtctcctcagcagatggaggcaggtccttcactacggggcttctgagtctctcccaggatggaggcaggcccttcacgatggggctcctgagtctcctcagcagatggaggcaggtccttcactatggggctcctgagtctctcccaggatggaggcaggcccttcatgatggggctcctgagtctcctcagcagatggaggcaggtccttcactatggggctcctgagtctcctcagcagatggaggcaggtccttcactatggggctcctgagtctcctcagcagatggaggcaggtccttcatcatggggctcctgagtgtcccccaggacagaggcagtctcctcatgatggggctcctgagtctcctcagcagatggaggcaggtccttcactgtggggcttctgagtctcccctaggatggaggcaggtccttcactatggggctcctgagtctcctcagtggacggaggcaggtccttcactatggggctcctgagtctcctcggtggacagaagcagtttcttcactatggggctcctgagtctcccccaggactgaggcaggtccttcatgatggggctcctgagtctcctcagcagatggaggcaggttcttcactatggggctcctgagtctcctcagcagatggaggcaggctcctcatgatggggctcctgagtctcccccaggacagaggcaggtccttcactatggggcttctgagtctcccccaggatggaggcaggcccttcactatgggtctcctgagtctccgctgcacattagtgctgacaagctgagcagcacctgggctccgagacagcctggattccaaactgaacatggccactgatgagctaggtgaccgtgggacagtcaatctgatcctcatggtgtggaccgtgtctaatattaaatctaatattatatctccagtccttaatattccacacctttgctacaaacgccttttttttttttttcttaccatctttaaaactggtagcatctggctcagagattgctttttggagccagagcccacgatatacccccacattgtgacaaaatttcaatgtcatgataatgaatgacatcagctacacataatattttcaattttaattcttagttttgcacaacctaatttatctgtagcctgtcctgggggcaggtctgtaccggtttcctgaaaaatgtctaaagtctaacataaattaaacaagattatgaacactctggtccaagataagctatgagccaagtgttaactgtaaagtggttcctaatgtgtttccaaagtccaacagaacaaatgcatgaaatgccaggagatgaaactgttttaagtaatgaaatggggtcctcaagagaacatgagcacagacttcaggtgagttttacagccatttttgtgccttagccaaggtgctcacagacatgacaacgaaaattcatgtgttcaagcctcactccagcctttgctagacctagaggaatgaatagctagcactattcattcacaacactgcaggatattttgtgattacactttatgggttcactggtggaccagtttctcagctcacttggtagtgtcagctgaatcatttccctaagtaggactgtcaggtagaccagatgtcagcttttgcatctgtgcagtagacgactagtttcacttgctgttgggtagttaataacatctgcctcctgaattgcctttcattatgcatttagagaagaatatcctagattccttgggaaaaaaatagaaaaaatatgtctagcaaaatcttttacctgcaacttatctaaaaaaaattgttttttggaaaagcaatattcctatctgctgtttttattgtttttgcttcagatgcactgtttttaacataagctttctaacatctgaaagaaagaagagttagtgtggttaatctttcagaataaagagacaacttctcagaggaaagaagatttgatgcagaaaacccattgtttacatatgattatttgttttggaagacactcaataataaataataacagttaaagatattttccaagtcctttagacatattatgtcattaaactcacattcaatccttcctatgaagtaggtattactcttcacttacacaaaatcacacaggaagtaaatcaatcatttttacttattctcatgacatatttgtctttttttctgtgacaatctattaatgttgtaaaatcaaaagaaattttaaaatttgttgaaatgttgacgcttcccatgcttaataatgtatagaatctcctttaattttcaaaattgacattgataataggatattcatctctgtattttacgcagatgagggaattgagcttagagaaattaagaaacttgtgctaattctgttattctgaattctctccttatactgtggaaataaatattcatttgattttatattacaagtcaattcccaagtaaatgtgtggatattcaacaccctggtcccaattaacaatgaagaaacaaaacaaaacaaaattcagtttcagtctgatttttaaccaatgcatgataaaacatccttgaaataggatctttctctaacttgcccataactataaagttaaataccccatggggtatattacgctaataaaatttaaacaatataactgtgtaagatctggattattcaaaatttctgcaacagcttatctccttattaccctgtcccaataaatagtttccctttttccaagaaccccttctggggaagatcagaagacagctcaggtttccctccttggtaggtgtggtttcctaatgtctttgtcaaatttctccctggttaggtcttgtctgtgtccccaccactaagcatcaccctgtggaattcatgtcttcacattttaatctaaattttaagtttcctctgtgttagtatatgttaatgtttcatgttttcagtgtggagctcaaaccacaggcctgctagagatggccatgctgtgcttgaagccaaactgaaaaaacaaaaacatccacacacaaaatagaaaaccagacattttcacttaatagctactctctcagttcaaataatgacagtgttattccaggctcacccaagtgctaccccgacaataaacattcttataaaatgaaaggaccagcagtcgtactcttgagagtgagacactgttcttatgagattaaatgaaaagatcaataagaaccaagctacctgttatactgtatatggtaaaagcacagaagatagaaaagttcagtttaacactttgccgttttgattttttttcttggaaaacttgggagagaaacagagaattctgacccagtataaaataaacagaccaagagatgctcgaggggtatgaccacctgagctgaatggacaagaggaaaaacaaaaacaaggaagatggggaaatgcaatgagccagtctgaaaagcgagttgactgtacttaaactgatagaagacagtaaagtaaatgagatgggacaagagcaaagagggatgaaaactacttcagcacaaaagactaaattgaaataacacctacaatgggttgggaaggcctggagagaagtgaatgaataaaaacaacaaacaaacaaacaaacaaacaacggaaacttctaggatgacaccaagtacaaagtgatgtaaatttttcctctaagtaggcataggccaagggggaaaaacacccaaattcaaagcttatttttctgtcctgtgcttgggactcatttttccttaggagagcttttgccccatttcatgtgggagaatgtgagaaacctggaacctacatctggttcttgctgaagacctttctttgccatttatgctccctcaaaactaactgtcttcagtttcctttcttattatgcaggcgaattaattctttaatgttaataatatattccatttgttaaatattatacagtttttggtctgccattcctaacaacttctttgattccccttgcaaattgaattagtatttttatttaaccatgtccttcagttttcaagttcttcagctattgaaggaatcgcctctgtgtgtgggaccagaggacaatgaaaaattcaacacctttctagtcaccattttaatgttttaagactattaagacattaatagaaacctcctttttttcagatatcagtatgagtttagctgatttcgcagctaattcctaatagcttggacttaagtgagaataaaaggttcaagagtaaaaatcgattaaatgagagttatctaagaatattgagaaagccattgcaagagatgataaaaactaaataaaaggaagactcgaagtcagtagattatctttttctggagagtattagaaaaaaaggaaggtaaagaaatgtttccttattcagcatgggggagtacaaatctaccactattgcaggttaacacaaatgctattcacccatccacctatctatctgtctgtccatctatccatccatccatccacccactcattcatccatctgtccatccacccatccatccatccatccatccatccatctatccatccatgcacccacacaccactctatccattcaccatccatctacatccattcttctatccatctattcatccatctatccatctacccacccactcactcattcatccatccatccacccacccacttactcattcatccatccatccactcacccactcatccatccatctatccatccatccacccacccatctatccatccattcaccatccatctatttccatctatctacatccatccatccatccatccatccatccactcattcatccttccatccacccagccatccactcacccatccactcacccatcccatccatccattcaccatccatctatctacatccatccatctatccatcctctatccatccacccacccatccatccattgatcatccatctatctacattctccttccatctaaccatccatccacccacacatccattcatccacccactcatccatccactcacaatccatccatctacattcatccatccatccatccacccaccactctatctattcaccatctttctatctacctccattctcccatccatctattcatctgtctatccatccacccacccattcactcattcatccatccatccatccacccactcactcattcatccattcatccacccacccactcatccatctatctatccatccatccatccacccatctatccatccattcaccatccatttccatccatccacccactcattcattcttccatacacccagccatccacccacccaccccatccatccattcaccatccatctacatccatccatctatccatccacccacccatccatccactgaccatccgtctacattctccttccatctatcaatccatccacccacccatccattcatccacccactcatccatccactcacaatccatccatctacattcatccgtccatccactcacccatccattcactcattcaccatccatccatctacattaatccttccctccattcatccatccacccacccacccatctatccatccatccatccatccatccatttaccatccattcactcaccatctatctatctacattcatgttttcattcatccatccacccaccaacccatccatccatccacacacccatccattcattcaccacccatccatctacatccattcttccatccatccatccatccacccacccacccatctattcattcaccatccgcctacatccatcctttcatctgtccattcgttattcatccctctacatcaatttatccttccatccatccattcatccacccattcatcatccatctacatccatccatccttccatctatccacgcatctatccatccatccacccacccatccacccacccatccattcaccacccatccacccattcttccatccatccatctgtccactcatccttctgtccatacatctaaactcatccatccatctgtccttccattatttacatgttgcatgtactcactagtaaatcacatgctgtgaggaaatcagaaatttaatatagaaccatgctcttaaaaacttattttttagttgagaaaattaaaaattgccagttaagtaggagaatacgctttcagtggtgcaaataagaacagtagtggtcaaagaaaaggaaagttaaaaggtgactggagaggccagggaatgagctaatgggctaataagctgacctgtgtgatggaaggaggtttgttaagagtgagacatacggttgatgatttggataagatagttatgcaatgtaaatgacaaaactctatagtgggtcattcaatattttaggggaaggaaaagcaggtgaaaaatccgtagcttttctttcgatattatagtccaaagtgagactacataaactctctctcaccatgtaaagctcctactccctagagtaaggttctatctttaacactgtaggacgaggaatggaagggagggggtgaaggaaacatgaggtcattaagttaatgctttgcgttgtcatggaccaggacaagaaggctgaaataaggttgtgtttttgttcttccactttctggacaaaattctttgggcaagtcatttagtctttctgaacctgtgcgtctccatttctggaatggaaatattattatttttatgactacgactacctcagatgattattgtgaagatgggaaagaattctgtgaactacccaaatggtacccccaatacacaaatcgtcatagtaagaaaaatagcaccccagctttctggacatttgtacaaatgtacaagctatgttacatgcacctgtttattcagtcttcacaatgactttatgacacagttgttactatttttcccacttaacaaatgggcaaactgaggcagagcttttcagtggcacagtgggtaagtatgagtgctgaggtcagggcttaggcgggggcgaaggcatgcagggaggcggtgctgaagcaggagacacgctgggcacagaggcagaaagcctgggctcccattcctgtttgtcagtgaatagctgtgctcctcagggcagtcacttgaactctgtgtgccagttttcatactttttaaaggaataatttttcatctctcttacagtgttctcgtgacagttaaaacgttcttgtatgcaagttcgcctattatagtgcttggttcagagtggactttgataagttttgctttcttgtgaacatattcaacgatttctcacttattgatactcctgccaaagtgcctgacttaggccccgggagggttgatggcctcagagggtttcgacctacgcaattgtcaagggtttatttcattcttcttaattgaattatagcgcttgggttcttgaagctcatgacttcatttaggaaatatttgaaaattgattatttaatcacttaattgtaaaacacgaatgaaatttcttagttaattaaagctgtggataataatttaattataactttatatgccagatttactcaaagcatcttaaggatgaggattcaattagcagccttcggatgcacgggtcagtgggatactacctacagcaacgcgtggaatggcttagagcagcatagctagcagcgctttataacagaagcttggagagcaggacacagcttctggctccacaggtatctgagattatcctggaaaaattatttaacctctttaggtttcagttttctcatctgtaaaatgggatttttatatctctttccaaaagatattgtaaggatcaagttattttcccctgtggctcatggcaggtaacaaccaacctggctctcaggtgtggggagaaaggagatggctgtaaaggatgtcactgtcattccaccaggcagaacacaatgggaagagagtacagaagtccagccatacagcttctgcatttttgagtgaagacagatcatatgtaattttttttttgtgtttgttttgtttggttgctttttaaaatgtgattgcagcttcaggggtacatgtgcaggtttgttatacaggtaaacttgtgtcacgggggtttgctgtacggattgtaatggcaccaggtaataagcatagtacctgattggtagttttttgatctccatcctcctttcacctccaacctcaagcaggccctggtgtctattgtttcctttttcatgtccctgtgttttcatcatttagctcctgcttacaagtgagagcttgtggtatttggttttctgttgctgtgttagtttgcttaagatcatggcctccagcttcacccacgttgctgcaaaagacatgatcttgttcttttttatagctgcatagtattgcatggtatctgtgtagcacattttctgtatccagtctaccactgatgggcattcaggttgattccatgtatttgctattgtgaatagtgctgcaatgaacatatgtgtgcatgtgtctttatggtatagaaaaacagtattacaaacctataggctaaattgatgttctttagttatcgagggggaaagataattatatccttggtggtgtttgatttgtgtaatacagatgtttgaaacaaacatgttagtggtgttggaaaacatataagacagtatctatgaagaggcgaggggaagattaggttttgggctgacaggctctctctacctccatgaaacaaatgtgaatgagacacagggtatggctccctttgatatttaaatgttaagtgtctactccaaagtgaacatgggttttatgtatatgcatgtgtcaggactcccttcatgaatatccacagctccttctgtcacctgttgactatgtatgtttagccaacctattcagcatagagctgctgcccaaatccctcctccttggaagtgcccatttctggtcttggcaggaagctcttcttcccagcctgtgagattgccatgcttctctcaggtgctttcttatgaaagttttcacagatcatttgcatggtaatagggtgcatggacaagcccatctcacatagcttcttatgttaacatctttatttcctgcagattgaacctagaaagactggttgggccagacatgtaagtttccctcagtccagcagctaagcaggaactctgtgccttatatggccttggaaaggaaaccgtgcttggtctaaatcaacagctttcctttgtcgacctagcactgctggactgtaatactaactttaaatcaaaggagccatacccccccagaagccaccgccttcccaccaacagccagagcctcagcctgccgaccccatgactgacatctcaggggtccccagctcatcttgtaagcatgaccaccctgtgcacactgcaccacaggacacacatgcagcctgatcctgcccatacactctggagaagcgagttcggggagaaaagggttctgggtaattgtgtcctgcacaccgggattcaagaatgaatggttgcggtcactggtggtcctgcctccatcctcggtctttccatgagtctggatgagaccaggtccccctcacccgagtgacccccactccttttctttattgccaggaacagtcagccccacatgctattatcaacaactgtcactttcccacatttgcccaagactctgcctcggtcagggctgccctttggccagtatcccttagttttgtattaggatctggtgagatctcccagctggaccccgtgccccttcacttccccgtgacccatcctgtatcagcctatatcattcagctgccccctccactgtgctgagtgtgtgcaatgcatccccatggtaaaagttcttcagaagtcccatatccattggtcctgtgtgttttctccccttttatcccaggtgtctcctgtgacttctgcttcctctcccctaattcctttcaggaccctctgcactagcacatcagatagcttcataaagtctcctggagcagaaattagatgctcatccagagagaattcccagaggagaagccgaagagaacatgtctgaaatctcatgcaaatccctgagagtcaggacctcatgggaagaaattcaatgtattcctttaaaggcggggacacagtgaggctcatcctcagggctttgtgcaaagtgcttccctccagattgaaatataggccgtatctccaggtccaatttaatctctattaggcactcaatggctaaattaaggactttacggatacctaatttagataaacccttaactattaacctccaataatgtcatcatttcactgagtagaaaagaaaacatctgggtgagttcaattagccaagggcatggaggagaggcctgcacagtgcctgtgcatgctaattttgtctcgctgaccctgacggaggggctggctgcaaggaggccgtggccagcatgacgcttgaatggaaggaggctgccgccagtatgacgcttgaaggtggccaccctgccctcctgggaagagcttcccgagagtctccacactgagagcacaggtggaggctcccgtcgagagggagctccccacgctcccgtcgagagggagggaggaattcctcctgcatagccctggtcctcagttacaagcctgcttcttttcctgccctctgaaaatgaggacaactcatcttattttatgcaattatagtctgttacataaaagacactaataatctttggaaaatcattatgggtgtgtctgtccacttcgtttcctgctgctggaagggtgctttttctttagccgctgtggctgcattttggttgctgtaggaggcatgcagagctgcccctgcctcccactctcgtggcttcggtgatgattcagcaccggactctgatgtcggatgcccggatggtgcctcctgcacctgcaaatgcctccctcgcccccttggatctgtcacttattgtgttcacatctaccgtttgctggctccttttgttgaggatgtctggttcttccccaggggaaactgatcacaaagaggactgaacaagaacaggctgcctaaagctatttgacgaggatctgagtgcaggtggatttattctgaaggtcatggcagggaacatgggtgagtggcgaggaagggaggtgaggggagacagaagcccctgcttgcatggggcccctggggctttgggggctgcaggagcatgccttggtgttgttccagcctgaaaacccaagatttggggtgttatctgccacctgaccctccacgagctgaaggctgctgctgaggggtgggaaagtggtgacttttgggtgaccccactggccctcaccatagctgggcacagcacacagtcagatgtgctgtcagggagctcctgcgaataggcacagcagccttgagaaaagcagagggagctgatggtgtctgctgtgtgcaagccagaaacacagagagatgtgtgtgccaacaaaacctggaaaataaccatgtcctcatagcctggggactctgggaagtcctacagcaaagaagaagcctggtctgcccatctttgtgtgacaagtgtttgcaggaaatagttcatcaaaaaacactttttctcaggagacaactaggaatcacctaggacacactatgaaatggtgaaccagcgatacaggtgaaagtgccctcccagtatgggaaagacggcagagtattcaacagggacacaggagcggtgtttatcctctggagggagcaaacagtggagtgtgcacctcactcagccaccaactttgcacctggcggtgctgccctgacacctgaggactcatagggccaagtgaggctcagagtctgaggcaacttggactgatccttaggtggacagcaggatgacagccacctgtgcaggaagagggaacacagctgcagagaaggggacacacctgtatgaggaggggacacacctgtttgaagaggggacacacctgtatgaggaggggacacacctgtatgaggaggggctcacctgtataaggaggggacacaccttcctgagaaggggacacacctgtatgagaaggggacacacctgtataacaggggacacacctgtatgaggaggaattacacccatatgaggagggacacacccatatgaggaggaagtatacccgtatgaggaggaagtacacccatatgaggaggaagtacaccgaacatacttgcagaggaagggagcccccaccatgtgccagggccccatggacatgagatcatgagagacatctggtctgtcttctcgcccacatgtgagacagatgggaagttccagcattttgtttatagacttagagaagggaatgagtggatatttttttttagagaggtcacaggacatctcagtggcttgttaaaggacagccttatgaacggtacctaggaatcacggatgtggagttggaggcagtgtgggagctgaggggaggcctgctgccatgcacccctgctggtcagagcagatgcctggccaggaggctgacacaccaccttcagatttggccgctgccaccatcacacctctgggtgtagtttgatccgagacagcagctttccagctgcgggaattcagtggcatgatgacagcatacacagggagacggcaaatgtgaaagcactggtcaactgtcgcacatgtaaatctaagtccatggcccacaaaaatcagctctgtgtcttgggtttgaataattgtgggaaaaatagtaataataataataacaataataaaaaaacttcttggttttctctctctccatgactttctagttcttttactcagctcaaaaactttcttagaaatacaggtgatgccatggaatactatgcagccataaaaaaggttgagttcatgtcctttgcagagacatggatgaagctggaaaccatcattttcagcaaactaacacaagaacagaaaaccaaacactgcatgttctcactcgtaagtgggagctgaacaatgagaactcatggacacgggggttgggggggggaatatcacacactggggcctgttggggggttgggggataggggagggacagcactaggagaactacctaatgtaggtgacaggttgatgggtgcagcaaaccaccatggcacgtgtatactgtgtaacaaatctgcatgttctgcacatgtaccccagaacttaaagtataataaaaaaagaagacatgaaaaaaaaccttttgtatttttagtgagcttatgcagctaataaattcatttaaaaaagaaatacaggcaacagcagtggctctccacatcagtgtgtgacagtcaccaggctttgtcacaatgcatcctggtgggccgcgcagagcctgggcctcagtggggttgggccgggcctgacaatctgcatttccagcacgtcccaggtgccactgctgctgtcattggggccacactttgaggaccctgggtctgtgacgcctagtcccttacctagaatttaattccacatcctctcttccctcccccacgtctgcaaaacgtggccttgaaggagttgtatcagcaagacgttagacaaggcagctcttccctgtctccccatggaaaaaccaagtaaatcatgggcttttccctttgctgattgtgccctttgatgctcaagacatttttaatgtgatgacgttcaatttctttctgccttttgtttcttgagcttttggtgtcacatccgagaaattcatttgccaaatccaatgtcatgacgcttcccctatgttttcttctaagaaggttttagctcttacatttagatctttgatccatgttgaattgatttttgtatatggtgtaatgtaagggtttaacgtcattcctttggatgtgaatatccaggtttcttagcactgtttcttgagaacactgtcctctctccactgaatggtctcggtacccttttcgaaaaggcaacccacagaatgggagaaaatacttgcaaatcatagatctgatacgaattggtttctagacaatattaaaaattcctactactgaacacacacacaaaacaaagaatctaattaaaaaataggcacaagacttgaacagacgtttctccaaagaaggtaaacaaacagccagtacgcacacggaaagaagctcaacgtcactaatcattagggaaatgcaaaccaaaactgcgagttaccgcctcatacccactggaatggctactgcaagggttagtgagaatgtgggaaaaaatggaacgctgtgcactgatggtgggaatgtaagatggtgcagctgctctagaaaatggtgtggctattttcagaaaattaaaaataaaattgccatatagtcaagcaattcttctagttatatagtgtattggtctgctctcatgctgctaataaagacatacttgagactgggtaatttataaaggaaagaggtttaatggactcacagttccacatggcttgggaggcctcacagtcatggcagaaggggaatgaggagcaaagtcacatcttacatggcggcaggtaggagagcgtgtgcaggggaactgccctttattaaaccatcagatctcgtgagatattttcactgtcatgagaacagcatgggaaagacccacccccatgattcagttacctcccactgggttgctcctatgacactgggaattgtgggagctacaattcaagatgagatttgggtgggaacacagagccaaaccatatcatagacccaacgaaattgaaagcagggacttgaagagaatttatacatccatattaatggcagcacaatttatgatgggcaaaatttggaagcatctatccattgacagatgaatgtgcaaagaaaatgtggaatatctactattcagctgaaaaaggaagaacattctgacacatgttacaacatggatgaaccctagggaccatctacaatggaaactaagccagtcacaaaaggacaaacaatgaacaatgtcacctgcatgaggtccctagagtcctcacacccacagagacaggaagcagagggtggttgctggggccggggagggtaacgggcttaatgtttcgtggagacagtttcagttctggaagatgaaactttctgtagacggatggtggtgattgctcacgactgtgtgaatgtacttagtgccaccgacctatacactcaaaagtggatcagagggtacattttgtgttatgtatattttaccataatttaaaaaaagaacagaaaaaagaagacccttgctgagctttacaagcaactcagtcttgtcttcaaatattcttcatgaattgagatggtgccaggttgctgtttaataccaacaagcgacagaggaaattctaaataagtttagtcacgttgtagaaatttgcttacgaaacacgagactggaatcaaactcctttagggcttttccccctcagtggaaagagtggataccttgtcactgaacaacgtgattttcccaggtacagtttatttacaggcaaagccacatcctgcttacacttatgaatagttggcagctggctttagtgaggatggattgcaggtgagaggaggaactttgttaaggaccagatgcttccctgttcttttgccaggtgcaaatcaagcgccacctggaagaaatgtaatcatttgaaatgtctttaaaaatagtcactctctgaatttaaaatgttaatttaaaacaattatgatgagcaaaataattaggaaatacagacttcctaagttagggagccaggctattcagactatgatgatattgaattacttatgtatcatggatgaagcagctagatctaaatgaacaaaaataaaaaaaaagagaaaacagaagattaaaaagattaaaaagaaaacaatttgatgtgtctttatggaaagttaagctctggccagagctaagttggaggtattgctgtttctttctctaaaaaagtttaatgtgttcgatccagttttttcatagcattagaaaaactctttttgggattgttacttttttaaaaattaatattcttactactactatatttgagggaactgagccatttacgattgtcaatttccaaatttcttcatggatacagattcatttctgattcattgaactgcaaacttattttttatagggaagaactgaccaaaagcaagcgatttttatatctagaaactattccccccttctgtctatttctcacctatcaccacacaaatacgtcttccatgaacgcaagcaaaataacaaataatattaaacaaaagggattcgtttttctttaatgtatgtcacttaaaggattgtactagttcagaacttggcgaactcatgcatagaagagtggttgaaaagtttcacttataatagcacattcagaatagatcatatggctataattatttgtatgcttttccaggcacattaactaagctaaactcaatacatcatttcatgcataattaaagatttaagatcaatgaaacttactctctttatctagtttcacctagggacccggcgagggaaaaagcttagaaaactttttagacgttatctactagtaagaacggaaaccactgtaattccttgtccctgtgttaaacaatactgggaccagcaaaaggatcttccctgatttctccaggaagtacctgcccgtgagagctaagcctaggaaccaaccaaccaagtcacttccttctcaacaccagcaacggctcctggaggctcctgcccggaagacgtctgctcttcctaccaacctaaagtttcctcattaactttgctccatacaagccagttcttggctctcatgcctcccgtccccggcccaaaacctatgaacaccccacactaattttctgctcttagctcttgccaggctgcaacccccacctctctccagggggtctcgtgaacccagctctgcctcagcaacgatcctgcaagggaccattttggggacttgaaggttgatggaattaatcatcaaggtgtgctcgagacgcgcggggcgtggtaaaaagggtcactagtggccctttcttgccctttccccttaaacatatttctcttttactttgggtaaaataaatagttgagacttctgtaagaaaataggatcttctgactgcccgagaaagatcaatttgtgtttttcttttgagacagagtctcgcactgttgctggggctggagcgcaatggcacgatcttggctcactgcagcctccccatcccaggttcaagcgattctcctgcctcaacctcccgagtagctgagattacaggcaagcgccaccacgcctggctaattttttgtatttttagtagagacgggggtttcaccatctctgcccgcctcggcctcccaaagtgctgggattacaggtgtgaaccactgtgctggcagaaagatcaatttcttttcttggaaagagatgacatggcacaatctcctgggacaggttttcatcctaaatgatacattttgcctgaacaaaataaaaccactcaaaactacaaaggaaatcttcagagaataattttctggacaactggaataagaaataaatttagacataaggctcagcttgctgcagaggagtggtgagcatgagggctggccagggcgctggacacgaccattgagacacaccagtgtccacctctaaccctgattccaggagggttccgagttcgctgggacaagccatcctcactttaaggtgccttctcatctcagggtctttgtcttctgatgctcctggggccaggcttctcccagctgtgggtggaaggtgcaccccattaacccacacacataaaagcgtattgctgcagcttaggagtctctgctatgactcgggaaataaaatggaatcttgggaccccacactcactctgccaaaaagaaagttacgcttcagagctgagccacgcaatactgctttccttttgttcctggacacagagctacaattccacagcctcatctctaagccaggttcccacagtgacagaaggccacatagctccctgatggcctccctcacaaactgctcacaacgaaattcctggtgaactcctaaatccctcagcctttcaggatagatatccccctgtttctagccctaagactgagttctgtggaatctcaccctgacaatgtcaatgaccagctcgtcttcataggtagagggcaaagactggaacaaaaatcatccctccacccaacccgaggcgaatgcatcattggccttttcctgcaccccttctctttgcacgtaaaatgtagattcacatcaaagcctccaagaacgtaaccatttgcctcattgcttaccctccctcctttctctcctgctctttcccctttaaatatcgaagttccccaaacgctctttagaaaagtcgcaggtgatggacactcatgtgacttttggttcttttcccagacgcatcgtcacactcaggccaaacaaacctctctcaatggaggtgtcactgtggtgaaccctctctaggcacgtgtccatctgtctgaacctctggaggtctccgcaggaagaacagcgtgcacccacatttaaatttcttgcgaatacttcccatctgcaaaataggatcttctgaagcttgcagttgctgtcaatctcctggccctaatgagctgccaggagaagaaggaaaggtcccacttgagagtgaaaacttggggtctcacagcttctctttctctgatgaaacaattgaggcttttctatgaaattaagcttctttgcattttaatatatattataagttttattgatcactaaaaacaatgaaaaaaagaaagtcaagaagccctgctcaagaactgacaatgcccctcttagccctatcctgggagaggctcacctatgcagagggaggccccgcagaccccttcttccttctccacttgggggtccaccgctatggcttccacggtgccctctggtctggcctctttgcttttacatttttctgcctgcccctcactccaggagctaaaaatcaattagttcttaaataacgagggcggtagccacctacatgaacctcatggggaaggcttctgtaaaatgaagacccatccagcagcgaacgtagttttttcctcatgtgtacatttctaagtttaacactagatttgctacaagtgtgacggaacaaacactcgacggaacaaacactcaaagaacaaacatatttaaaaaggtacttttcaaaagaagacacttatgcaggcaacaatcatatgaaaaaaagctcaacatcactgatcattagagaaatgcaaataaaaactgtaatgaggtaccatctcacacaagtcagaatggctattattaaaaagtcaaaaaataacagatgctggtgaggttgtggagaaaaaggaacatttaaacactgtgggtgggagtgcaaattagctcaaccattgtggaaagcagtgtggtaattcctcaaagaaccatttgacccagcaatctcattattaattatatacccaaaggagtataaatcatctatcataaagacgtacgcacgtgtatgttcactgcagcactactcacaatagcaagacatggaatcaacataaatgtccatcaacgacagactggatacggaacatgtggtacatatacaccatggcgtactatgcagccctaaacaaaactgagatcatgtcctttgctgggacatggatggagctggagccattctccttagcaaattaacatggggtcagaaaaccaaacacctcatgttctcacaagtgagagctaaatggtgaggacacaagggccaggcgcagtggcttgtgcctgtaatctcagcattttgggaggccaagggggggtggatcacctgaggtcaggagtttgagaccagcccggccaacatggccaaaccccgtctctactaaaaatacaaaattagctgggcgtgtggcacatgcctgtaatcccaggtactcgggagggtgaggcaggagaatgacttgaatccaggaggctgagtttgcactgagccggattgggccattacactccagcctgggtgacaagattgaaactctgtctcaaaaaaaaagaatgatgaagccacatggactcagagaggggaacaacacacactggggttgttggagggtggaggcgggaggagggagaggatcaggaaaaataacgaatgtgcatgaggcttaacacctggctgacataatctgtgcagcaaacctgcctgtgacctgagtttacctgcgttacgaacctgcctgtgacctgagtttacctgtgtagcaaacctgcctgtgacctgagtttacctgcgtaacaaacctgcctgtgacctgagtttacctgtgtagcaaacctgcctgtgacctgagtttacctgcgtaacgaacctgcctgtgacctgagtttacctgcgttacgaacctgcctgtgacctgagtttacctgtgtaacgaacctgcctgtgacctgagtttacctgtgtaacaaacctgcctgtgacctgaatttacctgcgtaacgaacctgcctgtgacctgagtttacctgcgtaacaaacctgcctgtgacctgagtttacctgtgtaacgaacctgcctgtgacctgagtttacctgcataacaaacctgcctgtgacctgagtttacctgtgtaacgaacctgcctgtgacctgagtttacctgtgtaacaaacctgcctgtgacctgaatttacctgcgtaacaaacctgcctgtgacctgagtttacctgcgtaacgaacctgcctgtgacctgagtttacctgcgttacgaacctgcctgtgacctgagtttacctgcgtaacgaacctgcctgtgacctgagtttacctgcgtaacgaacctgcctgtgacctgagtttacctgcgttacgaacctgcctgtgacctgagtttacctgcgtagcaaacctgcctgtgacctgagtttacctgtgtaacgaacctgcctgtgacctgagtttacctgtgtaacaaacctgcctgtgacctgaatttacctgtgtagcaaacctgcctgtgacctgagtttacctgcgtaacaaacctgcctgtgacctgagtttacctgtgtagcaaacctgtctgtgacctgagtttacctgtgtagcaaacctgcctgtgacctgagtttacctgtgtaacgaacctgcctgtgacctgagtttacctgcgttacgaacctgcctgtgacctgagtttacctgcgtaacaaacctgcacatggacccctgaacttaaaagttaaaaaaaacaattttatgtgcaataccgtgacaggttttgtggctaaatttaaatgttaatttggacattatatattctgttgtttttgattgtctactcagatgagaaaagtagtcaacgcaatcaacttccttaaaatcagtatctgctgcacgccagggacagcaacagaagaaatcatttcagcaacaacgtgacacttcgaacctccagaagaagtgccatatcaatgacatcatgacaaacgccccagaccgaattatttctgtgtcagagtcactcattatggctctggctcttgcaggtcatctcccatttaggagaacttgtcctattgtcttcatcagaacacgtgtacttgtcaggcctgcagtcctgatgtttggttcagaaaatatggtcactgtaattatagcccttcccgggtgaggaaatgagaatctgactcgtaatccttttatcattgacttggatgacttatttctcaccaaatgagaatggagaaatttcaagggcaatttatctaattctttccctgtgcatatatatttttttttttaaagaaatttgccctggtcagaaaaagcacattttccagagggattctttaatgatattgatctcttgtgcattacctggcctctggtagaccttacatgattgtcccaattaagctgccaggtgagtttcttaatcttttttttttcctttttttcttgaagcatcacagatgattttaaagttgtttttaggccaggtgcagtggttcatgcctgaaatcccagcactttgggaggccgaggcgggcacatcacctgagaccaggagtttaagaccatcctggccaacatggtgaaacaccctctctactaaaaatatgaaaaaattagccaggcgtggtggcatgcacctgtgatttcagctaccggggaggctgaggcaggagaatcgcttgaactggggaggcggaggttgcaatgagctgagatcacaccactgcactccagcctgggcaacagagtgagactccatctcaaaaaaatattttagttgttaattattaaaagttgttttaataattactttgccatcaggttctattttcccaagcaaaatgctcacggtgtgtgttcagcttctctgcccctcttggcaggatatagccattccccgctcagccctgcccacttcccaccacccccaggccccctgagcacccagcagcaaccctcagccagagcctgcctcggccacagctcagggctctgccagctccactgttgaagcccttatgtcacctgtgtgtgtgttctcttggccaagtgtccccagcaagccctttagtgaaagagagcttcaaggggagaggcaaaatagtggcaaaaagcaaattattacagcctgtgacaaaaggtactccacacaagcctctacctgccgccagggctgcgtcctaaccaaagacagccaggcaatgatggtgactttcagaatgggatgaggctgggggcttgagagttgcccagttagggcgtgtgcatgagtgtagtgtgcctgtatgtgcctgtgtgtatgtacatgagtgtatgtgcctgtgtgtatgtgcctgtgtgtatgtacatgagtgtatgtgcatgtgtgtatgtgcctgtgtgtatgtacatgagtgtatgtgcctgtgtgtatgtacatgagtgtatgtgcctgtgtgtatgtgtgcatgtgtgtgtgcctgtgtgtatgtgcatgactgtatgtgcatgtgtgtatgtgcctgtgtgtatgtatgcatgtgtgtgcatgtgtttatgtgtgcacgtgtgtgcatgtgtatgtacatgtgtgtgtctgtgtgtagtgtgcatgtgtgtatgtacatgtgtgtatgcatgtgtatgtgaatgtatgtgcatgagtgtaggcataggcatttatataccattgtgaaggagataactgataaatagaaatgttatttaaaacaagaaacagcctcaaaacacgtcctccactccggatgcagtagggaaagtacgtttctggggttgggtggggtgggacgcagctggtggggcaggtgggatgtgtgtccatttagggatgcctaagtgagcggagcatagtaaccagggtcatggtgggtttgtgggccattgagaaggacgtgctctccacgtgatgagtgggattgggggctgcagcgggggcacaggaagtcagcccacggtgcctgggtggtgtgtgggggcagatgcctgtggtgttcagcagtgtttcctctctggggcgttcacagcatttggtggaggccgctattccagcacttgtcacacagaatccctgcgtgtggccctcgctgatgaagctgcctcccgccctcctgtgtccctggtccctgctcagaaacctccgtgtgtcgttggcaaagaggagcgtgtcctggtccatgatgcagatgcagacacgggtagaagaggcagcaggtttgatgccgtcagcttttccgctaaagtggttaacccgggcttaagaagcgcgcgtattcatctcagaatgagagtctatttacgtctcataaataaaataccttcattttttctagtgtgtacaacaaacaaaagctctattttatttttcataatagacccagacatgattctgtctcaacttgtgctactgaaaggatttctggcacaagcgtagcttaagattcaacttaaatagtttgggccttactaagaacttgtgctctttgaaatgcactaagaatgaaaagagaagccacagacagggagaaaatatttgcaaatcacacagccaatgctggaccagtatccagaatagggaaagcactctcaaaattcaaaattaagaggataaataacccaacaaaaaatggtaaagggatttgagcagacactttgccgaagaagacatatgagagacagaagaacacaaaggacagccagcaccatcagtcattaggaaagcgcaaacgcaaacccccataagacgcctggacacacctgcgagagtggctgcaataaaacaaccacagagaagctgatgacagtgaatgctgacaaggatgtggaggggccaggaccgccacacacatgcgctgggggcagtcacagcgggcagtgtgccggagaagagggtggacacacactcccccacacacgcgcggggggcagtcacagcgggcagtgcgccggagaagagggtggacacacactcccccacacacgcgctggggacagtcacagcgggcagtgcgccggagaagagggtggacacacactcccccacacacgcgctggggacagtcacagcaggcagcgcgccggagaagagggtggacacacactcccccacacacgcgcgggggccagtcacagcgggcagcgtgctggagaagagggtggacacacactcccccacacacgcgcgggggccagtcacagcgggcagtgcaccggagaagagggtggacacacactcccccacacacgtgctgggggcagtcacagcaggcagcgcgccggagaagagggtggacacacactcccccacacacgcgctgggggcagtcacagcgggcagtgcactggagaagagggtggacacacactcccccacacacgcgctgggggcagtcacagcgggcagcacgctggagaagagggtggacacacactcccccacacacgcgctgggggcagtcacagcgggcagtgcactggagaagagggtggacacacactcccccacacacgcgctgggggcagtcacagcgggcagcgtgctggagaagagggtggacacacactcccccacacacgcactgggggcagtcacagcgggcagtgcactggagaagagggtggacacacactcggcggaggccccggtgacaccagcctcagtcacctcccgcagggtgaggacgctcacaccccctccaagacccacacgggactgcccacagtggcttggttcatcgtcaccctgaactggaaacagtgacatgttttcctatcaggagaatggaggagttaacacggctcctccctgggatgaaacacgacccagccatgcccaggaaggagctgccgacagtgaaactcaagacacgtcctgctcggtgacaggcacgggctcaggcgactgaggacggctccgtttatgtgtccttctcaaaatggcaaagttacagggtcgggaggtgaagccatggtctgtagaggctggggtgggaacaggaatgggccacagagggtgcgagagggttccaggtggtggacctattttacatttgatggtgcttttcagccatgtgtgcttgtcaaaacccagcaccgtgcaccaaaggactgaattttcctgtgtgttaacgatacctcagtgaaacctcagccaaggtgaaggaagcagccagggcttctcttagttggaaaacatcgaaggagtgcttgcagctgcctgcccctccgaggcaccagggggtcggggacgtcactgtgtccttggggaccgtgacgaccgcagtgccgacacagtgagccccagaatcgccctgtagaccagctcactcaagcaaagctgcctctggcagggcaattcccctgtagagagtgtgccttttgactttacctgtcctcagactgacctttgctcatgagaatagtgaaaaacgcaacttgggtggaggtttaagatgctaatgaggcacgtgatgtatggacaagcatggacagctactgcatgtgcacccagagggccacccagaatgtgcgtaccagcaacacctctcccacccccgcccgaagagtggtgtggggcccccagagctagagcctccctcgggcggtcctggctgactcactctccatcagccgcgctgactcgtctttcagagtgtacttttgcttttgcatttagtttgcagagggttctttctctgttgcaataaactgctttctacttctgtgtgtctctttaaattcttaactgctttctactgctgtgtgtctctttaaattcttttaaactaagaagacaagaaccgaaggctctcagttgccatcaacaatgggagcagctaaacacgacccaggcaagacctcccgtccatcgggttaaacccgtagtccactgctgactccacaactctgcccttgttcttacaccaaagctccctgcagagagcccatgggtgacatgaagctggcctcggacaccacatcttctggcttccctggcctctggccctgttgtttcctggaccttggccacggctgaagttcaggctcctcgtgataacaggctgctgatggcttctgatgaatgaaaacccgggcaaagacggtgcttctcctccctcctggccccttgcatgttagggaaatttgagtagcacaaagagagatggtctccctgagggtcttcacaaggccccatccaagtatctccaggatgtgggcagctctctgagcacacggaggtccttgcgacggccgcacacatggtgggggatgaaaaacgtttctttctctgggaatcctggggtgggaacctcacctagtggctaggcggacacacagcacagggtggattcaggcccgcctcaccctatgagagaggaggggcccctctcaggaacactggaggtggttgattgcgaccaaaggctctgccgtggggactaattcccacccttggaattcagtagacttttctgttgttggatccccagaaagccccaaatcaagtttgaatttctctatggaagactgtggcacctggaaccacagagcacgttccccgtgacatgggatgtgacactgcttatcagaagccgcctgggtcttcgggacagagtctactttaatgtaaactggaacccagggaaggtaaactgagacacagccctgcgtgttgacttcagggtggttggagagttctatggagaggaaggaacgtggtgagtggtggagacaggattcagggcgccattctgaaggaccggccttcagcaggggactccgtattctggtttccggtctatttacagcatctctctctctctctctcgctttctctcccctttcctgccacactttgatccattctcgtaaagcaggagagagactccttggtttatagccactgtctaaacattgcgatgctttctatgtgagcatggcagtcactctgtttctatctttaatactgtaactgctcatcggtttagctcttctctaccaattggagaaatgcacaagattcagggagatcatttgtgagaaaaggcatcgctgttcttcaagcccccatcttcaaagcaaacatctctctggcagaacccaagaaaaattccagttgggttttcaagagctaattaagccactgcacggcttcatgcgaaacccttctccctccccatctccttctcagtttcttcaagattaggctgaggttggaaagcaaacccgaaagcatctccaaccgcgttatttctgggctgtgttgatgcatgaagccacatctggctcaggatggagactcagggtctgggcaagttgacaaatccaaaggcacctgctgtcgagcgaggactgaagccaccgctgacactgtgcccagcaaaaccagcacacacggactattaactggtcgactttgctcctgggggcgtggaaggcagaatcaaagtgaataatgtaagcattccccaggcagggccggcacaccctgctctgggaaaataaaaataaatgttgatgctggtggattgtaaaatcccctaccacttccgttattccatcctgtgcttttgagtcgaacacattaagctcaccaggggagactggctctgacatagcgctgtgtccctcttcctgaaacgaaagccgtctgtctgacgaggacattgaggacccgtaatttactacctctgctacaattctaaatgctcccccaccgcagggattgaaacgttcttcctataattatagtggaatcaaaagtctagccggctaatgcgtggagcttctgtgccagctatttataataggggcttctcagccaatatgttgtttttaatatgtcatctatatgacattgtcaggatcaacctgtccttattttctgtgtttctcccctaaaataatattattacttaaacatataaatatttgtgagactaaaaagaaaaagaaaaatacctgaaaatgtaaaacccagccaagcccggttgcctcttggttggccatggaaggattctttgggagggaggcccagggtggggtgttgctggctgcctgaggccaagggggctctctgggaaagcagtctccacactctgggcctgttagtccgggtccctgatgagaatggccttctctctttgggaaacactcctgctccctggtagtgtggcgtcaacggggagatgctacctagtgtggcccaagatgcgcttttgtccaactcatcccactcacagatccggctgtggtgcagcttcgtggctatctcacaggtcacagtgttattctggcatcggaatcccccagcgctgctatccaaattctctccaacagagaaggcggcaggcagtggctggtgctggagaagcctctaggtctgccaaagtctggttttggcagtcggggctgggggctcccccagcaagcagcagcgctgtccaacccattctggtccaaggacaagtggtgccttccttcttctgactcagacccccggctacctttccctttcgcctgcggaagcgacggggcgtgcatggcaaagctgccacggaacaggtgtggaggtgatggtgagtggcaaacctccgtgcccaagtgggacacagcttgtactttcttgaattgttgaatttgaaagcttgaagaagcctgcaggatccacaccaacacttttgttattttgcacatgagaacactgcagcttagaacgtcggggtgtcttgcccaagtggccccgctgggctgatggggtcccctgattgctaccacgtgttctttccaacacagcaacgctttctcgctacccagtctgttcagattgccctctaggaattggaaacggcccccagatgcatccatttcttctctttctgcataaagtgctgatcacagacactgaaagagtcgtttctattagagatgggaacgttggactgggtttaatgtggatgtttctacagcagaactaacagagcagcacctccccagtgccccctgcaaagcaccgcggtctgcgcacggctccgggaggtcacggccttccctttattggcaaacacaaagctggcagatgatacttaggagtcacatctctaagtccaccgtctttattctcttccctatttggatttctttttcagtattctgatcttagaatttgtactgaaaaagtgaaaaaaaattgaaaaccgttggattctccagatttcactggagctgatgataattatcacattcttaataccaaacttttacacttttacacaagttcttgagaagtcccaaattatgaaaacctctagaatagattggtgggagaataattgtctcaaccatccagaaatcagtttattgaattggttgatttgatgttagttgtcgtaattgatgactggtgccttctgaggagagaacaaaaaagaaaacagtgctttatcctcaaggcacctgtgggctaagaggagccagtaacacctggagctgtgatactagaaaaaggtaacatgagaggaatctgtaaagtgctatgaaaatccacaaaaggatgacaactgctagagagatggtaaaagggctccatggcaggtgcattgcacaggggaagtggatttcaaaatcatagaatgaatccaaccagatggaaaaaacaatcaggtcttggagacaagaataaacagggctctcctagggaatgatgggagttcagtttggatgaagcaaagtgtcattccagggggcatgaggccggcgtgcctgggagcccgggtaggctggactttgtcaagggaacaacagagaactggagactcccggccctggagcgaccttccaaggtcatccagcctgaccctctcccagggtcatctgacctgaccctctcccagctgcgtccatcccgtctcacaccttcctagccatggtcctgggcaaatgattcccctagccacttacacacccatttctgctcagctgtagcaaaatcagtcagattaaaaaataagttttcaatacaagtgccttcgaggtcatgatgtgcttatgtactttatcaaaatgtgtatcacctactcctagtccaactgcagtacacacgtctttccatatccacgcacagcatatccttcgctaagatgctgctgatgcaaatacacatcactctgcactgtaggccctgtggggctaacaatggcatcccacgaaatcgctgaaaatgtcaaattaacagaactttatacttagcaaaatgaaaattggcaactcaaaaccatgactaactcaaaataacaagggctcttcccctgactgcaggaattctgggagccctttcacagccagaacttactgtaaatgcataatttcagtctttattaactcaagaacaccaatttttagcaaattttatgactcatgtagtgtaacgtgtaaatgatcattagatgtaaaaatagataaaaatctatggcatcaatttcctgtaagaaccagagaaaagagaacctataaaaacacctcctggccaggggcggtggctcacgcctataatcccagcactttgggaggctaatcccagcactttgggaggctgaggcgggtggatcacaaagtcaggagatcgagaccatcctggctaacacggtgaaaccccgtctctactaaaaatacaaaaattagccgggcatggtggcaggtgcctgtagtctcagctattcgggaggctgaggcaggagaatggcgtgaacccgggaggcggagcttgcagtgagccaagatggcgccactgcactccagcctgggcaacagagtgagactccgtctaaaaaaaacaaaaacaaacccaaaaaacacctcccatttcttaacagcctggcaacctactggaatgatcccacaggggtggttttttcaacctcaaaagaatggaaactcacgattccacaaaggatttcattccgcagaacactccagagaggttttcttctgttagtaccagcattctccttgtaaaaccttcccaccgttctccttctgaagctccacagagcaagtagaactctgtctccgtgtgtccactatgggacggcagctaattgcccttcttcagttttatttggtggggggccgggagtaaaactaagagcagacctttgtacaatttttttttttttgagatggagtttcgctcttgttgcccaggctggagtgcaatggcgaggtctcggcttaccgcaacctctgcctcccaggttcaagcgcttctcctgcctcagccttgtgggtggctgggattacaggcatacgccaccatgcctggctaatttttttgtatttttagtaaagacagtgtttctccatgttggtcaggctggtcttgaactcctgacctcaggtgatcctcccgccttggcctcccaaagtgctgggattataggcatgagccaccatgcctggcctgtataatttcttgttaaactttatgttgcttagttgcttatattattgtaatttggtgaaatacttttgcatcctaattctgatatttgctactttatgtgtgcttcccaggtccctgtgccttcacgaatttatggccgtgtacacatgttagacattgaataacacaggaccaaggagagaaccttgtctcaccctccacatcccccttcctatgaacagcggtctctgggtaccgtcatttgaccaaaaaagtactttaatttttggttgtggtcatttaactacttacacatcaagtttatttatgctataattcaatccacactataccatcttgccctcagaggagaccctaaagtctaagagttcaacaagcacattgagcctctactgagtgccagtgagacggctgagatgagagggacgtggcacccacacgagaagggcttgtcttgctgcttctttacagcaaactcatgttgatgctaagcacaatggccgtgtgtagggtctcaggaggaggtgctatggctgtggcatcacccagggaatacttttctccagctgaccatgcatgaggggcaagggtggccacaggaggaactgcccaagcagagaccaagggccatgcggctcaggggtcagccaggtgtgacgagctctgtgccataggggcgagggccacgcggctcaggggtcagccaggtgtgaggaggtctgggccataggggcgagtgccatgcggctcggggttcagccaggtgtgacgagctctggaccgtgggggtgtacccaagtggacaccgggccaggagagtcttcctcaccatgctggggacttggaggtatgctgggagaaggaccagttagaggagagaaatgtcatgccttcaagaaagatggtggccatggcccagcagcctcctggtctcacaatctagaaacatctgaaaaggaaatcggtccggcacaacctcttgatcgctctgtgcaatcactttttgcctgtgttaagtattaataagtgatttattgagtaattttagcgatgggagggccctgcctggggatctgcagggtgggggcagggccacgctcctcacactgacttgaggaggcatgaacagggcaggagagggctcccacacacagcaggagtgtcgggtgccatcaggtggctgtcaggcagccgtcacactgtctctctacggtaatagttggtcacagccggcaccaggaaaaagcatctcccaatagatagaaatgcttgggactggtgatcagcagcttcccgataggatctcaggaactgggctagtgggctcaggcgtgcacatgtggacagcccactccaagcgaagaatcatgggggaaggaacgtggggccctggaagcatgacaatggataaaaccccaagtcacaggtcaaaccacgcacccgtcctttggaagaggcttgggcctcttccaaatatactttccttcccctcatttctgctctgaagattttaaataaactctcactcctgctctaaaacttgcctcggtctcttcttctgccttatgcccctcaggcgaattctttcttctgaggaggcaagaattgaggttgcctgccacagaccctaatggatacaaatttgctgctgggatgattggatatattttgttgttgttgttgttgttttgttttgtttttttttcctgacagggcctcactctgttgctcgggctggagtgcagtggtgtgatgtctcactgaaaccttcacttcccgggctcaagggattctcctgcctcagcctcctgagaagctgggactacagacgtgccaccacccttggctaattgttttggtattttttgtagagatgggggtctcaccatgttacctaggctgctcttgaattcctgggctcaagctatccacctgccttggcctcccaaagtgttgggattacaggcatgagctactgcacctggcctcggatctgcattttaaagagtcactctgtccccagagccacagctgtctatagaggtctatagacattagggaaatttattggactcatggactggaaatctgggataaggagagaagggtttttgggcaatttgggtggcttctggggtgttcaccaggatggaaagtgtaagaagagaacaaacctttgtggtggggacaggtgtcaagttccaccctagagctgaagcgtggccgattacggaggagcccttggcaggggaccgggtagtttctagtgcaggagatgtgcctttccttgctgagcccccggatcacgggggagcccttgacagggggctgggtagtttctagtgcaggagacatgcctttccttgctgagcccccatcccactgagcacctgctcttcggttgctggcatcctctccactttgtgtgaatgtctcaggcttgattcctgcatggccttcgcgtgtatctcacagtacacgtcacatctgtaaattaaaaggcatcttctccatggacaccctgctccttcctcctgagctcccagcatccttgtgtaaattccagggaaatcgagggtaaaactcgttcccggccctctgggacggcatggccctggggagggtgagaggacaccagctgcagtttggggatgagcttccatgatggaaatgtctgggacacacggagctcagagcaggggcagcccggtctacattgggggtcagtgggtcttcagaaagactgatggacacacaggcctcttctgcgggctaggaggagggggatgcatcccaggaggctggtggcacccaagcaggactgtgaactgagtgacacagccggagcggacgggcaaggcgatgctgtgtccacacacgcaaacatgacccaggccacctccgtgtcccaagcacctgggagaggctctcagcctccatttgctgagtgagactgtccgcccaccaggaggcagacccagttcacctgcacccaggatacaggggagagaatgcgtgggaatggatgagccccaggcagcgggtgggtcgactgggtggggcatccaagccttggggagatgagatttacgtgtgcaaagtcgggatggaaacgcctgtgtaagagtgctgagcaggactccgggaggaggcggcttcagaaaggcaaggatgctcgcaggactgcgtgtcacggggggtcacgcaccacacggctggaccgagcccggggcctcagtgaccgaggcggcggctgccggtcgtcctggagggagagctgcctgtgaatctattgcacagtgggtgggaccctggtctaatggtgccacgcccacggggacccccacgggccgctgctacagagcagcgggtgccagcaggtcaggcgctcaggaagaggtgaagagaaatcaacgcggcgtcgtcaagctcagtcagcaggaggacccccggggagggtccggcactcaggagcccccccggggcaggaggggcctcttcctcccagactgaagccagaggcaggtctcccgctgctgctctaggggcttaggtggttttgaataactactgtggagaaaggaaacttgaccgcaggctgggtttgacagtgtatctgcgcaccttttccccttgggcttcctggttggtttagtgatgagtctgtttcaggtgctgtgacgggaaggcaggggccttcactctcttgctttctgtccctgagcagcacattacccatcccgggccccagcggcctcctctgtggggaggggacagcaggggaggggcctggagtctccagagtcgtgctgtgcggacagggaaatccttgaaataccctcaggattgccccagatgaatttgaaaattggaagagaaggagacacacgtcaggaagacaaacaaaagatgtgacaccttgttttttcacctggcacattctggcatattttttaaagttcagccatttgagccagaccttattatgagaattctatgaacgcttgatgtgtgatggatattttgcataaatttggatggaactgaagtttgaagagagatagggctgcccaatggaaagaaaatgtggaaatcaattaccctttgcatggagccttatctcaggatgcaaaggccaccggcaatgaggagggaaatgcccccacaactggaggtaattgtgtgaattttctaggccacagaggatggtttcttcactacaaaacacgaacatttttgtttcaccgagtctagatggcagtcttttgtcttggagacagttaagtgttactgtgagaaaattctcagctgctttgaaaacagtgaaaactctttgcatttttaacaaaagaaatgcattttgaaggtgggaaattgtcactagtgattaaagagaaagctctgcagaagtaaaacatcctttgaaggggtgagagaaggagaaggagagaaaaaaggaagagagagagacagaaaaagagagtgggagggagagagaggcagagagagaaagggagagatgagggctgcaggaaggagcctggagtggagccaggggggcctgcctcaggtgggggccagtgtggaggtcgaggtccagcccagggtgcccaactgcaggtctctggcaagggcccttggcagggagaagccccaggccctgcagggcagagctgggctgagtgggaagaaggccacacctggggctcaggtggttgctttcagtgtcctgcgtggtgactgtgctcgtaaaagtccagttcttgggggataaattccaggctcctgaagacgcctgggctgcctgattgacagcccagaagctgaggcctgaacgcatctgccaggtggttattgctctgcttccatggaaacgcacacaggacgggggagctgaggtgaggttttaaagacagccttctttttataacttccctaccttatcctcttccatctgaccgccgtttccatggcaaccagatcagaaaggccatcggcctcacgaactctgatttgcacggtggatttgccaagtgccaggcaccgccatgcatccagggaggcagaggcgtccccgtgcatccaagtcacccgaggccagctggatggaaagggccaggaggttgcaggtgccacggccctctggggtgtggagggaactctaatttctgaacccagcctgggtgccacaagtgagggtggccgcatgatattcacatgctcgggaacactcctggcccacagggacttcctttcttaacaatcagagacacaagtgctgggctgcccacgggttccggatgctgaccttgtggcaaatcatgatgactctccccagatccccacctggcctacgatccaacccctagagcaccttcacagccacgcaagggcaccctcccactgcgcagcactgcctctcactcatggctgtgaaacttgggttgcccgatcctgcaaacgctggctttctcctctgacccatggctaacaccacttccttacaggagaagtgactgcactgatcagaagtgtggagtcctgataagattagtaagtaacgttgaggaaggcgctacaggtcggggagaacagttgttctgagagacggccaatcacaggcaactgctggcatgacatgctgttcccaaatacctcactccacaagtagccccagcagcatgaccttatctgcccatggccccctccagcatgaccctatacagcttccttccagccctgcttctttgcagacggccccttttctgctgtgctgcccattgctttcttgcaacgtatcttcgtgctttctctaataaatctgccttctttacccacgactgtcttggtaaattcttttaccacccgtgacaccagccccagccattgcacccacaacaacacggtgatgtgccagaagcaatgaaaagccatccatacatagataaaaatatggggaccaacatgaagcgtcagcctgtgcgcctctttccagacgataggcggggtgcttaattttcagagaatgccttcgtgactatttcccttagacataaatagagaccacagccacgtgttatttcatgctatgtttaaatctaacttgggacttctgtgggccacacatgtctttaacaatcctgtggcgggcaggtgcctccccagaacgcttctcacaggtgcactgggaggttccctcctgccctgacatgcatcccagggaagagcccctctgctggaggactaagagggtccatgtgggatcctgtgatgcccaggtaaactgtcccactgtgtgcctgtgcttgggttctctccctgtgaaaaacccgactgcagcaaacctccccgagcctttactgagctgtgagtgaggatctgggcctgcaaagccaaaggagacgccagtgctgccctaacaggcagagactccagtcatgggagctctgctgggcctttctagtcctagaacagtgtgcagtgtcttaggaagtacatagcattcaggcgtgatgttattctctttcatgtctcagtaaaactctgagctgcacagatgtgatggaagccctgggaacagcgtcacggacatcagagggggtgggtcttctgtgtctcaacctggcgttggcacacggcatggaggtttccatggctggatataagtagagtcatgagaatgcctctgtcatctgctctacacttccttagtatctccgtttaagtaacttagtaccctgggtccaactcttaaatttgttggggaaaatgtcctaaatctagacacagacattgttgtttgaaagagttcagcttctcaaaatgatgatgagcaccgtcactaactgctgaccatcaggagaatgtcaaaataaggaccctcagacgggagagcaccaaaacaaggaccctcagatgggagtgcgccaaaacaaggaccctcggacgggagagcaccaaaacaaggaccctcggacgggagagcaccaaaacaaggaccctcggacgggagagcgccaaaacaaggaccctcggacgggagagcgccaaaacaaggaccctcggatgggagagcgccaaaataaggacccttggacgggagagcaccaaaataaggaccttcggacgggagagcaccaaaataaggaccctccgacaggagtgccaaaataaggaccctcagatgggagagtgccaaaatgggaaccctcaggtgggagagaaccaagatggggacccttggaggaggaggggcctgcaaacagatgggtcttcaccaacgaatccaatagctggtagcaccctcccaaaaggtaagccagcagtctatggcataacagccaagaggggagtggggctgcagctgtcttgggcaggggcagcataggttgtgtatgtgtggccgcatctcagcctctcagctacagggtgacctctctgggtcaaccaggatcccagttagtagctgcagtacagagtccaattcttaaggcaggagttaggctgaaggctgggactccattcagagggactgtttggagtgaggaccgggggtacagaccagaacccaggcaaggcagcagccacgtggagcaggaagaagccctgatgtgtgacaggtttgctggggcccaggcagtagcagatcacccatgacacgtgaatgacaagttagggatagcagattcctttcagaccctcggcctcacacggcgggtttgtgtggcttcagggcccggacagcagaggctgggagatggagttttggtagagcagcttggagtagagtaggtaggatctcacagcctagcttttgattgaaaacctgtttctgagaggaacccaggacagcctgctgaggaaagcaggaaatccagagtcgggttctgcctcctaaaccatgggtggcatttgggcgtatggagggcagagccctatagggaggggagaggctgaagaggggtggcggctccaacatgtaactggtttccaccaataacaccaggccggaggtcaatttacttagttatttgagggattcattttactattgatttatgttgatcaaagctgagaacaatgatttacagggaagtgtatttgaaggacacacacttcattcatttgtcaagagaaggtttagcttctctcaatatcaagacaaaacatcgaaggactccgtgcttaagccaggttctttggggccctccatagacgtgctttactccatagacgtgctttactccattgcattttggattatgcacccaaatgacacacagaagagatggaaggagctgtctttaaaaactcaacaaactggaaatagaaataaatgctctcaatatgataaaaaccatatacaaaacaaaaaaaaacctacagcgaaaattgtactcaatggtaaaagacagaaagcttttcctctagaacaggacaaagagaaagatactttaccacttttatttaatacagtattggaaattttggccagagcaattaggcaagatgaaagaagtaaaaggcatcctacttggaaaaaaagaattaaaattatctgtttgcaggtgacctgatatcatatgtagaaaaactaaaagcattgttagaactaataaatgaattcaacaaagttgcagaatataaaatcaacacttaaaattagttgcatttctatgtacaaacaatgatcaatctgaaaaggaaattaagaaaaagttctggccgggcgtggtggctcacgcctgtaatcccagcactttgggaggccaaggcgggcgggtcactaggtcaggagattgagaccatcctggctaacatggtgaaaccccatctctactaaaaatacaaaaaattagctggccgtggtggctggcacctgtagtccccgctactcaggaggctgaggtaggagaatggtgtgaacctgggaggcggagcttgcagtgagctgagattgtgcccctgcactccaacctgggtgaaagagtgagtgagactctgtttcaaaaaaaaaaaagttccatttatggtctcatctaaaagaataaaatacttagggataaacttaaccaagaaggtaaaagccttggatactgaaaactacaaaacattgttgaaagaaataaaagacataaataaatggaaagacatcttatgattggaaggcttaatattattaagtggataacactacccagtgtaatccacagattcaatgtaatctctatcaacatcccaaggactttttttcagaaatagaaaaacccatcctaaaattcatggaatctcgaagggccttgaatggtcaaaataatctttaagaaaaggagaacaaagttggagaatcctgacttcacttcctgacttcaaaacgtactacaaagctacaaatcaaaacagagtggtgttagcataccacacacagaccaatgaaagagaacagagggctcagaaataaacctttgcatatgtagtcaaatgaattttgacaaaggtgctgcaactagtcaatgcagaaaggatagtcttttcaacaagtggtgctgggaaaactgaatattcacatgtaaaaaagagtgaagtaacaccagctgcaaaaacaaactcaaaattgatcaaagacctaaatatatgacctaaaactatagaactcgtagaaaagctcatcagggaaaagcctcatgacactgggtttggcactgatttcttggaatgacaccaaaagcataggtgatgaaagaagaagtagataaattctacttcacatttaaaagcttttattcctcaaaggacaccatcaagggagtgaaatagaaacccacagagtgggagaaaatatttgcaaatcatatatttgatgagagattaatatccagaatatacaaagaaatatgggctgggcacagtggctcacgcatcatcccagctgaagtgtgcggatcacgaggtcaggagttcaagaccagcctggccaacatggtgaaaccccatctctactaaaaatacaaaaattagctgggtatgggggcgggtgcctgtaatcccagctactcaggaggctgaggcaggagaatggcttgaacccaggaggtgaagtttgcagtgagctgagattgtgccactgcactccagcctggacgacagagtgagactccatctcaaaaaaaaaaaaaaagagaatagaaaagaaatacaagtcaacaacacttaacccatccaacttaaaaactggcaaaagatttgaagagagatttatccagagaaagtgtacacatggccactaaacatatgaaaagatgctcaacatgacaaattattagagaaataaaaatcaaaaccatgagagaccacttcatacccatgaggatggctattactaaaacacaccacaggaaatgtaattattggtgagaatgtggagaaactgaaacttgtaaattgccagtgtgaatataacgtggtgcagccacttgggaagaacagtatggcggttccttgggaaaagtaagcatgattcctaacttgcacttgtgggtatacgtcccagataattgaaagtggggctagaatggatattcaatacccatgtacacaatagcgttattcacaacagccaaaaggtagaaacaacccaagtgtccatcagtgcacgaatggatatccatacaatggactggaattctggtttgtgcataatggaggcattaggctaagtgagatgagccggccatgaaaggacaaatcctgtgtgattccacttgcatgagggactgagagttgtcaaattcgtagagaccaaaagcaaaatagaggttaccaggaggagaagtgggagttcgtgtttaatggggacagagtttcagtttggaagatgaaatggttctatgggtggatggtgaggtgttggcacaacactgagaaggtgcttaacatgatggaactgtacactaaaaagtggtaaattttgtattatgtgtattttaccacaaaaaagatgaaacacccacatacccagcaaagctgtctcacgatattcttgttgtctgcattggaatgcagtgaggatgacaacccttgtcaggactgcttatgtggacactcgtgcaggacccttcttccatctgtgttctaggtttctcgggggccatggacagacattgttccctatgaatagcaagttcacaaaactgtgaagctgtcaaaattttctttatacttgggctgcaaggaagccccatgctaaatttgtagctcaacttgtaaattgcccatgtatgtgttctaactttccagtgaaattatgtttttatttttcctgtttctggacatgattttatttcatttcctgtttagttacactaaaagcatcctagtaactgagttcaatgttcctgtacactgtgttgtgctaattattataactagagctttgaacctatggtaaacatttttatttctccttggtttccctttttttctaaaagtcccgtaagatttaaattgcagattcaaatgatgctaaaagtaaaagctgagaataatagtacatttcaaaatggcatatttcaacacgtttctgtttcaaacaaagtagttattttgttagtcatttttctgaacacgtgagctccaggtcttttgggatctaggaaaccccgttactgaaaccacactgttctaacggtgtaagaagtcacagaatcctgaacgacaactttacagttcgatggtaattccaagacaatggtacagtcgtttcgtcctagctatgcagatgttcacggaaaacaatacttagctccctagagagcgaatacttttcaagagcatttttttttccttgagaagaaacacagctctctgtggaaaagtcagaaatctctttgtcctttctatcccagagtattatttttctggtctttcagtggtgctctttacctgataatacccagaaagtcagtttgattattatgtgatgccaacaaaagtgtttgaaaatgacgaagcaactaatgatttagcatttacaggtttaaaaagacagcacctgcaggagagactgtaatacgacgttgtttagtcaagttagtgttgagcttgccataaccatttcaactttcaaagtatttacgaatcaacagtgctggaattatccctccagtttcaaatatgacacggaagtaacttaaatgaaaaattcctttcttattccgccatgcgccaggggatttttcttcccctgaatgaaagtgtcagcatctcatttattaacaatgcagatacacatcaaagccactattgaatctgtctctccccattgactttgccttcctatttctacaccctatacttcttgttcaacgaattgttcttgatgtgacgtcttcacaataagcccataagcacaactgaaacacaatttcctgctagcttcagtcaagatacattaatcctctcgatatttcccaggacaatactatctctcttctgcagactttatttctctcatttggctgagaaggagaaaaatccttgaaaattggtttgaaaagtggtgtgcaaaaacagtcagagctaaaatttcttgggcacacaattttctttaaatgctcgcatgttcatcatgcaccctcacgttaaacactcgcgtgtgagaaactgagaaggagaagttgccggacagctgagcgtccctgtgccgctgccaccccaggctgccgcccaccgctcaagctcagagctagagccctgtccacgctgtcgtcccttcctgtggctccaagtctgttctgtccaagtcacttctccatgaaaatgctgggtggaacgtaaggaatgggaagaagcttaagccattcctcttatagacctgggcaaccacatggcgtttattctccagaatattcatttgatggggacctctgggaaatgctatggcagctacactcattgcctttctgcataggtaggtgtgcatgcatgtatgcaggtgaggaggcacatgtgtaagtgcgtgtgtctgtgggtgtggaggtgtgtatgtaggcgtgcatataggtacatatacagggagggatggatgtaggtacaaatgcaggtacccatgtagacatccacctatgttggcatgcaggtgtgtatgtaggcacctatgtagatatgtatgtaggtacatatgtggctatgtaggtggatttgtaggtgcacttgtaggtaggtgtgcaggtatctatgcaggtaggtatggaaatgggtacagatgtaggtatgcatgtaggtatgtgtctatgtcggcattcaggtatgtatacaggtacatatataagtatgtaggtggatttgtaggtgcgcttgcaggaaggtacctatgtaggtatgtaggtggatttctatgtgcacttataggtaggtatgcatgtagatacctgtgtaggtatgtaggtggattagtaggtgcatttgtaggtagctatgcatgtagatacctatgtaggtatgtaggtggatctgtaggtgtacttggaggtaagtgtgcaggtaggtatttatgtaggtatgtaggtggatttgtaggtgtacttggaggtaggtacctatgtaggtatgcaggtagatatgtaggtgcacttgtgagcatgtgtgtacatatacagatgtgtaggtagatttgtaagtgcactaatagatagatctctacctaagaggcatggatataggtgcagatgcaggcagacatgtagacatgtacctatggcagcatgtggggggatatgtaggcaccacgcagctccgcacgcagcctgcatcaacaactctcacccgccagtctctggccgctgcccacttgcagtgggtgggggcagaagagtccaccaagcgtcccaggtctcgtcagcatagttgatgactctcctggtctgatccacaaggctgaaacactaacttgttcattgctgtcctgtcaccttgtcacaacacgtgccccggtgggatggaataataacgctccgtctatggcgaaggcttaggctttgcagaattgtttggggtgagaatgaggcagccctgatcccccatgttcattcctctgtctcacccaccttgagtgtttgaaaccagaaacgattctaattcagacttgcaatgtgattgtaatggacaaaatattggccttggcttggagtgttcaagttacgtccaatgagaaataaaatatatgactctccctctctcttctaacttcatcattggattccagcaattgaatgtttgtgaaggcttggcagggaattaaaatctatttcagctggcagaagctctgaggtgctgtatttctggcctatgtatggttgtattgaagggagaagatgcacagttcctagaggtgccacatcggctactcattcatctttgagttttgtggttgggccaattatctcaagctctactgtaaacctcgttagaggaaaaacacaatgaaaatgtgtgtgtgcatgtgtatgtgtgtggacgcctgtgtgtgtgtgtgtgtgtgtgtgtgtgtgtgtgtgttgttaagcacatctcagagatgctttctagatggcatctattccaggtttatctgtttgggagatgataaatagaattcttaattattgcattattctctctaaattccagatcattaatatattctacagaggtaactctagatggataattaagtaaatcatctggagagtcgaacaatatagacacaaagtctgcacatttcaggtggagctattaaaaacaccaaggtctttagggactggctgtgtctggccagagttaatcaagctaggtttataacagatttgctttggctgtatattaagcagttagggctgctttcatacaaatatattctactgtgtcttccttggactgtgttttattttcttatttttgacagaaatatgggtatacagacctcaagaaaaagcaggggtgcaaaagaaacgacggccagccatcagcatcagcctcagaactgagggtgaccagggttggtggggactgaccagagacaccatgactcattgctaccacatgggaaggtatccaggactgccagatatttcaggaggagccagaaatctcgatttactggtgtaagagagtcccacatttaaaatgcaagaggagtgaacgtcactggaattgagatagatgaagtacatgtaactggtttagggttggaagaggaaagaagagagaacacgcgaatctctgttctaagtctcccactcagacctcccacacagacctctgtgctctcagtgctcattgtgtgtgagaattatctgcaagaactctagaaagtcgtggagccctgggccccaccagagaggctcatcagctgcacgcgtgggtgccgtgggagcccggatgctggggaggccggatttcagccctgctccccttggccaaggccttggatagcaaacctggaaagtcaaaccaaatccatctacgactgggtgagactcaggtgaagggttgtcaagttatctggtgattctgatgcagcattagggttgggaaccccagtaacatttaaattacttgagctcttcagttgcaagttattgaaaacaagtgaaaacaaaaagactaaataaacattctccacacacacactcacacttctcgtaaacagaatttggcaagataagctcttgctggtctgggagctggacttctttatagctcttgaggggaaggagaggaggtgcctgctgctgagtggagaccctgtgggctcacccatgccctgccctgacctgctcccggccctgggttgtgggcgaagctatagcctcacacttcattttgggccaagggttaggtggggtaaataaaggtcatggaacatgacttgggatatctgacttattcctaaagtgtagttggaataaagcaggaagaaaagaatatagacatttgggaacggacatggtttagggaaaaagtttaggtattacaaaatgtgcaaaaagatgtttgttttgcaatttatgttttcaggctggtgtgaactaaatacagattgacagctctgaagaaccaagagtggtcagaaaaacaaaagtgtggtggtagctcttcacctactgggagttaaaaacacgtgccgcgggtgtgaggagagcttggcatgattccacagaggaggaagaaaaaaggaaacaaacaaacaaacaaacagatgaaagggaatttgttgaatttacaatgaattagagtctttccattgtactaatttaaaagttaatatatcagcttcaaatttttcataaattgtggtaatttccaagaaggtcatctacatgtttcttggtttgctttgagaaagcactcaatataaagaatccattccattactttttatgtattaaaatctctcttaagcatctgactatttcataatttataagctagtgtagacttttgaggcaagcattttctttgaaaagatacagacattatctcagatttggcaaagaaaaaaaaaaaggatgtacaaacatcctacagttggcactgccttttaaagcacatccaaaaatgacccacagcaaagtgacaatggtaatatttgctcacatcacatgagcaggtctgagtagccaatgacctgtgtctgggttgctggtgtgatgtattacagtttctacaatttgctgcaggcagaaatcttaattaaggcctttcctaaagagtgaccttcagggagggcattactgaattggtgtgaaaatagacaagtggccaaattgccctggtgggacggtggagaacttggatatctctctcccaccaaagaatgggctgtgctggatataggccaggctgcaggatcaatgatcaatgatcaatgagccctgcaccccatgaaatagcctaacactggggagacgtgaaagggaggacttttctttttggcgaatgcacgtccgctcctcacactggaatattctgcatctccctgcatgcatgtcttctctgtgaattctgggcctgcgcgagtctgagaagagcaatgctccctaacagcatacgtgtatctgtgtttcctcgggggaaaacgctcgcatatctgcggtccttgacgatatcgtctgacaggttttagaaggagatggtttcttcttggtcagcaaaccaggatgagatgggaacacattccgatctgatcagggagaccttatacagtgtttgccctcctttttgagagaaattggaaggcatcctccactaaggtgaagatggattgtgcagcttcagggggcacaggctcctggccgggtgccagcaagcgcgactgcgcacctcggatcagtgaggcttgcttctgccagatttctcgcggctgtgtgaagtattgcagccaaatgtctctcaatttgctcatttcttggccaaagttactccctgatacttaaactctaagacattgatcaacttctcatgcacttgtggaggcccacggatgcatctgaccttccctttcagcaaggcgtgaccgtgcctctctgggagcttctgcaccggatgcacctgaccttccctttcagcaaggcgtgacagtgcctctctgggagcttctgcaccggatgcacctgaccttccctttcagcaaggcgtgaccgtgcctttctgggagcttctgcaatcagggcagtggatctacccaagtcgtctggtcacagttctcagtatcctctgatctaacattttcctgtgagtccagaggaacaaataccttcacagccgccacttaatgtgttgcccattagtagcggatccgcaagtctcgagctttctgtttgcattagcggaagaaaaacaacaaagtcaatctcagagttttttaaaccactgggaaaactataaagatggcaaatgcttttgagtaacaattattaggcagaagacaccacggttatttcaacctgcctggtctttaggtaagacgaactctgaacttctcaaaccagcactttctgaagcctagaagaagaatatgtaaggaagaagagactccaacacaattgtatacaagaaatgctggatgagggatcctaataattagcatattaggatcaaacactcttgggtgtctctcttgggtgaaatatctggtgagcctgaatgagagggggtcaaaatactgtgggatatttaaattaaaatgtctccatacaccacatactttcatatcatgagggtctgtctaggcaagctgctgctacaggtgcacggacaacaaagacctcagccttgcagctgactgacaattttgtgataaacagaagcacacgttagctgtcaggtaagtgagcctgtgcaagatgctgtcatcagagaatacatgaaaaaccaggaggcccaggagaagaagcaacactaacaacggcctaggagaagaagcaagcctaacgccagcccctttagtggaaggcttcacccaggacttgccttgggaacttgccctggaggaagagtaggattccaccactcagaaaggcaataatgggatgataatagcaggcaatagtatactatagattatatggaaataataattaagaatagtaggttaaatgttaagataaccttatatctgaaagcacttaactgtttacaaggtaagttccaatatattaattcaaatgaccactgaaaaaatcctctgaggtttcttttactactgcttttaatttttattttaatttaattttgtttttctgagacagagtctcgctctgtggcccaggctggagtgcagtgagacaatcagggcttactgcaacctctgcctcctgggttcaaatgattctcctgcctcagcttccccagtagctgggattacaggtgtgtgccatcctgcccagctaatttttgtatttttagtagagatggggtttctccatgttgtccaggctggtcttgaactcctgacctcaagtgatctgctctctttggcttcccaaagtgctggaatcacccgcctgagccaagacagccagcctgctattgtttttttaaataagccgttaaatggctcacccaagacaatatacacatgaaagtaagaatccagagctgaacttggttctctgtttccaaggaccataccccagttgtctcatgaactacatacgtcagcagataggatgccatgtctaagccttacaggattaccatgctgaaggaagaggaccttgaagtccacatcatggcaggtgcttcatatctcttaggaacaatgaaaaagtaactggccagaggaaatgccttctgcagtcctcacaattttataatttctttttgtttatgtatttatttaattgttattattttttaagagacagactcttgctctgtggcccaggttgaagggcagtggcatgatcatggctcacacaagcctcaaccaggcttaagcaatcctcccacctcagcctcccaagtagttgggattacaggtgtaagccaccacacccggctaattgtttttattttttgtagagacagggttgtgccacgttgcccaggctggtctggaactcctgggctcaagcaatcctcccatcttggcctcctaaagtgctaggattacaggcatgagccaccgtgcctggcttattatttctttttaggaaccattttgaaaccttttatttaactggagttttacaatcttactgacacctagcatttgtgtgcctacagaatgttaagaaatcctgataactcaaaaaagcccattctttgtttcaccattttgtcagctctagagtcatcctgcctgacaattagcagggccaattcataaggagtcccaaaaccaacacacactgtttttgtggaaattaaaaatggaataaacaaagtcagatgtaatgagacccacagtctggagaaaatcctacccctagacttgacaatgagcctgccataacctacctttctttatgtttttgtgtatacatgctacccctcaacaaggcaaggagcttgtctgtagcaagatttcagaaaaaaagaaaaagaaatcagagtggaaagacctttctgtctccgctgttcatggctgagtgattcgcctctttgagttgtagtttctcctgttaaaaagtagataaatttcccttgcttgtctaactggattgttgtaaaaatcaaaggagataagacagcagaaagctacttctaatttgtaaattgctacaaaatgagagttattgttatgtatctctcttggcctttaatagttgttgataagatcatttttgtgatataagcatcactcatttgttctataactcttcattgagtttctgctttttgatttagggaactgagtagctggcaagacagggaagcatatagtttagtggcagaaggcagagtgaaccatcaataagtgaacaataagcgccacacagagaagtaaaactaagtaatgggatgagaatgagaatggctgggggaggggcttcagagatagggattgttatgtgttcaacggtgtcccacccagaaaatacatgttggtgtcctaacccatgggacctcaggatgtgactgtgtttggatattgggtcctagctcgttaagaggagaccccactgcggtagagtgggtccatggtccagtatgttggtgtccttatcaaagagagtcgtgagggaacacaggagagtaccacgtgacgctaaggcagagattgaaggagcaggaaggatcatcccctgcggccttcagagggagtgcagtcctgctgacaccttgattctggacttctggcttccagaactatgagaggatggatttcagttgctttaagagcccaggtttgcaggactttgtgttggcagccctagaaggctaataggtggtccaagaacacctgtctacaggtgcagcatttcacctgggactcgactaaggagggaggcagggatgcaagtcagggagtgtcccgggtgctgggggaccccggccttctgagtctcacaatcagaaggtgggcaagacagctggaggggagcaggtagggaaggaggtgggagacgaggccaggagggagagcagggctttgtagggggaggtgatgtgcttggacttcatgccaagtaccatgagaggcctgggagagctttaaacacaggtcgctgctgacacggagctcaggccttgatgccagcatctaatccccacgcacttgccgagcaaggccacacgaaatgctcccaagaaggactgtgactttaaaaccctaaaagggacaggtcacagcacatttttaaagtttgtgacatgacattttctgttgctattcaatagttgtaaaaatgcttcatcagaacttttaaagcatgcaacagccaccacctaatgtacacttcgattaagtcagtgaaattggctccagactcagaaatcaaatcaggattccaatttttggcaacatagtatctatcatagtattttatttttgctattggataatggaagtatttatgctatttataaagtattaggtggtgcaggttacagaaaaatttaaattcctaatttttaagtgctaatttgcagtcagtagctttgttccatctttttgtttatttctttgggtatatttttgtattaagtagatatagtttagtttcagaccatgatagattcaggtcacaataatgaatacataaagattcagaggataaaatagtggcaaattggtctgtttctctgtgtgctacaaagaatgaactaaggaatcagaaagtgcaagttcacacttgattcatggtcctcttgctgatctctccgaacctatttcctcaattaattaattctttccttaatttaccaagtgtttgtccattgttcagtgctgagaggaccatactataagactggtgtgatcctgtctttaatgtgcaaagtagagatggaatccaagcattattattctaggcacagcataatatggcattctttttttttttttttttttttttttttttttttttttttttttttttgagatagggtctcgctctttcacccaggctggagtgcaatggcacgatctcagctcactgcaacctccgcctcctgggttgaagcggttctcccgcctcagcctcctgagctgggattacaggcgtgcgccactacgcctggctattttttgtatttttagtagagatggggtttctccatgttgtccaggctggtcttcaactcctgaccttgtgatccacctgcctcggcctcccaaagtgctgggattacatgtgagccaccgcacctggcccataatagggcattcttatgccaagtatagtacctggtttacaagagaccagaatgatccatttgcatggtttcttactcaggacgctaattttaggtattcaatagaaaatttagcaaaatcacacacaggaataaatgttaagtatattttcctccattttttctcctataaatagactttaaaattatgaaggaatgagcccatagacaatatccatgtctcctgagaggcagctttgggtctgaggtcaatcaactacttttgattgaatagtgtcctgtctggatttctgttctttatttactttgaaatatgtaaatatttgcatagatggtaaatggaaatggtgtacttgttggtgaacctgtttgattactaaagccataataataacaccaccagctatgaatgctaagcaaaaatgaccctttgttctactttttcaaatctgtggactacaacagcactcttggggacaataacccacacaatagattaaaagcctgttaaatgttattttcagcttggcagaacatcaactgctgagtaccctttagctccactttttttttgaagtatggcaaacttactatatccaggtgacaacagtaacatgtcattttagagtgattaaataattgtacaaataaatggaattaggcttactctctgactccgaaatacaaaattcaggtggagccaaggggtgagttgtgggggtctttgacctcccaaacgtttaccatgtgctccaaacctccctccacaaatgtataatctagtagaagtacacctggtggattattgcagcttcaggatgaaccatcacccattctccaaactacagtctctcctactttgaaaatctggagctatctcttgctaaaaacataaaagatttaaagatttttctaggttttctctttttttctactttaaattctcaaccaaaacagaggcataatttatatatatgttttagtaggaagtcttggattatctcctaattttaaatagtttgattctggttaaaataatttttagaccacagtttacatgatttagctgattggaaaattgctttttatcataattagtagaaattggtgaactgaactcctttaagtctgctacaaaaccaaccttgcaagaatatttcttccattaaagcacatggctttaagagaattgccaataaaaagcaaccagttagaagattcatgctggaggaaacattcaagttgtatatcaaatacatgcaaggtatatcaagtagttcacgttcacatttatttacaaaactcctcggagggtttctgctgtgctaaggacaaaaggagatctcataagttctgaatttaataaaaaatatcatagaggttattttgccaaatgaaaataaatccaatacaacactactatgcaatgggtttaaacatttatacccaggttgatgaatagaattccagcccaatgctacattttggcagaacatagtcttagaaaagatttggagctgcctccagtctttaaggtggtaagctttagaggagccttagaaatattccattccattagttagaatatgatgaaaagtacaaacttttctagtcatcatggttgtcattattaacatgattgtcaccatacttattaatataatcatcaccatcatcatagtcatcatcaccatcatcatcatcattatcattgttatcatcatcatcattggtataaacatcatcaccatcatcatcactgtcatcatcaccaccattatcattgtcatcaacattaccatcatcttcatcaccatcattattatcataatcaccttcattagtatcaacattatcaccaccatcatcatcattgtcatcaccatcaccatcattattgtgatcatcaccatcattgccatgattatcatttctattgtcatcatcatagtcatcatcatcaccatcattagtatcaacctcatcactgacatcattatcttcatcatcaccatcactattatcatcgtcatcaccatcatcatcgtcatcaccatcatcatcattatcgttatcttagtcatcataatcaccatcattattaacataatcatcaccatcatcatcatagtcatcatcaccataataagtatcaacatcatcactatcatcatcattgtcattatcaccatcatcattgtcatcagcaccatcatcatcaactttatcatcatcatagtcaccatcatcagtatcaacatcatcattagtatcaacatcgtcacctccattatcatcattgtcatcagcaccaccatcatcgtcatcatcaccatcattattaccaacattatcatcctatcttcatcatcatttagtatcaacattatcattagtatcaacattatcaccaccatcatcatcattgtcatcaccatcaccatatcattgtcatgatcaccaacatcaccatgatcttcattgctatcatcatcatcatagtcatcatcataaccatcattagtgtcaacattgatgatactaatcaatctaccattatcatcatttcatcatcatcatcatcatcgtatggttatcataataatcatattcatcataatcaccatcattatcaacttaattatcatcaccattgtcatcatcaccataattagcatcaacataatcactgttatcatcattgtcattatcaccagcatcatcatcaccgtcatcatcatcatcaccaacattgtcatcattatcattatgtaacttaactttcctcatacggagagcaacgcacactgggctatgaacaatagggaaattactgtgtactttggcttcttaggctgagacattaagtagaaacaaccacatattaagaggtcttagatacatatttatagcaccatgacccagtggtaaggacctggaatgcagactcagaggaccttagtccagccctgcctctagctggacctgtgacagtgacagtgaccctgtcactggcttttgaatctcaggtatgccccttaagttctataagcctaagtcgtcacatcaatgaaatgggataataataataacacttgactaagaagttattgtgaatgtcacacaatatccttactaacatcttcattttgcaaggagaaaaccaagcttatgaagattaagtaatgtatacaaggaagcacaggtgttaactgatggagtctgagtatgaactagggtctttttgattagacaattcgtgccccaaaccacttgtatatactgccttcatcatatgaaatattgcacatttaatagtgttcctctccatttttagagactcaccaaaaatttctaaataagtttgtggaaatatgcagaaaacacatgttcatttgagacaaattttagagaaagagctttttgaaataaaggctaatttagaaaccattttctaattcatcagttcctctcagttgtattaaacacttattgttctcctttctcttataaataattgattcaaaactatttataaattacatatatatgtacacacacacaggcacaagcatcagttatgctttttatacactaatcctaaatctcttcaatctgaaattatatttcataaagaacttgttctgaggaaataaaattatatataaatgtcacttctattttccaatcatttataagttaattgaggggatctcacatacattcctgagatatctgcagaagtaaccactttaagtataaattccatagaatttgaagggggtggagtttaatgttggttgatgaggtggagatgacttcctggagggcatggaagttgaggcatggaagagaatgtgtctgggtgggatgggagagaataactcagttttagaggtagagaaaatgaacatttctgggtggcaaagataaaaaaatctcattaaatcaaatatttgtgtgtatatggaaaagcagaaactctcattcagtgcttgtggtggtataagtcagtagatgccttggaaaactgtttgggctgggcatggtggctcacgcttgtaatcccggcactttgggaggctgaggcaggtggatcacctggggtcaggagttcgaagaccaacctggccaacatggtgaaacccatttttactaaaaatataaaaaattggccaggcatggtggcagatgcctgtaatcccagctactttgggaggctgaggctggagaatcacttgaacccaggaggcagaggttgcagtaagccaagattacaccattgcactccagcctaggcaacaagagtgaaactctgtctcaaataaataaataaataaataaataaataaataagtaatttttttaaaaacaaaggaaaagaaaagaaaactatttggagtgatctcatatgtgtgaaaatacacatggcctatgaccaggtaatctcactgatacatttataaacaagagaaattcctaggatacaaaaaaaaattactgtttataaaaaccaaaagtggaaatcatccatctatgttagaatgaataattttatgtgttcaaaattttaatgtgttcaaaatataataaacatgacacatgcagtaacatggatgaatttcaccaatacaatggtgaatgaaagacgtaaaacacaagttacagacatatacttttgtataaatttcagaaatgaccaaaatcaaaaaatgttgtttagaaatacatcactgactcatcacttactcatcattcattcattattcactcatcactcactcattattcacctcttactcactcatcatttatcattcagtcattactcattcatcactcaacactcactcatcactcaacactcattcatcattcatcgctcactcattactcatttattactcatcattcagtgttcattcatcgctcactaatcactcactcaatactcattactcaacactcattcattactcatcattcactcattactcgtcattcactcattactcttcattaatcattcagtcattactcactcatcactcactcatccctcaacacttattcatcactcatcactcactcattactcatttattactcatcattcatcattcactcatcactaatcacttatcattacttaacactcattcattactcatcattcgctcattactcatgcatcattcatcattcctcactgctcactcacactcacttatcactcaacattcattcattactcatcacgcattcattactcactgaattaaccattcagtcattactcactcattactcatcactcacttattacttacccatgtatcagtcattactcattcatcactcactcaacactctattacttattactcactaatcgctcactcattactcactcatcattcagttgtcagctactcatcactcacctatcactcactcattactcactcaaacttattcatcactcgctcatgtctcactcatcactcatcactcactcatcattcatcacccaccactcatttttactcaacactcactcatcattcaccactcaccactcattcatcacccaccactcactcattactcgtcactcacccattagccatcattcactcattactcactcataattcattcatcactcatatgcatcactcactgctcactcatcactcacttattacttgttactcactcattactcactcatcatcattcccttgttactcacacatcactcactcatcacttaacactcattcattactcattgctcactcatcattcatcatttagtcattactcacttatctctcatcactcattcattactcatcactcactcaacactcagtcaccaatataggtacctctctgactacatgaagaagtgattttgatatcttttaacccttaatcagctataaaatggtagcccacaggttgcatatgaactgcacaacgtattttattaggtatcacttgctttgtgaattttttgtatagttctacacagaaaagctagattcaagagttcttttgaagagttggagttgtttgtcaggcctgggtccctgcttctgagcagtgcctcccactgaacccagcacggaagtgccctgttcccatcatcccacccgtgttcttgtttaggcacttaccgtctcaccccatgtgtaatgacctgtctgttctctgttgttatttcagttttctccctgaactctaaggacatttaacctaagtgttacatgaatcaaagtgctggtgtgtttttctctgtctttggaaagttatagaaggtagaatcggcatgactttgaagcaattattccagtagaaattctgttttcatagctgccaaaaaggccgcatgacaaaaacagtggcaattcccaaatgcatcttgatacttctaggttgattctaaatgacaacttatttactaacataaaataataatttagtcaattatatttttagttcttcataaacacctacagcacaaaagggtaaaaataattttggggtgaattgtagcaaagaaaattttgattagggcgataaaagagaggtaaaatagatacacagcaaaaacatttaatcttgcccagctgttataggtgggctgcatatttagacaggagcttcctagctgccaatgcaaggaaattattctgacctttgcaagattcacaacaatcatgggataaaaacaaaacacttgttctggaaaagcactgttgtgctgtccctgaaacctagagtcatattctctagtgcaccttttaaaattttactttatttttatttttgagaaagagtcttgctctgtctcccagcctggagtgcagaagcccaatctgtgctcactgcaacctccatctcccaggttcaagcgattctcctgccttagcctcccaagtagatgggattacagacatgcaccaccacgcccagctaatttttgtatttttagtagagacggggtttcatcatgttggtcaggctggtcttgaacttctgacctcgtgatctgcctgcctcagcctcccaaagtgctgggattataggcgtgagtcaccacgcctggcctctagtgtacctttttaaagaagtgatgggtagtgtgtttgggcagcttaaacattcctgcagtaaaagggggagtttaacttgctagctatgtagggaaacagttttgagtctcctggaattgtacacagaatttggtgtgcatgtatacatgatttttctagagttaaatatccagaactttctccgatttctcaaaggcagcattctcctcaatgtgccacacagcccagttgtatcagaagccctcagggagtttggtaaattgcagagtactgggccctacatgaatcagagtcactggaggtggaactcaagaatctgcattagaatggctctttctctctcttcccccacaacatgtacacaaaccaattcatgtgtctgtttattaccattatctttaattcaattaaaaatgaaaaatagcaaaaatcaatttagcagaaagcaattccacagaggggcccaatcaaaacagctcgaatatattgctcgccagtagcctgttttgatccaagggtaaaatgtaaactagccaggggaatttatggacttcatgtccttcagccaatcctccataaatatcatttctccccactgggcatttcaggaggattagaaaacagaattctttttttattcactgacaagaacctggagggcagaaattcagtgtttcaactaaggacaaagccatttgattcattaatcaactgggcagaggacaggattaaggttttattctcttctttcgaagaactctgcctggctgaagggtcaccactgcacccggtaccaaagcaggtccatggatgttacctgtgggaatagcctggtgagatctgcaataaaaactgcaatcgtgaggaaacttccagaacattgaggctgatcactgaccaccaggtaaactggcaaggaaggatgccacacagtgtccacctgggtgccatcaagaacggacacaatagctgttgctttcacagcgaaaggagacttctcgttcaccagcctcagtgggggcccggcccctcctgcacctgctgcccccagcggggctctgtgatgctgcatctcccacaactgtccagccagtcatgctgaagaccccttacttcctggagcatttctaattttaagttttgtgcacccacaccaggaaagaaggtttagttctatactctggagaggtatatgaccgtgtgctcacaggcagacccacacatccttggtctctcaaaagcaataaaaggtgcttttgcaaactataggcctccttcaaaatcctgagattcccagcaaggttttgggtcacccctcccaggcttgaatcagtgacacggcaacccatggaagaagcaaatctactaaatttacttgtgtttgaagaggagttaagctgcaataaaggaactgtcacccgcttgcaggggcctcagtcctgcctctgtcagggcctctggcctgtggacggaagtctgagtgggtgtcactcgggtgcatgagctgggcctcagggtgaagtccaggttgtgtagtttaaaacatccattttctaacctgtgttactttaatctttatttgttttctcacaacacttagatggaaaaagaaacgggatcatgttgtctggttattgcattaaaaatctttaagcatgcaagaaagaattatttttcaataaattttggtaagatgtctgcatttcagagagatcttggtaatagcatgagcatatggtgccatttattttctgtcaccatcttattcatttccttattttttgcggcaatctagcatattatcttaattatgttttaaataacttttggagaaagcattaaggaatagcaatgagattaaccctaaacacacgtatcatatgcacatccaaggaaaaatctaaaagaatacagcagctatctccactatttagagctttactcagtaaattattttcctcaaaataacacatacatatttaatttttaggaagagaaccatggattatgcaatatcaggctttcgtgaagggatttttttgttgttgttgttcagtctgtagcccaggctggagtgcagctcatttcaacgtctgcctcccaggctcaagcaatcctcctggctcagcttcctgagtagctaggaaaacaggcacacgccaccatacccagctattttttttttttttttagagatggggttttgccatgttgcccaggctggtctcatacttctggtctccagagacctccttgtgcccccaaagaccttgataagtcacagggaagcacaaaagcagtcaattccctttcagccccccttttagcacctgtgagcccttcacattcattgtatcatttcctttatacagcacgatatagatcttggtcagcaaatattttccataaagggccgtgatatggttctgatctgtgtccccatccacatctcatgttaaaatgtaatcctcagtgttagaggtggggcttggtgggaggtgactggatcatgtaggcggatttctcatgaatggtttagcaccatcctcttggtgctgacctcgtgatagtaagtgagctctggctagatgtggtctctaacagtgtagccctgcccacgccccgcccccttgctcctactctgccatgtgacatgcctgccctgtcttcaccttctgccatgattggaagcttcctgaggcctccccagaagtcaagcagatgccagcttcacgcttcttgtacagcctgcagaaccgtgagccatttaaacctcttttctttatacatggcccaatctcaggtatttcttgatagcaatgcaagaatggcttaatacaggccagagagtaggagtttttgatcattcagcctctttcccaatccttcactctgccagtatttcatgaagcaggcacaaatgacatggaagtggcatgttcagtgaacttggattccgttgcttaaactggctccttcacttccatgctgaggtcctggatctgcagctccaaccccctttaaatccctcaacacggagcccatcgcttccagcagcagctctcacactgtgagcgggcatgctctgtcccaggcaacacttgcacacctttcttcacagcccacaagccagtcctactgttttctcccatgaagccaacactttcatttttccaacactcagcccaccccttactttttcccctctttaatgggaaataatgcatctggcgctggacattctgagtgtgtctgagtacacgtctcattgcagacacgtgtgtacgcgggcattatgtagccagcccggccctgttagggagttctgctgcagacccctgactcggctggctgtgcactgcgtggagccccacgtgcgtgggcctggacgttcacatggagctcctgccgtggtggtgaaatattgtggactgcttggctgactacacgggtcagttgctgcaaaaagccagtctgcaggtggggcagtccaggaccgtttccgtgacaaaaggagaaaaacaatgaccttgaagtaaaatttgtataaagctacatttttttcaatatttaaaaaattcttaaaaagtattcttactattcattttttgctattaatatacaagggggtagttgttgccggcttcatgctgtgcctggcactcttttttgaaattactctggactgaaatccctgaatctgggacccaggttctaggaatgcaaacacacacacatgcgtgtgcgtgcacacacacgtacatatacacagagacacacatgacacacacagacacacatacacatgcaatgcacacacatgcacacatgatgcacaaacacacagacacagccacacatgcacgacacacagacacatgcatacagacacacacggatgcacacaggacacacacacacatgcacacacagacacacacaacatagacatgcacacatacagacacactgatacacgcaaaacacacatgaacacaaacacacaggcaccgacacacacacagagacacacatgcacacacagaaacacacacaccaatgacaaatcagcctcactgtgtgcctcgcattgccccatttaacccgcatcctgcgttgttggaaagtgtgtatgtgatgatgacgctgaggaagatgacagcacagagggaagatggcacctgcaagggatcggagggtttttgttttttttttttttgcaacaaataactcagatgccagttttcctttccagggaagttttatggttgagttagctgtcttagggaggcgaaatgatttctctaaggtgtcgtctgactcacatccacacacatcttccctcggaaaacactcgttctgcctgaattgaaaccagtgtgtctagccctgagccagttagcctcaccatgccccagccaggcgcgtcagccgcctccccacacctgtggttatgccactcccatccccaccatggcagccacctccccatgcccgtggttctgccacttccgtccccaccgtggcagccgcctccccatgcccgtggttctgccactcccgtccccaccatggcagccgcctccccatgcccgtggttctgccactcccgtccccaccgtctgcactccagacatcttcttgaattaggaggactccaagccagaagctccatcgtgttctatttctgtgtgagtgagtgcatgacatctcacaaaaaagtaataaataatctttcaatgtatccttttccttgactttttccattcttggtatcaaaatcagagcacactttaataatcatctaatcgtttctggttgtttctcttaaaatctgatcatctatgatctgattattattttatctgataatctattatcagattttaagagaaacagtgcatgtgactgtgtctttgggaagatgatgtgcatgtcacctattggactttttactgtctgtcatgacggtcctttggaatggttttcaggtagaaatgaataatattatggtattggtcaggaagaaatttaacgacaactgaatttgtttataaaagtttgaattttgtcgtgcggctcatttcaacttctcctcctgcaacccttctgaaatagagaaattctgcccataatatttattatttatgggggggaaatgctggaatgcctaatggaagcttccagatgataaaagtcccaggtctagcaggaagcccacaggctgttcaattcccccactacggtatttgcatatttgaggctcatgttcccaagcaccagacaccagcaaaactctgcagcgcttttctgttagtttcagcgacagcctgtctaggcatgcccttctagaaagaaaactgtagtaatgctaagaacggtagctctatttactgaggaccatgtgggctccaggcgtcctgccgacccactgtgcagggtctcatgtggctgtccacacagccctgggagatggagattcctactctgttcatctcgtaaaagaggaaaattaaatgtaggggagaaacttgctataagtacccgctgtggactggctgtggggtcccccaaattcctatgttggtaccccaaccccaaagggatggcattaggaggtggagtctttgggaggtgattgggtcatgggggtggggcccggtgatgggatcagtgcccttctaaggaaaaacgtgagggccctggtttcgtccctctccgatccctgccgtgtgaggacgcagtgagcaggtggctggctgcaggtcggaggccaggatgtcaggaggcaggtcttccccacaatccggatctgctgcctggacagtgggctcccagcctgtggcactcagggaccaacgtccactgcctaagccacccagtctgtgccccgctgctatggctgcccaagacggtggccgagacagaagcacttctgagtcctagggtgttactcactgattcttccagtggctgtcgagtgacttccctataggagggcagagctgtgatcaataaatacggaagccaggaagacaggagttgacgctgctacagaggaaggaaacagagtgggctcagatgtgctggctgtagaagaggagctcgttttatgtgagggaacctcaggaggccctggagtcaggagggagcaagaccagacccactggagaggctggcatgagccttggcaccggacaggaaggctgcacctgcccccttcaccaggctgcatccggagctccctgctatccacacaccccagcttctgctcacactgcccttcaaggcccctcgtgagcacacatggcagtcccttctgagtgcttcctttactacgtgaatctgacgactgcctagagggaaacgtgagctccgtctggagatgtttaccctcgaccaggtggcagctttgaatggcagggactggaatctaccagtgtagctcctgtgtgggcaccggctcaggacgagagacaggccgagttccaatgtcttccaggactcgatggaggggcagggtgctgtctgaaggggtttcccccgcttgttgtgagtcctaagtgccagatagcgggtgtacagtgacttcattaggcatacgcagctttcctggcacgtacacggggagaactggaggagaagagctgggagcagccagccctcccagtcctggatttgaccatggtgcccttcttgccgtcttctccagggtgggacaggcagcgatggctcttccactggcctctgggtccttcagaactagtaacgtggtcagggctgttctttaattttagggatgtctggtccaaggttccacaattgacgactgtgtgaccttggggaaacctcacctttctaaatctcacaagggagatcacacaattcccgagtggtgcgttcatcaggaaggtcaagtgaggtcgcgtgtgaacgtgaattatccagcagcacacggccagcgagaccttgacactggtgttggcgttggatgaataggatgcgtttgagggccccttggtggttgagagccctcactgtcaccgacctccatccatccccaggacaggcatcttgcagaacctcaatggacgtcagtgctgtccccgcagctggtgaagacacacgctatggtcagaggctgcgtctggacctcggcttggccaagctatgtgtgagcatgaagcttgtttccttctctcaaacatggggagaacccagtaaacctgcctggcagagtcgttgggagactcccaggaggcccttggagtcacttgcctacattattgttttcacgctggcttctaaagaagtcgtgttagctgggcacagtggctcacgcctgtaatcccagcacttcgggagaccaaggccggctgattgtctgaggtcaggagttcgagaccagcccagccaacatggtgaaacccgtctccacagaaagtacaaaaattagccggatgtggtggtgggcacctgtatttccagctactcaggaggctgaggtgggagaatcgcttgaatccgggaggcggaggttgcagtgagatagctgagatcacaccactacactccagcctgggtgacagagcgagactccatctcaaaacaaataaagaaggaaagaagtcgtgcttattctgtcagtccctaagaaatcaaccttgattttagtagacattggaaggctgcagagctcctgaaagcccagccgtgaacccaggctctgcggaggcctttccttctcctctggcttcaggtgagaagtcgtctggcccagcggtccctgggcctcagcatgaaggctggggagctaagcgaggagtttggtgcctttcttgaagaggagtctatgaatagatcctattttgtagcatccgggaggagccggtccatctataaaaacctcgataatcgtgcctcgtttcctgctttcactgcgtgccatgccctcggtgattagcgtgtttttcagactaacagcaacagtatgttgaactgaatgccacctcctgggtaaaatgatcaatctctttgacttctgcagtaaacacgttccatcagggggtcactaatatgcttttatgacctcactgtcggagatgataccattaccaagcttgataaaccattcttcagaggcttgcttttaattttattttttatgcaatcatggggactataaccaataaatttagctcgatgctttctcactattaactaattctgaagaagccctcgggggttcgtcaggcacaaatccttcaaagaatttgtacaggatattggaaatgatattcacccggggacagaggtttaagcccgagctgctactgttttctttgccattagagttacaacttggctaaatgtcatttagtcaaaatgctggattctgcaggatttgcagataggcttgactatttgtctttaataaattcattgactcacagaagaggtattagattatttgtttgagaaaaggatgtgtaagtggcaccagactgctgatgtgcagtttctcattaggtccgtgcaggctcaaaagtgctcaaatccaaattaagctccagagcctttttggaaaacattgtaacagctgcgaaatggaaaggggaattcagatgagagcctggctagggatcttatcttaaaggggcatcagctaaagccatgtctgtggtacaaaaccatgggcctggctattttcttctttctttatgtcaaggagggagcttcttaaaattatgctttaatgcttgcattgcttctgaggttctgacgtcttaaaatcccatttgcttccctttctttttctctttctttcttttctttcttctttcttttttctctttctttcttttctctctcttctctctctctcactctttctttctttctctttctctctctctctcttttctttctttctctctttctttctttctttctttctttctttctttctttctttctttctttctttctttctttttctttctttctttttctttctttctttcaacaagatctcgctctgttgcccaggctggagtgcagtggcacaatctcggctcactgcagccttgagctcctgggcttaagtgattctcctgtctcagcttcatgagtagctggaatgacagctgcgtgccatgatattcagcaaattttttgacatttctttagagttggggtctcactatgttgcccaggcttgtctcgaactcctgagctcaagcaatcctccctcctcagcatcccaaagtgttgggatgacaagggtgagccactgtgcaggcaccagaagtgatttctggctgttgttttcaaccactgaggacacccattgccgaatgattattttcaaaccaaagctaaaatttgaaaggtgtcttaaactaactgtgggaatcatttcttggttgaatttcatatgcatacatctatctggagaccttggagatgaaggatagaatcaatgacaccttagagtcctttgtgattctattgtaattatcgtaattactgtgaatctcagactaatgactcccccaccccctacagtcccttcttcactggaatctagcccaaagccaggctagaacactgaaagcttttgccacaaaaccagtaatcatcaaataccattatagatggaactctcaattccaaagctctctctgtctctctctctttctttcttgacgctgtcacccaggctggagtgcactggaatgatcatggctcactgcagcctcaaccttctggctcgagtgatcctaccacctcagcctcctgagtagctgggactataggtgcatgctaccatgtccggctaattttttaaattatttcgtagagatggggttttgccacatgggccaggctggtcttgaactcctgggctcaagccttggcctcctaaaatgctgggattacagatgtggccaccgggcctggctcctgttctattgcttgttttgatccatttatttttgtgctgctggggtgggtgggcgtatcgggtggatgcacttataatattgttaaaagctaaggtgaagtgctatgttcaacggatagattatgtatcagaatgccttttttgttaaagcaatacatatttattgaacacctaccccatggtgggctttgatctcatgcctggaattcaacagtaaacagaaaagggggactctctttcttcaggtagctcctattccagtgaggggagacatgtgtgggatgtgccaaggggagagaagttacatggagaacagaaaagcaaagtcaacgaggtagggattcctgtggaatggggggtgggggcagtgtcaacatttgatgctacatctgtgagcccggtctgaaaggagtgaagaatcagccgaggaaggattggctgagcacacatatgagccattaatgccactacactggataccaagacatggagctgtctacactggataccaagatcttgatggtgtctacactggacaccaagacgtcgatactgtccacactagataccaagactttgatactgtctacactggataccaagacatggatgctgtctacattgcataccaagatgttaatgctgtctacactggacaccaagacgtcaatgctgtctacactggatactaagacatcgatgctgtctacattagataccaagactttgatactgtctacactggataccaagacatggatgctgtctacactggataccaagaagtttatgctgtctatactagataccaagactttgatgctgtctacattggatactaagacatggatgctgtctacattggataccaagaggtcaatgctgtctacactggatgtcaagacatggatgctgtctacactgtataccaagatgttgatgctgtctacactggacaccaagatgtcaatgctgtctacactggacaacaagacatcgatgctgtccacactagataccaagactttgatactgtctacactggataccaacatatggatggtgtctacactgcataccaaggtgttgatgctgtctacactggacaccaagacgttgatgcttctacactggatactaagatgtcaatgctgtctacactggataccaagacattgatgctgctatgctggataccaagatgctgatactgtctacactggataccaagatgctgatgctgctacactggataccaatacatcaattaagtctacactggataccaagactttgatgctgtctacactggataccaagatgggtgtttcacgttggccatctaatcctcaaagcaacagaatgaggtcagtatcatcatatgcatttcctagatgagaaggctgaagtccaaagagtggaagctatttccaaataaatccaagtctcatgacatggagaagagctgggatgcaaattcaagagcacatgattctgaagcaaattatttccctccaagtttctgctctcattgccagacaacaccttctcaggggtcatagcttcagccacaagcaaggtgtgtggacattggaagagttgtttgtcccccagggatgtggagcaggtgctcttacgtgtcccagtgagatgcaggagctgtgtgctgatcttgtcatgccagggacacatctggagtctgtgctgggctcaccccacgtctgccaccagcctttcgcacagcaggaaatcaacaacgacttggtaaagacaatgggctctgccaagctgcttactttaaagttcacctgacacatttacactcagggagagtgacgatgtctggagagcgaacgtgaagaatgaagactacagctgatgacattgcatactgaaaatctgccaagagagtagattctagtgctcctaccacatccacactgaatggtaactttggaaggtgatgggcatgttgatttgtttgactgtagtgttcatttcactatttgtatgtatatcaaaacatcgtgttgtacaccttagatatatacaataacagtaaataaaaaaattaccagaatgttcactagttccaagaaacctattttaatcttgagctgccagaaacccatagcccatacattaatgacaaagcgtaactagaaacgctccttgaagaccctcagtgacaaggctggctatgacgggatgaccgccaccatcaggcctgtttcctgaagccggcagcgccctgcagccgactctggcaggagggcactctggagtgtgtggctagcgatgacggccgtcctccgtggctcaggatcctcttcttgcctgtgtggagttcatggctctgttctggctctggtgctcccaccatggttctagccaggagtctctcatgatggagcgcgctgggaagggctactctggggtggaattatccagacacacggcagtgctggggttccagggcagccctgaggagaggggcaggggttctgcaacccctctgcccaggtgcatgctcagaagctcagcgcctgtgtggagggactcagtgtcaggaacaaccagggatttgctggagaaggagaagctctgggccggtagagttggatcacagctaatcatgctggcttgaagtgatagccggtgaatgcttgtctatcacctttctggcgcctcttactgttcaactctccattttctgagctctgtttaccctgttctatctaaaacacttaaatttgttctaaatgaagctgtgtataaacaaaataacaaaaatacagccgggggcaatggctcatgcttgtaatcccagcattgtgggatgctgaggcaggaggatcacttgagctcaggagttagagaccagtctgggcaacatagcgagaccctgtctctactaaaaacaaacaaaaaattagccaggcaaatcgcttgagcctgtgagatcgaggcagcagtgagctagatagctctctgcactccagagttgggtgacagtgtgagacgctgtctcaaaatatatatatatatatatgtatattatataaaataacaaaaatacataaatatataaaaatatacttgatattgctgatacagaggactcctgaatgttcagaaggacggctctgacgctttgggacagtagtcggggaatcagtaaaccacacacttccacggccctcaatttcagggtaacagccgtcagttctccactgcttctcaattatttgaacaataaatgaattttgaattttaatgtttctcagtgaccatgtggtactgagtatgttttttgatgcccattatctgggatgtattttcctcctacctcctccctcagtggggctcgtttctggctgcccccacacagtctgatagaacttggttccctccagatgtgtccagatctgggatgtcctgcacagcggcccctggcctcctatggccttggagtgcttgaaatgtggctgccgagacagaggaactgaattttaagttgtatttaattttgattgaattagagttgtcacctgtggcagatggctactgcactggaccgccacccaagaagcttaaaatcccaggacactcaaatgtgggtgggttttgtgttgtgagaacaagaaatcctttatgaagaggtttttacaccttgccaagtacatggaaaattatgcaatttggccacgttgcaggatggagtggagccctctgtgctcacggcaagaccagcagtggagcgtagggtttgagcactctgtgaattctcgtcatgaccacagtagagaaaggacacagaaaaggggcgaaagagacagtaaaatggaaaggcacactgtgaacaggcgtttacactggaaggcctttgttttatagctgaaaacgaaatctactggccaagttcaatttaaattttagctggaggctttgcagaagacctgttgcagcagcgatagtgcaacatcattaacaaaaaaagaacaaaattggagaggaaaactatggaatagccaggaagcagactgaatgtcagcctcaatgaggccagaagaagcctcaacgaggccacagcagcacagagcaggggcaggcgggcacacagtgtggctcgtgcctggatcccccgctgggaacctggtgcccgttggctggtgcactgggccctgaccccctgagccgacagagtccaggtgagcacagcacgtctgtttccaggtgggaaaccctctgcctggctgccgccgtgacccagtagatctgagatcacaaccattacagctttctgggtgatgagggggacattcacactgcagaagagtaaggacatcccagcaaggtcatcctgcagccaagacccaggtcagttctggagaagctgaaggcgtgggaaaacccgccagccttgggaggctccccaggccccagagtgaccccgttcttggagcactggtcctttgtccccacagtgagagggtggaccccatcaccttccacagctgtgctgacacctgcccacccacccctcagccagagtcacttaggtggccaaggaaaaagtaacttcagatcccaaagtgtttcttccaggcccggaaggtgcaggaagcggccagccactgattgcccggctggcacctgcagcaatgatgctattctcactcagccgatttgtgagcagatttttctgattctttgattcttctttgtgagatttaaggaaagcctatgtgacagtgccactatcacctctccaaattcttgctgtctcctcatgtcaacatggagtgtgcagtgctaagatgtcttccacggctgggctttgcctccatatctgtgggcaggagatctgagccagtgccagatgtggacaaaactcaagtcagagcccagaggacggccctactgtcaatcagaccaggggtgccctgaccacaccctcttcccagaggacgaccctgctgtgatacagaccggggtgctctgaccctctggcaggctcaaggccggcctcattgcgggctgaccttccttcctcgtgtcctgcagctgcgtcccttacccttaccccaaataaaccaccttccctccatcctgacccgaggccctctcctttcccaggacaatggaggccggcaggtgagctctgacaggtgtgtttaacaaccatgggtgcaacagaggcggctttccctgctccctttcccgaggtgcagctggattcagagcttcccacctgcttgtgaccagcgtgcattctcgacatacacgcttcagaccaaatgtctgcttgttcacctgtgcgggctttgtgtgggctgctctgtgctatgcgggctgctctgtgcgggctgctctgtgctgtgtgggctgctctgctctgtgcgggctgctgtgtgctgtgcgggctgctctgtgcttgggaaaatgaaggttggcatgatttcctgcggcaatgccctcccgttttatgccttaataagggctagaaagaaaacattttcctcgagctgcatgcgaatatcgcccaaagtgcagctccccgcggaggccccgtgcacccttccaactgtgatgcgacagagatgggggaaaatgagttaaagtatgaggataatcggtaaagtgacacaaaaaggttgcaaatggcctcacttgaagcgtttgtattttaaaggtctcaggcaatgacagcgcatggaagttggctgggtagtttattctagacacgtgtgtttgtgactcagcctttcacgtgctgggttttaggagtcattattcatctgaagtagcagaaaagggatggcgtttcccccacgccggccagtcccttcccggtttttcatccgagcacttgctgtgggaggaacatttgatcccagcggtcgtggcgtcaggccgcctgctcactggagggaggatttccattagaaaatttcaaattcaaagttggaggcagctgcaccgagagtgtgagagataatgtcacccagacgtggcccctgaaagtaactcttgcatcgtgccttccttttttggaaaagggcactaccgtatgtgcttaaatggtgaattggacaggaagtgattcaaattcatttttttctccttcagatcatttaggcaaattaatatccaatagcacatatttcttgtccttctttatattctcactaaaagcaaagcaaggtagagacatcctggaatgctgtaatcttctctggggtaaaagcaattatggaaactggtattatcaggaaaaaagctctactaggtagtaagcctagaattccacttggaggttcagtaagtcagctcttgatatggctgggaaaggatgggaaaacttgctctctttcgtatattggaacttaagtttttaaatttcctctttccttttcttattttcctggtctgcccccaccaatgcccaccaagtgaatttgctaatgccatgtgtcacctcgcttaataatgaggattttgtcagaatacttacacacgcagctttctgggacaccatcccaaggtggggtggacccagcgactgtgagagtccattttcatgaagaatcctgaaaagagcctgccctgagaatcacgagatgggattttgtcttcggtcgtatgatcagctagccaggaagttacttaattttactagtctctgcttcctcctgtgaatccccaggataggcactctgtgaggaaaggggttcccaagccagcctttccccgcagctcagccccaaagcacgggacagagcctttgcatggcaggcgctcactaaagattccttgagtgaatgaaagggggcaaaattcacatccctatcagtcccacatcactctgaaataggccttcttagtggggaggtaaaaagaatttaagcatagaaagacagatgagacaaaacaggcgatatttgttactttgtacgtgagaggccaacccgttagaaaagcaagtgctccagcagcgagagcgatggatccgaaactccccgatcagatcagaagatactgtgttggccgcatgagcttcggtctcagccctctaagtagaagcagtgaagtcagaaaaagtgaactcagagctgatccactctaccacgttctcatgccagaaccccctggatgacctgttcaattcccacacaagcgatgacttctagagtttccaggtgaatgctcccaatttcccttcacaactgtacctgtttgccttggaatgcgtctgcttcatctgtggaaacgtagcctgtgaggacggagctctgcactccaagctcctggaaacaataacgtccctggacctccccaaggggtgtcagatggagccttccatgtaacatctgcatgtagtgttgtcatacgcctgcatttcgtgtaatgtctgcatgtggtgtggtcatatgcctgcattccgtgtaacatctgcacatggtattgtcatacacatgcattccgtgtaacatgtgcatgtggtattgccatatgcaagtattccgtgtaaagtctgtacacaaagtggtcatacgcattcattccgtgtaatgtctgcatgtgatattgtcatacgcatgcattccttgtaatgtctgcatgtggtgtggtcatacgcctatattccatgtaatgtctgcatgtggtgtggtcatatgcatgcattccatgtaacgtctgcctgtggtgtggtcatacacatgcattccatgtaacatctgcatgtggtattgtcatatgcatgtattccatgtaacatctgtatatggtgtggtcatacgcatgcattccacgtaacgtctgcatgtggtgtggtcatatgcctgcattccatgtaacgtctgcacatggtatggtcatacacacgcattctgtgtaatgtgtgcatgtggtattgccatatgcatgtattccatgtaacgtctgtacacggtgtggtcatacgcattcattccgtgtaatgtctgcatgtgatattgtcatacgcatgcattccttataacgtctgcatgtggtgtggtcatacgcctatattccatgtaacgtctgcatgtggtgtggtcacatgcatgcattccatgtaacgtctgcatgtggtgtggtcatacacatgcattccatgtaacatctgcatgtggtattgtcatatgcatgtattccgtgtaacatctgtacatggtgtggtcatacacatgcattctgtgtaacgactgcaggtggtgtggtcatatgcatgcgtttgtgtagtgtctgtatgttggtattgtcatatgaatgcattctgtgtaacatccacatgtggtgtcatatgcttgcatcgtaggggcctacttttgtgtctgaggagctccctgaaggaccctgcagctgggccagcagagagccatcatccccggtgccctactgtggttcaggtggtgtggaacggaggtgtggtgctctctgtcagccccgggccctacctttgggtccgtttgacttctctgttgctgtgatgcccatattatcagaacatgaaaaagtcattccactcaggatttgggactggccatggcacagttagcaaaaccaatggcctgagggtttttcaccctgcatcatggatcttgtaactcttacctcccttcgccctgcatggatcttgtaactcttacctccctttgccctgcatggatcttgtaactcttacctccctctgattccttgaaacagtaaccatagagtattcaaataattgccatgtaggctgccttctgccaactggaaatgtcttttcagaagctcacacaccctgggcaaatcctttcctctagaatgagtcccttgctgtccctacctgggaattccacttcagaagaggctctactgagcacttgggaaaagctcgcattggcatatttgctagtgttttccataaaaccaaaacgtttaagtagaataaatatccaacaaaaactaaattaagtgtatccatacacaggagcatatgcggttttaacttggtagcacatttgcttacagattttcatataatacattgttaggttaaaaatccagtttctgactgaaccatatgcatcatatgaccctgtttttgtaataaaactgtatttatatttacagtttgcaaatgtctatgtatgtatgtgtataaaaatatatctggaaggacacaaatcaaaattgaagaagcacttatatctggctggtggggttatgagtgacttttcactttcatttttaatatctgtctgaattctctagacttttaccatggccatactttatattttttaaaacacacacatgaaaagctaaacttagggaagaaagaacaatgagtcagactttcccatctgacatctgatgataactaaatcatttaggccaattaattaatagatgtagggaacatttgctaatcaccaaacttgcattactttttgacatttcaatacaaagtggcaagaaccacattgcttagtttgtctgctgtttggccaaaatggctagactaaaaatctgagttaaggtcattctgtgtgcatttttggctaatatgtatcacctcctatgataagaaaattatggaaaaattacttcacacatttcctgggtggtgggcactgaggcttctcagagaacactattttctacacatgttgatatcaaatgatatttgaatatttactacatatgtagcattgagatgcaagcttttcagatggttcctggacctttttcatttctgagaataagacctcgatttacgcagaaatgtttaatttgacagaatacatttcagaaacgtcaaatgggttagtctaggtccagccccactgtcatcctgaagttttcttctttgagttcaggatcacttggaatagaccctgaggctgcccttcagggactcggaattaatactcccatgtgctcagcaagtacaggcggcccggagtcgggtgaggtggctgtaaaaactctgtattagtcgtagaaactgcatgtttaaaagctgccacaagttctgtttatgacgggcatggcattactcccccaaccatagatgagttgggtcccaggcatctcgggtgacaatagaatgtagtggttaaaagcaagtctttgaagcccaatggactcaggtgtggattcggactcagctcctaaccacctgtactgtcttagacatttaaaacctcgcttcagtcttttatatacatattccctatgtaaaccaaaaataacattctaaggccccctaagcttctgaatgcacttcctccccagccagggctcttttaaaatttaacctgagagactgtttgaggcaatgttgggaagtcggggtcagacatgcctcatgatgcctctccggcattaacagcaacacagaccttaagtctgataagaaacatttacagcctcttctctctgaagcctgctacctggaggcttcatctgcatgataaaacttcgatctccaccaactcttattgcaacccagatgtttctttctgttgattccaggactttggacaaattcaaccaattgtcaaacagaaaatgcttaaatctatctataagctggaaggggcacccccccatccaccccccactacccccaaccccttccctgcttcaagtttttccacctttctggaccaaatcaatgtatttcttaaatgtatttgattgaagtctcatagctccctagaatatataaaaccaagctgcgccccgaccaccttggacacatgttctcaggatctcctgagggctgtgtcgtgggccgggtcacccatatttggctcggaataaatctcttcaaatattttacagagttggactcttttcattgacacttagttaaacatgtctactccacaagattgttacgaaaaatgaaaggaatttctgataaccacacaattgtcaggagcaagggaaacattctgtgaatggtaatcatcattattttagtgttgagaccctgcctttgtgatattgtcagagttgctaaaatacatggctacctctcagttctcagagagcctcacgtttgaagtagctgctagtaacagaggttgtcttcatataaccagatagacagggatcagagacaattgatctctggcctcacaaactataggaatctgagagaaaaagccacaggacactgcctctaagagggggaggtggaaggcaggaaaattcgctgtggggtgtctgatgcctgagagtcagagggcagtaaaacaaagggtggctgaaggcctttcctgcaaaccagaaaccagtgtccccagctagccatggtgtaaaccccgactcccaggaaggtccaggcccagatgccaccttctgtctgtgatgaggacgaggacaacgtctccacttttgcatgttccagctccttctgtcactcagtgtgtgtgtcaggtggtccagtatgtactagggactcttacagacacatgccaaccctacacatgtccctcttctcagcaatcattcctctccttcttcctttgcccgtttatacgttagttattgaactcgtggatcttagccccatttttcagtagcctctaaagactgttgcacttctacttctcagaatacttccgaggtcctcagaggacagcgtgcctgcagctcaggccaggccccttcatgctgggctccaagctcaccatggctcctaaccagacaccttgtttgtgccgctccagtccccatggcaggagcgactcctctctctcaccagtgcgaggatcacaatgttattgcttataaagcccttaagctctctttcaggtgagtttcaaatcgttatctccttacacccagcagacagatgtgagtccgctgcttggtgacatcatccttttgttagaagagcaccgactcacgtttctatagcaaatcgataacactatgtgacaaatccaaaatcgacaatggctatttcttagctttaggttttatttttcttcagagagaaacaagtatggcaaatatctgtgaatttctgtttaatctgatgacaaattaattaataatgataacaaatggttatctacttagatatgtaacgtaggcagtggaagtaatattttatccgaacattagaaccaagattttgtgtaagtgcaagaggacatagtctccaccccactgtgttacagatcaggaagttggaggtggctcggttacagggttaagttacatgcacgtcacgcagccctgagctggggaaaccaagaacaaagcccctatgcttgctgggccatcccaccccctcacattagatttgcttaaagaacctgccagaggcttcgtctggaatagcacctcggtctcattcatctctatcacgagtttctgcattttgaccatgagcctgttccaacatttcagattctccactcatcattaaaataactttattccaaccttgcagcttccaaattaatactgactctttccttatcagaaacaagcaatgatttagagtatcactgaaataaaatcaaaatgttttaccttgaggcttaattctctctaaaatctagtcagatgctccccatcccagtttcaccattatatcagcacaaatcttgaacatttcattttctaatctgtcatccttttaatctcctattttataaatgctcttttctgtataaatggcctgcatattataaacagtattgaatagcttgtttctttctctaatcaacctgatctgtctactcaatatccacccatgcatccatccatccatccatccatctactcattcattcacctattcattttttaattaagcatttcattaatttattcagcacttactatattctagacagtatcctggggatatgaagatagatagatagatagatagatagatagatagatagatagattagagagagagagaatagatgataggtagataattctttgtcactatctttaaggtacacaaaattttgtaggagagtctgagacatacaaacttcttataatacaatgaatgtatttggtgcaatagagcaaaaatagggtcaggactttatgactactaagcctcacaggtgttttgatgcctatggaatcaccacatataagtcccactaattcagtcgccatttgtgactaacgtgtccaatactcagtaggaaagatataaaagaaaataattagagttccttaatatctctttggtccaccagcaggcatccatgtttgtgatcttctgggcaattttcagacctgctggcatcacaagttcctccaaccagacttggataatgggtcaatcagcaagaagcacttttcctgagcccaagttctaaaacctccacagcaacagccctaatgaaaaatgtagtatctcccacttctcctttctattgcctttttgtttggttttcacaggaatctatttctgagtgtttgctgtaggcagacactttcctcatctccacctttgattacgagaacagcacagcccggtggctgcccggggggaggtggtaggcagggtcagagtgcacacgcgcgtgtgttcatgtgtgctgtgtacaggtgctgtgagggtccaggaactgctggctatcacagtgagcggtgacacaaaggcctgtaattctatgttgagaataatatttccagcctagaactagcagtctggctggaatgaaatacacagaaaatagtcaggatagtccaatctatgtctgagcctccagatttaaagatagtttatatccacaaatacatactgctatgtctttttacctttccattttcacagctagctgccaatttaagtaagcatccttgctttagttaagggctttagtaataaaataataataataacttcacgaacaggaagagattctataaatcctgagtttcatgccaggaaaccaccccagaaaacactttttgtactaatagctgtaaaaaaaggtcaggtacctgacttaaataattgctttcctttttgtatgtttgggggaggaggaatttctggttctacttgtaacacgtgcatatgaggttacacaaagatttctttcctggaaaactggaaataagcataatcaaaactgtaaaatgatcaaatactggtgcaattattttcttcaggaatctcacgatttcatctgcgggagtggatctgaaatctaaaatctgaaaacatttatttcactttatgattctttttattccacattcttctctaattttttccttgactgaaacattggtatctctgtttctcatggtctctcttcgcctcagccgtgcagttctgtgggtatctagggggccttttcagttcaaagtacatcagcagcccgacgctggtggtccacgttttcctgtcggctctgtgggttgcatctgtgtcctgttacctcggaggggttgtatgtgcgtcctgagaggaagacagcctgggaagacagggtggcttgcagaagacgcccaccatttgcacagagctagccgaggcagctggcctgaacatgtgtgcatgcgtgtgcgtgcatgtatgggtgtgtatgtgtatgctcatgtgcttgtgtgtttatgtgtgtgtatgtgcgtatgtgagcatgtacgtgtgtgcgcatgtgtatgttcatgtgcttgtgtgtgtgcgcgtgtctgcgtgcgtttatgtgcgtgtatgtgcatgtgtgtgagcgtgtatgctcatgtgcacgtgtgtctgtgtgtgagcacgtatgggtgtgtgtgcgtgtgtgcttatgtgcgtgtgtgcatgcatatatgtgcatgtgcatgtatgcacgtgtttgtgtatgtgtgtatgcgtgcatgtgcatctgtgttgaggggctgttgctcaggaagcgagggacagggcatgtcctaggtagagacagctttctggggaaagccttgttctaaggcagcagggcggtcttgcacttgcgcggctgctcctgggatttggaaaggacacaggtgggaagttggagagatggcctggggcaggtggggtaggtggggcaggtggggcagatggggcaggtggtgcagatggggcagtcattaacgagcatgcctggaaccccatccctagtcttgtagaggaggcaaggagctgtccaactgtctcttaagagtggcacagtcagtgctatggtttggaggtttgtcccctccagatctcatgttgaaacgtgatccccagtgttggaggtggggcctggtgggggatgctggggtcaggggtggatccctcacgattatcttggtgctgtcctcctggttatgaatgagttcttgctctgtgtgttgcagtgagagctgattggtaggaagagcctggcccctcccaccgcctctcccaccacgtgatctctgcacaggccgctcccctccccatcggccacgagtgaagcttcctggggcctcaccagatgcagatgctggtgccacgcttcctgtacagcctgcagagccatggctgcacaaacctttcttcctcataaatcacccagcctcgggtgttcctttctagcaacacacacggactgagccggatgacatgaagcagctgttcccgcctcctcctggcacctccctgactcacgcacttggtgcgtggaggggtcgtgagcgggcacaggcagccacttcgctgcttgcctcatcagcctcacagttccccacaggtgagtcctggcatagaaacatcccctgcatcttaatttgcatttgttaataattatgtgaaatagagaaaataacttatttgtgcacagctctgacttccaaacgaaaccactccagctttttggaagcttccgcatttggggatgatattaaccaagtgaccacagacgagagaggcactgcccttctctttaacccagaaactggtcaggagcctgaggagaatgacaaagggaaagaattcttacaggaacttctccctccgcttccctcagtttaaaactacagtgctcgccacagaatctcacttccaattccttgtggagaactgcttcttgtacttatcgcatcctcatttacgatatgactctgctagtattttaaatacatgtctagcgttccttatagagacattctcatccccacatagatcggtggttatgagggagttttctttcctatgcctaggattctgttttgatgatttttacggggtttgcttacagtagtaactcagcaaactgcctgatgatatttaaaaacttcttcctccttgattttcattttaaatcaagcaaacacaataatccacaaaaactaaattaaaatcaatgcccttaacatgactggcaagaagaatgctgtttctgttgtaagaagacttgctatacataacaggatgattagaaagacttgctgtaaaaagacttgatatacataacaggatgatatacataacaggatgattagaaagttaaaaatataatattgtgagatgctatttggtttggtaagacgggggtcagatagtctatcagaataattttcttccgtttgatcacacatctcatcagaggagcaggagagccgtccagcgtgagatatttgaaggggtgttggcaagaacatcagatggacgacaggggagaggggcccagctgcacggggagaagccgatgagggatgggtctttgctgtcatcaacattcataaatttatcattctggatgcacaaattaaaattattcactaagcaagaatgccattgaactgaacgttataaaaatcctggagtaagtagaaaaatgccaggctgatatatctgtgcagtaagaggcatataattctgcctccatcaataacagcccccacactttatggactcccctcttggaggtggctgtgaataacccgaatgcatgtgcagcctctcgacaaactcgtgtccgcggctgtgggctacgttctcgccaatggctgtgtcttcggccaacacacctgagcttactgcattaatgttactgtgcgatacagcagctccgcgcctcctgtgagtgcccgtgttcacttcctaaactgctggtctacccagatttttaaagggacatatcaaatactgttcctccatttctggttcctttcaagctgcgttggtatcgatgtttggaacccctggccacatttcatatttatgtaactgatctgacagtgcacgtgaatctatgagcagttacttattgagtccctgctgtatgtgaggctctcaggaaggacttatggatgcgccaaagtactgctgatgataatggtgtgaggaacacacttttactcctgttttatagaggtaaaccgtggtatagaatttcacgttacttgtctgaggtctttggtcatcccagcagcgcccggtgtgagccctctcaagttctccatggttttcccatcacccacacccctcctgtcatgctggttgatggcactcttgcccgttgggtgagaaagccctttcctggacaggtgatgccctttgtagtgaaaacagttagatgctgtcatgtttggtcagaagctgaaccacagattttagaatgaggcaatgatggcctgagagggaagtggattctgttgacaccagcagaatgtgtggaattgggattttgaaagtgtatttacccagtggcatgtggtcccaagcgggatctgccctctatgagctccagactggactcgtcctgcccctgtggtctgtcccttcctaggttcccacggttctctctttccccacaatgtagctttgctttggactagtttttgggacaagatgttgcttgtgaggtgggtctgactgcaggagccaagcagcaccaccccaacaaatcctccaatcagtccacccaccatgcccaacaccaatcctccaatcagtccacgcaccatccccaacacaaatcctccaatcagtccacgcaccatccccaacacaaatcctccaatcagtccacgcaccatgcccaacaccaatcctccaatcagtccacgcaccatccccaacacaaatcctccaatcagtccacgcaccatgcccaacaccaatcctccaatcagtccatgcaccatccccaacacaaatcctccaataagtccatgcaccatccccaacacaaatcctccaatcagtccatgcaccatgcccaacactgcgagtcccccacagattgagggggaagattagggaaggcgaggacctgagaaatctgactccctggggtcatcagcacccacgagacatctgcctgaatccgcccctgcacagtagctatggccatccttggccctgggccccacacccttccactcttccgatgcaacgtcacctctcctgtgaccccttccatagttttcccctcaccgacacccttatcaccagattctaaacattttcaaatctcccccatttaaaaaatagcccttgttggagcccctctgcccctgcaactcagtagcttccacgggagggggaggcttccccaggagacagaatgatgtcagcagaaactattggttgtgagacttgcgggcagtgctgctgcatgtagagggcagagttcaggggcacgcgcagggcaaaggacagggtatctccaccaccagtgcatggctgggaagccgctctctgctcccctgtgactgcgggcacacgtccactgccccctgccaccacggacacccatccactgaaccctgccactgcagggacccattcactgcccctgccactgtgggcacccatccactgctcctgccactgtgggcacccgtcaactgtccctgtcaatgtgggcacctgtccactacctcatgccaccatgggcgcctatccactgcttctgccagtgctggtacctgtccactgcccctgccaatgcgggcacccacccactgctcctgccaccttgggcacccgtccactgcctcgtgcctttctcctctgctcacctgttgcccctgctatgggatgtggagcatgcagccgagttgcccgaccgaaacgcccctctcagagctcagtgagggtctccctcctggcacccaggtgaagggacattgttcagacctcatcctgcatggcctctgccccaaggcctcccacacccacaacattccctcctcctgaaacacttgcgtcctgggtttcctcatccagtttccaaacccagcacccgggccacagtcacttcgtcctcctttctccagcctgccaggtcctcgtgagtgcgtctcactgaattctctctctgcacggccactgcttcagccagggtcacgtggcctctgtgggagccacaggacgagactccttgcggcctgctcttcatgcggagcctgagtgggcttttctgttcatcagcctcgtccgcccctgcgcccaaagccctccatgcacaccgaccgcttgtcggtttctagacaagatccgtttagaaacagtatgtgggcaccccatactctccaaactcctctcaagtcatggcccacactctccctgctcacggcatctctgggttctctctccagctcactgaacttgtttcgcatgtatgcctttgccttgaggcttgctccccttcaactctggaaacccacttgtcactcagcactcaggtctcagcactcagcactcaggtctcagcactcagcacccagcactcaggtctcagcactcagcactcaggtctcagcactcagcacccagcactcaggtctcagtactcagcacgcaggtctcagcactcagcactcaggtcagtcgttgcttcttcggcaaggtcggccctgagcatttctgcctcccattaggttagatcctcgaatgaggcttttggacaagccctgcgccatgatagctggcgatccacagcctaccatgtgctccaggatgtcctgcccgtgggccacccataggttcgctgagtgcctccccctctactatgtcccacgcaggcagtgggcagagtaaccacggaatgatctagtaaattagtgagtggccgaacaggtcttgcctttttgggagtgcaggatcatttcacaagtcgatcccatcaggacaaagcgagtgtgcaggctgctgcatgccaagggctcctcctccaggcagcccttcgcgagaggcatggccaattctccaaagattcaaatctttctgggcctctggctgttgacagttccttaattaaaaatcctccttccagcccccaaatggataccaatctacaatattccacaccaactgcagctcagtcaagcattttactcattgcagtgataactgtgcaggctgatcattgttacagccacacagtaatagtgctctagagactgggtgcggtggctcacgcctgtaatcctagcactttgggaggccgagtgggtggatcacaaggtttggagtttgagaccatcctggccaacatgatgaaaccctgactctactaaaaatacaaaaattagctggatgtggtgtcaaatgcctgtaatcctagctactcgggaggctgaggcaggagaatcacttgaaccccggaggcggaggttgcagtaagctgagattgtgccactgcactccagcctgggtgacagagcgagacttcatctcaaaaaaaaagaaaaaaaaaatagtgccctagaattccagctttcctcctaacaacacacgtggtccacatccggtgtctgattcccatccccactggaagttcctccggcattctgtgtattttctgtgtgttgttttcaaaaaaacaccatccggtattgtaggctgcaaacttacatcaaatagtttcctgcctgtgatttgaatcagagcaaaacatccctgggcacccaggcactgtccccgaagaggtaattattggtgctcccactgcgtgctgcctgcaggtgttttcctgtatcagcccgcaccattccctgaagacagacggttctgtgatgctttctggatggcgttttcctgtatcagcccgcaccattccctgaagacagaccgttctgtgatgctttcccccttgaagacataatgtctatctctaattcccacactgattttctttcttttaagaaaccaacaaaaccagcaccaaaaacagctgttgaccctcatcatctgaaagcgtgggaaccaactttcccccgtgatctcccgctctgatcttcatgacacctggctccccgtgtctgttcatggggccttcggtgtgggctcctgtttgtggagcctcagtggcccgtccctgtgtccttctgctgtgggcctgtagctgggaaattcaccccctggcattgaccaggggaaggtgcgattccctgtggagttgggaagtggctctcaggggtcaggcattgggtgctgccccagtgcatgttatgggcagctgtccactgcgtgcagggccagtgagacaccaagaggtcatcacgggcctcttctcatctcagtgccagccgtgatgatcagaaacatttctttagggggatgtgaccgctggctatggcgccgggactcttctcccagtgggtcaatcgcaccttcactctgggcaggtgagggcacaggcaggagcctgaatgtgcaggtgcccgcaggcgaggtggagaatgggcgcttctccaggaacttaaatcttgataatgaggcccatctgaacccctcaggctgccccaggagcctcgcctcacctgcgggcatccagcggtgtctgtaatgaccctgccctgaaatgaaggggaggaaccgcatcctgtgtgttactccaggggaaggacagggtaggggccggcctccaccctcctcgaagcaaactctcattagatgttcctactgggccctggagagtaacgagccagctgattactgtctctagtgtaaacatcacctttttttttttttttctgagatggagcctcgctccattgcccaggctggagtgcagtggggtgatctcggctcactgcaacctctgcctccctggttcgagcgattctcctgactcagcctcccgagtagctgggactacaggcgtgcgccaccatgcctggctcattctttttttttttttgtatttttagtagagatggggtttcactatgttggccaggctggtctcaaactcctgacctcgtgatctgcctgccttggcctcccaaagtcctgggattacaggagtgagccactaccaccttttaatcacgaccaaacatcaccttttaatcacaatcctgagaggtgtgaccctggcattgccacgtgcgagtccccctaggaaaccaaggctacgctgggagcactgtggggctgtttagggactcaaggccatgccacgtcctgactctgcgatgcctcccaagggtgagcagtgggttcttgcctttgccacaaaagatgctgcccttgggaataccaggatgagttaatgatttctgagcatatttcctaaactatgttccaaagagcaccacagctagaggtttgaaaggaatttaggaaagatcttacgcatattccatttcctcctcggagtaacatcagcgtatgaaatgcccagacaagtcctgtgcggaagagaagcacccaccctccccctctgtcagcggacgggaccctcatggccccaagggaggctagtccacgttcaccacacacgcattcctagaagtggtttttaacgtaatcatttaggaatatttttgtaaataattttctgattatcaaaaccataattacaggattttaattattttatggatatgcaggttgaagagactgggttttgatgactttgatgggggagggagggagggagagagagagagagagagagattgatttagtttctgaggagacaaacactagggttaagaaggattagaaggcgattttcctgcattgaaatagtttttttttttttttttgagaaggagtttcactttgtcgcccaggctggagtgtaagggcatgatcttggctcactgaaacctctgtctcccgggttcaaccgattctcctgcctcagcctcccaagtagctgggattataggcacccaccaccatgcctggctaatttttgtatttttaatagagacgggggcttcaccgtgttggccaggcttgtcttgacctcctgacctcaggtgatccacccaacttagcctcccaaagtgctgggattacaggcatgagccaccgctcccggcctcttgcactgaagtccaaaggccagaagaacccggaggctttcggcgtttccgcctttgccttccgatgtccattcccatctgagcagtcatttctgcttaattccgccattacttcctcccttgatgcttctgaaactgtctcctcagcagatgatccctgcattagttggcggagctgatggtgttccctgttttaccctgtggtctcatttccggatgctgctaccaatgcccgtctctatggctccctgcccacgtgtgcagccccgtcactgagagggaagtggctggagaggtgtccagatcattgtgaatgaagtcatctgtgaaaccatgggagagagatttgatatctgcttccctttcaaatgaaaggaaaagagtggggtgagagagggcggcactccccagacaggccctgaccacaccctggccccacgcctcagcagaacaactctgaacctctatggactcacaggggcgaggtcggggcaaggagactcagggcctgcgctgctcaccgggtgagaagtcacagctggttaggaggccacaggtaagcagaggtgcgagccaccagggacggggtgagttattcacaggtgaatgagctaggacgaggcaacagcacgcaggccacgcctcgccaacccatgggtcctcaacaggattttggtgacacgcaacacccctctggctcctgctctgatccatgatggtgagggaggttcccacggtcacgcgtgtgctgggattctgctctttacgccgtccccgggcaacacagacatcagctcttctctcctccagctgagcaaatgtaagctgtccaggagaatccatcccagctgctaacaaaatcttcagacgagagtcagtctgattcggagtggaatgaaatgagcattcggcaatacctccgtgtgccagtgcagctgagttctcggtaaacacaatattccgaggtgatactgagctctgcgtcctcagattaaatgtatctccttcttagatttgctcgtgcactttacggcttctgcaaatgacagcctcggcgctgcaaagtaattccacactgtcatatttgtctttggaaattgtaacaaattatggtgatttataacatcaaactcaactcccatttttccccagacggcaatgtcgctgatggcgagattccgggccatccatttatcctgtgtggaggctgacagggacgcatgcctcatctgctgccaagacactgggttcccttgaggggactctgtcgacataactcaccctgtcccgggtggctcgcacctctgcttacctgtggcctcctaaccagctgtgacttctcacctggtgagcagtgcaggccctgagttcccttgccccgacctcgcccctgtgagtccatagaagttcagagttgttctgctgaggcgtgggggccagggtgtggtcagggcctgtctggggagtgccgccctctctcgtcccagtcttttcctttcatttgaaagggaggcagacatcaaatctctctcccatggtttcacagatgacttggaatcctggccttttaggatagaaagagaacacagagatcccggcccatcaagcaggccccagaaacatgggcagcagcaggagagtgcccaagctcctggcagggtgggtccaaccctgtgtcgtgcccctgattcaggcgttgaagcctcaactccagatgctggcatgaggaggtggttcctggggaggtgatttgggttagatggggtcctgagggtgaggccctcacgattagaagagaaagagaccgggctcttgctctctgccacacgaggacacagaaagcgccatctacaagccaggaaggggccttcatggcaatcctagtgggctggatcttggtctttggtttccagccttgagaactgagaaataaacatttattgtttaaactaaaccaccaaatctatggtattttgtgatagcagctgagtgggctaagacaccttcctcccagcacagtgtcacccaaaaaccttgaggcttctccatcagcaacggactgggaaggcaggtctgcacctgcgtctccacgttccacttcacatgtggcatctggcaccggacggtggccgcctcctttcagattactcacggctctagaatctagcttatatgtttattttctgaatgttgtaactaggactctggctctagacaggcaaaatgttcccaagaaaaatgagaaaataaaaattgctctttttcaatggggaaattgttccctatctaataaatggtgctgggaaaactggccagccgcaagcagaaaactgaaattggactccttccttttacttatacaaaaattaacttaagatggattaaagacttaaatgtaaaaccccaaaccataaaaaccctagaagaaaacctaggcaatgccattcaggacatagtcatgggcaaagacttcatgacgaaaatgccaaaagcaattgcaacaaaagccaaaattgataaatgggattgaattaaactaaagagcttctgcacagcaaaagaaactatcctcagagtgaacagacagcctacagaatgggagaaaaattttgcaagctacccatctgacaaaggtctaatatccagcctctataaggaacttaaacaaatttacaagaaaaaaacaaacaaccccgtcaaaaagtcggccaaggatatgaacagacacttctcaaaagaagacatttatgaggccaacaaacatatgaaaaaagctcaccatcactggtcattagagaaatgcaaatcaaaaccacactgagatgccatctcatgccagtcagaatggcaatgattaaaaagtcaagaaacaataaatgccagtgaggatgtggagaaattggaacacttttacactgttggtgggaatgtaaattagttcaacaattgcagaagacagtgcaacaattcctcaaggatcaagaaccacaaataccatttggcccagcaatcccattactgggtatatacccaaaggattataaattattctactataaagacacatgcacacgtatgtttattgcagcactgttcacaatagcaaagacttagaaccaacccaaatgcccatcaatgatagactgaacaaagaaaacatggcatatatacagcatggaatactatgcagccataaaaaggaaggagctcatgtcctttgcagggagatggatgaagctggaaaccatcatcctcagcaaactaacacaggaacagaaaaccaaacacagcatgttctcactcaaaagtgggagttgaacaatgagaacacatggacacagggaggggaacatcacacaccgggacctgtcagggggtgaggggtgaggggagggacagcattaggacaaatacctaatgcatgccggtcttaaaacctagatgacaggtcgacaggtgcagcaaacccccatggcacatgtatacctatgtaacaaacctgcacgttctgcacatgtatcctggaacttagagtaaaaaagaaaaagaattgctttttttaaaaaattgaaagttcagaactgcaagcagtagctcctcctagagcaaggtggtgaagggctcaagttggagtgcttctgagacacacacagatgacacagaggcctgggggatctcctttagaggctggatgtactgagcacctgcctgcctcccttcccttccctgtcagggccaatgccgtgttcttgcatgtgtccagagagcctggcagtctctccagtgcctgcgtttgtggctgtggctgcaggggtcgcagacctctgggaaggagggagcccgtgggtctgtgccggctggtgggtgtcccacaggggtcttgatctgggactggccagactgcgaagccccttccagagcacaagccggaggggtctcctctgatccctccttcaccctctcctcaatttgcattagacacaggggatccaggagtgagacaggacatccccaagcatctggtagacgagagagaagtgggcagctgtggcagagcccagtgtgagttatctcagaggatcacgcggcccccagaggacatgctggacgcacacctgacccagacctgcgggaagagtgagaggcatggaggccacagggcacttggaggatgggcatcacgtggtggacggggagcgttctgcccatggacgtggcctgggtgagggtatagtaggctgaggccaggcatgccgaggggctcgaggtcctttagtgccactagaggacgtcacaacgtcggggccatgggagtcgaggacaggaactcagcagaaatcagggcaggagaagcctctgctgcccatgccgcctgaccctggctgctgccgcatgcagtggacactcagttccacccctagagggagagtgacaggctctgcctgcccagaagttcacactgcacggcatcccatccaccctcaccgaggcctctctgcagtcctgtgggtctcagagggtgcaggcgtcattctcacgacaggtgaggggtctcaggccagagagggcagagacctgcctggctccacacagcatgcacgtcggccctgggatgtgagtctctgcatcctacagccagagtttcctctaggagactgtagcggaggggaggcaaggccagagcgggtataacagaaactccaggggcagcactctgggttcaaagccggccttaggatgtagctgctctgggattatgcaccttacttaacatttcctgaatgccttgtctctcgtttatttattttttggttcagcagtgcaacagatgtgctacccacttgctagtgagcatgaaggggcctggagtccttctctgcctaagccttgcaggtgttaggcactcactccacagcggctggtgccattttctccatgccatggtctggtctgatgcaaacccatcgaccagtgctgtgtgcctggcttccaaggctacagaaaggggacattgggcctgttggtgttgaagtgcaagtaacctctccgggactaggctacctatggtggtctcatttctctcaaacaggaaatgaaacacaactggcaaggtagagggtacaccggaaattggggaggcccacccatggtgtttggaaccctgaagttgcccaggagagctagttattgccttcactttgcgagggaatttaaagcggcatgctcctgtttgacaattttgcttttatttacaggggctggatcaaacgtatattttatgtgataagtggaaagtgtcaaaatgagccacacataaagtggtgacaaaataattcacttcaatgaaattacataatgtaaaacaaaatcttagaaacagcccccgttaaatatgatttgcatgcaacataacattatacaatttttgacactctgcaaagaggtattgggtcggaagtagctatgtttagaaggcaatttgcagaatttctgttcttttagtggtttgaaagcagtgataattttttttttcttttggtggttgacaagtgaacaaaaaccaataattgaatagcaccattttacccagaaggcaagctgataattagaggtgtaagagacagtttggattttatctgaatcgtggcagctctgacttgtttttaaaatctgggaaccaaatcaaggccccgattctcaacaatataagaagaaaacaggattttatttgcagttgctcgttcttggctgacacatgtgttttggtccctaaagggcagcccgtgggtcctgagatgagcaagtccacatctgatttaggaaatgaagagtttctcggtggccaacgtggtcaggaggagaatgaaaataaactcagtctatgccaccgagggcacgtcaggcaacagcccccgccctcctggtctggctgcctcaaggaatgttccagggcacgtgagtctcacctgcggccttagaaggtagcaccccactcagacgcaatttgaaccccatgatcacagccgcccagaccccactcagacgtagttcagaccctggatcacagccgcccagaccccactcagacgtagttcagaccctggatcacagccgtccagaccccactcagatgtagttcagaccctggatccgtccagaccccactcagacgcagttcggaccctggatcacagccgtccagaccccactcagacgcagtttggaccctggatcacagccgtccagaccccactcagacgcagttcggactctggatccgtccagatcccactcagacgtagttcagaccctggatcacagccatccagaccccactcagatgtagttcagaccctggatcacagccatccagaccccactcagatgtagttcagaccctggatccgtccagaccccactcagacgtagttcagaccctggatcacagccgtccagaccccactcagatgtagttcagaccctggatccgtccagaccccactcagacgcagttcagaccctggatcacagccgtccagactccactcagactcagttcagaccctggatcacagccgtccagaccccactcagacgcagttcagaccctggatcacagccgcccagaccccactcagatgtagttcagaccctggatcacagccgtccagaccccactcagacgcagttcagaccctggatcacagccgtccagaccccactcacactcagttcagaccctggatcacagccgcccagaccccactcagacgcagttcagaccctggatcacagccgcccagaccccactcagacgcagttcagaccctggatcacagccgcccagaccccactcagacgcagttcagaccctggatcacagccgtccagaccccactcagacgcagttcggaccctggatcacagccgcccagaccccactcagacgcagttcagaccctggatccgtccagaccccactcagacgcagttcggaccctggatcacagccgtccagaccccactcagacgcagttcagaccctggatcacagccgtccagaccccactcagacgcagttcggaccctggatcacagccgtccagaccccactcagacgcagttcggaccctggatcacagccgcccagaccccactcagacgcagttcagaccctggatccgtccagaccccactcagacgcagttcggaccctggatcacagccgcccagaccccactcagacgcagttcagaccctggatccgtccagaccccactcagacgtagttcagaccctggatcacagccgtccagaccccactcagacgcagttcggaccctggatcacagccgcccagaccgcactcagatgtagttcagaccctggatcacagccgtccagaccccactcagacgcagttcagaccctggatcacagccgcccagaccgcactcagatgtagttcagaccctggatcacagccgtccagaccccactcagacgcagttcagaccctggatcacagccgtccagactccactcagacgtagttcagaccctggatcacagccgtccagaccccactcagactcagttcagaccctggatccgtccagaccccactcacactcagttcagaccctggatcacagccgcccagaccccactcagacgcagttcagaccctggatcacagccgtccagaccccactcagacgtagttcagaccctggatcacagccgcccagaccacactcagatatagttcagaccctggatcacagccgtccagaccccactcagacgcagttcagaccctggatcacagccgcccagaccgcactcagatgtagttcagaccctggatcacagccgtccagaccccactcagacgcagttcagaccctggatcacagccgtccagactccactcagactcagttcagaccctggatcacagccgtccagaccccactcagacgcagttcagaccctggatcacagccgcccagaccgcactcagatgtagttcagaccctggatcacagccgtccagaccccactcagacgcagttcagaccctggatcacagccgtccagaccccactcagacgcagttcggaccctggatcacagccgtccagaccccactcagacgcagttcggaccctggatcacagccgcccagaccccactcagacgcagttcagaccctggatcacagccgtccagaccccactcagacgcagttcggaccctggatcacagccgtccagaccccactcagacgcagttcggaccccggatcacagccgcccagaccccactcagacgcagttcagaccctggatcacagccgcccagaccccactcagacgcagttcagaccctggatcacagccgcccagaccccactcagatgtagttcagaccctggatcacagccgcccagaccccactcagatgtagttcagaccctggatcacagccgtccagaccccactcagacgcagttgggaccctggatcacagctgtccgtccgcccgagcagattcttgtccaggtgtttttccacttgcagctccgcgctgggcagcttcaggcctgttacagcgacggtgcggcttccctgcctgggttgttgggacggaagggattccaccctggggcggtgtggggtggcttccctgctctccctgctctctgcgttcccacggtgcaggatggcggcgttgagagccagaaacgaaaccctgagaagcagaagccgggcgtcctgcccgccctcctctaccaggcctcatctggagggctgcgccaggtccttccaacttcaaagagttgcctgtgaagggcgtcctccaggtgggtctgcagtgcagtcaaggcctcctgcaattaatatgctgggaacacattttaaatagctccctcctcccttgaatagcagacggggacaacaagcctgttattcagtattccatttttgatagctcattgtatctaaaaagagatcaattaaagctctcagaaagctctccagcttaattgaaggacaatttagacattgcagtaacggcagatctgccgtccattgccgcatttattcgggctgggagctattggcgtctcccacacaccctcgcagatgaagagatttcaactggaaaggaaacgctaccatcagaggaaagataaattgtcaccaacttcattcttcaacggataaagggagctttggaaataaaaaatagacccgaaccatgatgtggtggaattatctgtgcctgtgctctcctgagcagccgggcctgcgttccttcttcttccctgtgaaggggcagcgctgggcccgcttattagtgcaacagcaaagactcattaagtttacagcccgcccgtgacgtgaggcagctctggccagaaatctcaagttcatcccatcaagtcaattttgtctgtattttaagaacttatctcttgcaaaatgggaccttaacatgtttgtgatggtccacagatagctcttactgaaagcgagaatggcaggtgaccaaaaaaaaaaaaaaacaaacaaaaaaaaaaacacacaaaatggtgacctcagggacgtgatgaaagggcaatgatgacttcactgtgtgttttcctgaccgtggagtagagccgtcccaggcagactctctgggccctgctcaggacggtcatgaaaccccatgctcttgttatgtgaatattgaaagcaacgccagggtctgggagggcagtgggatgagcctggcctggggcaggtggcaccagggctgctgagtttccaggggcactggctggtgagtggccacagcccctcccgttggtcaccacctggtgggcagcagcatgaagcccccgggggtgcggagtgttgggctgtgtgccaccttcgggggctctgatgagcagctccactccttggcccagggcaggcttctcaggagcaggcttgggggtctgtggcttttcacacgggacgtggactagctgcttgcctgagagaccacccttctggattccagaggacccagccagagtcgtcacggcagggtctgcagggttggagaaggctctgttggggccgggcacagcaggtggtggcaggaggataatgccggggcctggacagggggtacaggggcgggaatggatgcacaggtacagaccctgctcttacgtctaggaggcgggtatagtcaatgcgatgtgtaatgtgtacatacagtgtgaaatgtatgtagcatgtaaagtacacataataaagtttatatgatttgtaaagtacaaatgctatgtcaagtgtacataccacataaagtctatataacatgtagggtgtatatgatatgtaaagagtatgtaatatgtcaagtaaacaaaatacgtatggtctatataattcaaagtgtctacattatatataaagtctacatattaggtaaagtctatataatatgtgaagtctataatagcaaagtatacacacacacacacacacacacacacacaatgtcccttgcagcaggaatgtggatggtccctgggaagtctggtaggcttggtgaactgacttttgctgagcacccagtaacaggagttgaaataccagctccatctctccacttgtctcacagctgctggccttggcattctgagcctctgtgtcatgcggtgccacttcattctgaagagtgtgtagcacagtgcagccatggctccatgcttcctaacgagtattgatcccactagggaatattttcagaaccagatacagtgggtgcaattcacaccagcatccttctctggaagactagctacatcttgcacttttcttccattttctatctttcttatgtttaaagatagttcaaaataattaaaatcagtgtgatctgaacatttgggggatgtttgtaacagtaaaccatagattctctgggatataagataaaggaaaacaagtagaacagaaatgagaatggatttccttgtacacaaagttagaagagagtttcagtgagctcccgcgggcagtgaccttgactgcgaattttgtctcttccctgactttttcctccccttcctccccttcccttaaggaagatggcctcggttagccaggaagggtcctcgtggagctctgggaatgctgtggccttagcagccaaggggtattacctgttcgtgggtgtgggcagccttggcagggatggcaaaggggcctatggtgactgtgctgcactccatgaaaagcaacaaggaagccccaaggtcagcagaggcagaagcgcagtgagggcgcacggggcatgtagtcagtgccctgcactctctagtgttgggagcagtcagcagaacggccagtgctagtgggcaggatgagggaggctgcagggagcacagatttcaaactgacccaacagtcccatagctttttgaaatgaacagagaaatggacccttctggtcttaaagcttgaaaattacatttgctttatctgagtttcttcctcaggaaatgacccttagtcctttaaaaaaaaaaagaaagcaccaaggagctgaaactcaccagatcactgcatcggaagagcaagacaccagccccttgcctgccttgactgcctttgtgaccacctgctgcctgttgactgatggctccccctaactctccctggttcctgttttcccacacatggttacatttcttccctgctacgtgaactcccgattttagtcggtccaggagatggatttgagactgagctctcctctcctctgcgtcagcagtactcgtggtcccagtgattggctttccgtgcagagagcagcaggatgtaggtcaaaaccctggtgtttcggcaacaggttcctgcacttacagaccggcctccacggggtgggaaggctctcccgtgcttccgttaccactgttgaccagctctaaaattaccacctgcaactcgcagtgaaaaattctgcctgtctgtcctgctcctgactttgaggagaaatggtgaggagatggggacacagcctggggacactgtggctctccaatcacaacactgccaccacaagtcactggagaaggggcagcaactctccgtgtcctgggtctcatctgagacaagagtgccaccctgtaccaggcatctcttgccccttaaggcagatgctaaagcctttgcagaaaggccacgtcccggctggaggatggtaatgatgtttaggagatcacagctgggcaaagggtgaaaacaacgctgggaggtcgaaaggctgcagaacccattacccatctcccgatagccattccgatggaaggccctgacaaacgactccctgcaaagccggataagccctctgcatccatcggctaatgccaggcaaggcgggaatgcgatgagggctggctggaggcagggctgccaggaagggagggtctgtgaagtgcgaacacactcactggttttggggaaagggtgaacaacccagtgagcactgcatgttaggaacaggtcagtaaacacagcctggcaggagcagacagaagccattcgtcgagagcgggacgcgggtgggaggccttggctacacagacacaggacctgaagataagatactgtggcctgtcggtcaccactctgtgtgcatagcagtgcaggtgacatcattacctttggggaaactgggagagatgctgcgcaggtgtatacactgtggggagggggagagaggctgtgcaagtctatgcactgtgttgggggcagaggctgcactggcgtatgcactgtggggagggggagagaggctgtgcaaatctatgtactgtgttgggggagagagaggctgtgcaggtgtatacactgtggggagggagagaggctgtgcaggtctatgtactgtgttggggggagaggctgcactggcgtatgcactatggggagggggagagaggctgtgcaagtctatgcactgtgttggggggagaggctgcactggcgtatgcactgtggggagggggagagaggctgtgcaagtctatgtactgtgttgtgggggagtggctgcactggtgtatacactgtggggagggggagagaggctgtgcaagtctatgcactgtgttgaggggagaggctgcactggcgtatgcactgtggggagggggagagaggctgtgcaagtctatgcactgtgttgggggcagaggctgcactggcgtatgcactgtggggagggggagagaggctgtgcaagtctacgcactgtgttggggggagaggctgcactggtgtatacactgtggggagggggcaagaggctgcacaggtgtatacactgtggggagggggagataggcattggtttgtcattgcaggactgatctgaaggccagagccaagactcagggcagggctgttgggaggcccctgacaggcctgggaaggccttgcctggtcacagtgttttgtgggcctgaggattcaggacacgtggtacttgcttgaccatatagtttattttaataatggaattatagagaatttctgttttccctctgggaggctggagtctgagctgctgtggtctgtcacacagacactgcctccctaagtgactgaccctcaataaaaaccttggacgccgaagctcaggtgaactttcccagctgaaccttggacccggaggctcaggtgagttttccagctggtgtcattgcacacattatcaccatcatttctgggggaactaagcccattcccgcaactcactgggcaaggatgtctggaggcaaatgcctggattctccttgttgtcacccaggctcccctcccttcgctggtgacaatttgtggactttcacaatgttaaacaatggctgctggtgcgccagccctacccagtgagtaccagtgagtacagagcctgaggggggtttcggggacccccggcatagccaaagaccccttcactgacatggtgaatacactgtgtaggtccagagacagtgatgacaaactaagtttcacagactttgaatttgggaaggccagtgagatatcgcagccaagataccccagaggcagtggagcagggtgaataaagtctcactagagggtcagatttggcaaatgcgtgggttgcagttgaagccacagatgtgaattgccgtccagtaagtgtagggggagtaaagatctaggataaggagagaaagagaaactggcactgacagaaagaaacaggaagagaaaaagctgacagaaactacatggaacctaccacactcaagggaggttggctaatggtgtcacgtgatgccaggacacctggcgagttaggaacctgggaagagttattttgtgacctgggctgacagttttattaaaagggacaagtgagtggccagagtgtgaggggccgaggcaggcctggcaggaatgagggtgggctgttaaggtgatctggctgggccacaggggcgggggagagaggcgttggtttgtcattgttcttgaattaagcatgttgagttgccaactacaagatgctaaaagagagggagaatctgaagacgtctgaggggaactgcagccgggtttcagtacagggtgggagcagaggctggcgtccggtacacggagttcgaaacactaggggggaatcactttagctggggggtcccctcctctctcactgaaaggtggagtggggtggggcgtggagctgggggggtcccctcctctcattgaaaggcggagtggggtgaggcatggagcagacatggctgagtgtgtaagttggaactcagcaggcaaacaagtttcctcaaaaaaattcgactgtctctgtttagcagggacacaaggcgctctttttgaaagccctgggagtggatggattgtgattcatctttgttatttgattattccaaaggtatatttgtgggagaaatgcaggaaggaaggagggagacgggaggagggtgcaggggtgagcagggtgcccggggttggtgtttccacccagtggcatggatttgtcctgattgtgctaagagaagacgctgcctccttttcttcctccgagacccacgcatggtcaaacagtttaaataagaggcgaacgcaatgcagagcacggcactgagagagctgcgtaagagagaacgcaatgcactcttcctcctcattgtcacagagttggccaaacccattgtccccatcctctagactccaaaaccgatgccctggaaaggcaggagatatcacagggtgcccagcgggacaacccgatccctgttcaagcgtgggaaccaccccagacccttccttccagccaactgcgatcccggagagacggcagccaggagagcctctcaccccctctcctgggtgctgggtctgcagcgtgagattagatggagctctctgtgcccatccaggaagccttgagtttctgttaatatgcaatacaagcttacaatagagggaatccctccaaaacacaacacaccatattgtttataagaggctaccagggactgaaaagtaaacacaaaaagacaaacaaagtcttccctacacccagcagggccaaagagatttttccctctttccaataagctctgagaaatggggtccctgctccccacaccacagcccacacctggaacccctccccgctgcaggctgcccggccacctgctccactgtactcggaaaacacacaactacattttgtttgttttcctctctgggcctctgatcgaatttttaagcacctccttgttgctttattctccctgaatttcctggaagtgctaacctcaaagtaccacggaaaatgccttcctagagtacctttggcctgacacggcgaacagcagctattttctgagaaagctcattctttggagagtctcagtgtaattgcactgattgtgctggctctggaaacctcagagccaccataggtctttgaaaaccaacgaatatgagtcaacacatttttgcagctaatgacgctctctagttgatgaaagccgatggcccacatggcccaatttaccacgatttactggagatataaatggcatgaacctcaggccccttcagggaggttgcagccacacagaccgacactggagaggttttagtgtaatgcagtctcatggctttggagtgaaaggaactgattttggaatttgttagggtcgtgggagctagaagagatttggagaccagtagatacctctgttgtacagacaagaaagccacaaccccgagtgcttagtcatttggcaagagtgaaggtgaagagatggtagatctagaatgcagagtctccgcctaacggtccccgcgcttcccaggccgccgtgcgagccctgtttgtgccgcaacaggaagaatggtgtggagttcggagactaaaggtgcactgtgcttttaaaataaaaaggacggcagaaaaggggctgttctgggctgtattcggccctgtcaaaattcacacgtggaaaccctgactcccaggacctcagaaggtgacagtgtttggagatggtgtccttacagagctgatgaagataaatgaagtcatatgactggaccctggtccaacctgcctggtgtccttataagaagaggagatgaggacacagacacacacagaaggaggaccctgtgaggacacagagagaagacgccatctgcaagccatggagaggcctcaggaggaaccaggcccctggacaccttgatctcgggtttccagcctctctgactgtgacaacgtgaatgtctattattgaagccacctgggctgtggtcttatgacagccccaggaaacttataggagccagctaaattattctccacttgcttaagagaggaaaacctgttgtccgggctgccacagtggtaaagtccttctcaccttcacccagacagtttctcaatgatccagaagatgcaaaagaggcaggctcgagcaggactgcactgccaggagcaggcctcacactttcccttcctgggcggctgtccctctgcccgcccttcctgccatccctctattgtagaactggtaaaacttccattattatttttaaagcaaaaataaaataattttaaggtctttcttccaatgacatctcacctggtaacccagaaatgaaacaagaaaacagagggagcacctgaggcgccagggcctgggattggctccaaaatccccttcctgcccctctggtggccgatgggccccaggtccagcgatggccaaatcgaaggtcctgccgggcttccggctctgaatgtctccgggacacaatgtaccaaatagacaggtgctctgagaagtgagggctgagctgggcttgtcagaatgtgctgggaaaggcagacagaatgggactgactggcctttatactgcagacatggagtcctggcctcaggaggggcagcgtggccaccccaggggggcggagtgaggtgagtgaggctgagcggctccaggtggcctcctgcgtggaggccaagccctcctcccgcatgtggcctgagcctcctccctcgcagccgatcacagaaccatacagtcccaatcctgccaccaagtcattatcaatcaggggttaaaggctgctcctggccactcccactccgagcaggtggctctgcagcccccaggatgcccatggggggagctggcctggggccaggagcctttcctttgcagctcatggactgcactccagggcagctgtggcctgtgccgtgtaagtggatacagcctcgggtttcactgcacgctccctcctctctggctagtttggggccctgtccttggggcattaggggcatgaaatgcctgcagacccacgggtgatgccttttagagagtgggtgaagagaagtgggaggcacagccccagtgctcaccccagggggccggagggagcaggatctgtgtgttcaccccacagtggctccagagaacatgggcggctgtcctgcctggcactcagtgaggggctgccaaggtcggcttcagggaacagtcaatcaacacatctactggggacaggaggagggagggaaggggagaagagggcgtgaagagcctttttctggcctggtcctgcccggcactcagcgaggggctgccaaggtcggcttcagggaacagtcaatcaacacatctattggcgacaggaggagggagggaaggggagaggagggagggaaggggagagaagggcttgaagagtggccctggagtcagagagcaccttcctctggcctggtcctgccggacactcacccctggcggaaatggaatggatccttgtggtcttggcaggtattttattggcctagattttctgtatgttttggtttttacctcctgtggaacggaacccttaattaattcgtttagtcactcattcagcaaatgtttgtcaggatctttgaggcagaaactgtatgtcacccccatggtctgtgcccagtcactgtgggaacatcctgggacatggggggagagcagtgtcacccgcagctccctgccggagaccctgccccattgctgggagcaccgcgtcctcgcagcccaggccagcaccatctctgaatgctaccagacaccaggtggctcataacattgggaaatgactgttttaatcgttaattaccaaaaaaatgtcactgtgctggtacaatatatgcggtgatttctgtcataaattgacatctgtaagtcataaattgcttagttttagctgcttttaatggctgaattttcccaagctacatggtgcacacattttggatcaagttcaaactcttctggcaccgggcgccttctgggaactggcatggacgaggcaggcagcggattctgacggcgtcagcagcgcgagaggcacccgacctctcactaaaacgtttggcctgctcccaggaagaggcttccatggaaagccagaagaccctttaatcagagaagattctagccggtctcaaaggaaggatgcagtttgcgccgtcgaaaatggaaatcaaaggaacgcgatgctctaacggactcgaggaggccggctccgtcttggcattgttcagaaacatcccggcttcttctctgtttgatttccaacaggttattcccagaggaaccacagtcctttctacccagaagcctaaaaatacatgcttttgagagcactgccagagtaggttaagaataaagaaggcgtttggagcgcaggcagaagacacttgtgctcttctaagcgcagcgaccgtggcaggaataacgagctacagaggccacacccgcacacgggaaacgcatttcccatcgccccaaacacaaaccctgcacctctggcctgtaaaggaagtccaggctcacttagaaccggtagaattctaaaattacacaaatcagcagaggaggcctgtaaaccggagtccagaaagtcggctggtggaggctgtgcagggttggaacctgcccccagcgctcagctctgctccgtcctctcagggggcctgggtcccacagcccagggcagagacagaatctggggtctgagtccccctgggtcccccaggctcatctcagcggccctatttctctttccccacccatctgcagggcaggccctggttctgtctccgggtggcctgtgccctaggctctgggcttcttactcagctactcagctctccagcatccacccagccaggggcaggggtgggcctgtggcttcctcatccctggctgttttcgtggggctcccagtccttccctggcccatggaatcatctcctaggattaaattccctctggtttaaacgcagagagtcattttgttctcacggttgggctgtcacagaaccatcaatgaatgctgtctcttccctggtgtatgctggagattaaaacttcacttaaaaacacaccaagaacctctgccccggtctccactgtcccccagccagcatccccccaagttctgctggtgacgctgaagcacaactttcttcccccgggggaggtgacttcagggcacagatggcttcccttcattctcctgctttccccacagcccccaacggtacttcagttattgtgggcatcagtaggtcctttccgatttcaagcaacatgtgtgtcctgggcctgttttgcctcttatttctaggatagctttgtttacactactaaaaaggtatttttaaacatttaacttcaacttttcttgtgggttcaggaggtacgtgtgcaggttgttaccggggtatactgtgtgacgctgaggtttgggatatgaacgatctcgtgccccaggtagtgagcatagaacccaatagtttttcaaccctgtccccctgccccctcccagggtccattgctcccatctttatatccgtgagtatccaatgtttacctcccacttacggatcagaacatgcactatttgtttttctgtttctgcattaattttcttaggataatggcctctagaggcatccatgttttggcaaaggacacgatttcattctttttgtatggctgcatagtgttccatggtgtcaatgtgccacattttctttatccagttcaccgctcatggacacctaggctgattccatatctttgctgttgtgaatgaacacgggactgcatgttgcctttgtggtaggatgatttactttctttcggatatatatcccagtaatcggacagctgactcaaatggcagttgtcttaagttccttgagaaatctccaaattgcttcccacagtggctgagcgaatttacatttctaccaacagcgaataagtgttcccttttctctgcaacctcacaagcatcttattttttgactttttaataattgaaaaggcatatatcttaaatacaatttgaagctcaatcatccttcgtaagagaagtgggggctaatgaagtttcagggaactcatgtcctgtggtttcttgaagtgtgagaagtttgactgcagggaccgtgagtgagtgtgctcttgataaaaatgaaggatggaccggggcttcattaagaaactgtgtccctgtgtcaggtatgcgagactacaaggcagagctgagggccttatgaaaacatatatgggccgggcgcggtggctcatgcctgtaatcccagcactttggaaggccgaggtggttggatcacctgaggtcaggagttcgagatcagcctggccaacatggtgaaaccctgtctctactaaaaatacaaaaattagccaggtgtgatggcgtgcgcctgtaaccccagctactcggcaggctgaggcaagagaattgcttgaacatgggagatggaggttgcagtgagccgagatcacaccactgcactccagcctgggtgacagagtgagaatctgtctcaaaaaacaaaacaaaacaaaaaactgaaaacatacatgttgtgcatgttaatgaaagaatggggaaacatttgaacataagaaattgtgtttttctttgtctgtctttcatatattctgaattatcagctcttagagattagggtctggaatccttcaattcctcacactgtttaatatgatgctcaagtgacgaaattcccaggatgagggggcaccttcccgtggctgggaaacgaggacacggcttcagggctccatggcttcctttcctcttcaccccaccaagagcaccttcaaagaaagccttcctctcaaacaaaaagtctttttttttttttttaaatttctttactgggggacaaatccctttgcttgagggggttctataagaggaaggggatagatgcattgtgtaggaaatcttggatttgtgtttccacttttcttggtgaagcaattcccaactctaccctgtgccgattccagagtcctgccagcaaaaatgctctacgtcttcctccttgtctctaaatattcccttccctcttactccctgctggtgcttcgcaaactttgctgtgcattcgaatcacctgggatcttattaactggagatttcgactccatggtctggggagggcctgagcatttgcttttttctgtctcttttgcagctgtcgaggatgccctgatgtctgttctcacatcacattgcgctccaagtaccccggctgcaaccagagctcagcaaaccgggaccagagggcacatccaccctgcctgcccatgtcaacagagttgtgtgggagccagccggcccccaggaagaccccagatcttcctgcccctgaccacagctctgtccctggaagcatatgctgcagacacttgctctgctgcagattttctgcacaacccctcctcatgggggaaggtttggtacctgaatgaggcctcttttgacctctattcctatcactatttttggtgacctcaatatttatgaaggtaataacttggtctttaatccagacaattttcacctccaggaatcttgtcctgcatctcacttttcttcttgagtcctgtggtcatcaccaaaacctgtccctccttggaaacctcagtttaagcatcccactgtccgagggtacctctttccttccattgcctcagtttcaggtgtccagtccatggcgccccccgtctttgcccagtcaccatgtccagtcgactgtgctcccatctttacccagccactgtgtccagtccatggtgcccccatctttgcccagccaccacctcgtctgactccccgtcctccccttggtgctgggctcctgcctgtccctcctctgtcaagtgcacctggacctgggagtgaccttggagtgaccttgaccctggcagctccaactctcaacccgtcagccaggctccttgaaacctggctggagggaaacggcaaaccctgccacctggagtcgcctaaaattcgcagccacggtcctccaacaggccccacgcttcccgccagtccagcacatttcctggttaatttataattctgttttcccaggcagctattttgcaatttccaggctcaacaaagcctccaacagttcttcaccttcctaattccgagctgttgcccacatttgtttattttatcaaaagaacttccgggccgggtgcagtggctcacacctgtaatcccagcactttgggagacccaggcgggtggatcacctgaggccaggtgttcgagaccagcctgaccaacatggtgaaaccccatctctaatacaaaatacacacacaaaaaattagctgggggtagtggtgggcatctgtaatcccaggtactctggagcctgagacatgagaatcgtttgaacccgggaggcggaggttgcggtgagctgaggttgcggtgagctgaggttgcgccactgcactccagcctgcacagcagagggagaccctatctaaaaacaaaacaaaacaaaacaaaatccatgttcttccagcatctgtggctgccacattccctgccctccttttaaagcagctgcaagcagctgagttcccagcctcagtggcatcaccccaggcccagcagtgagcgtggcttccatgcttttcatggagcaaagaagaaaggagcttcctggaccccgtgactctggaaccctcacgtctccatccttcccacccccaggctgtgcctgggcaccgtctccccggagagaccccgcgtgccccatctaaatcttcatcccacctctgcccccctccatgggtgctcagaccccgcatgctccatctaaatccacatcccacctctgtcccccctccgtgggtgctcagcccccacgcaccccatctaaatccgcatcccacctctgtcccattctgtgggtgctcagcccccgcatgctccatctaaactcgaatcccacctctgcccccctccgtgggtgctcagcacccccatgccccatctaaatccacatcccacctctgcccccctccgtgggtgctcagcccccacacaccccatctaaatctgcatcccacctctgtccccttctgtgggtgctcagcccccacgcaccccatctaaatctgcatcccacctctgtccccttctgtgggtgctcagcccctgcatgctccatctaaactcgaatcccacctctgcccccctccgtgggtgctcagcacccccatgccccatctaaatccacatcccacctctgcccccttctgtgggtgctcagcccccgcatgctccatctaaactcgaatcccacctccgccccactccgtgggtgctcagcccccgcatgctccatctaaactcgaatcccacctctgcgcccctccatgggtgctcagcttgccttatttttcttcagagccatgaccacttcccagcataacatgcatgtgtttctgttttatgcgtggatgtttatgttccatgagaaccaacagtgggctggtttgttcacgtttggactcaaagcctggcacatgtacatctggtgtctgtgtctggcactgcttttgaggcttgggaaaggcggataaagtctctcaatcgcatccccagtgctgagacagtccacgtacacatccacatgaggctttaagacactgatgcacttcagctgcagggcctgtcaaatccaagctcaagagagaatgatgtggtttccaagataaatgccagatacttgcttctccccacccaggactctgctgcttttatggaaatacacattgctgtgggagaggaaagagggctgaacagatcatgttgcagtgtggatatgggttttggctgataagggctgtgatcactggctcttggagctgtccccgacaaggtgtcaagggtcctgagatgctaacgtgcgtggtgaggtcggagtctctctaagatcctgcaagtgacacgggtcacattccctggggagggtcctccagaggctggtccactgggtggacgcctgtgcccccgagataggggacttctcttccaccactggcctggctcaaaggacagatgccctctggagatgtggcacttaagctaccgtgacaggggatgggtgctgacaagcagatcctagttcagattttgacacaagacggtcaggaggagcctgggccggtggggggtggtgctgaggtcagcggtggaggaacagggcgagaatcacaccagaaaacaaatgcctcgcttagcgactccacagtcctgccctcggttgactgatgattttacacattttaagaaatttcatagggttttctgtagatttgacaggtcttttcttgttggagcaggaagtaaaaatgataggactaagcaagcaaaaacagtttataaagaggagcccatgttgcggtgacattctcatcatcgctagagatgggcggcttctcagaagcgtgtcctcaccctcgggggagcagcgggcttctgattgttaaagaaccctgggctccgcatcagatctgagtgaggaatcccactgcgtggacggcaggtgaaaactgtcagtgtaaacaacctattttcatatctaggacaaaggttaagatgtgagattttcgtcttccaaggccaacttggattacttatctaacaaatcctaagattcccagactagtcggctccctaatgcatttctctaaaaattcctgaaaagaaaagagagccaaatgtttgtgtttttctggaccccccaactgaagcctgttcctgaaatgcagccttgaaaagaataggatctactttctcccttgttcctgccaagaggtcaggagtgattaattagaaacattatttgatcaaaaccacattcgttttagtaaaaagcagcaagagtttaacaacttctttcacccatcacatgcagcagaaaatcagacgagaaggatgcatttcaatgaccctggtgcaccctgggtcatcacgaggcgcaccctgggtcgtcacacacgcgtgaacacacggggggcaccctgggtcgtcacacacgcgtgaacacacggggggcaccctgggtcgtcacacacgcgtgaacacacggggggcaccctgggtcgtcacacacgcgtgaacacacggggggtgggttggattggagagttctccagcaaagctggagagtctggcagtcctggaaagtccaggcaattgtaagactgcagtcagggaagtcaggacaggcagaaaaagccacactctcgcccaggcaggcaagcagggtcaggagccgaggatgtcggagcagacgcagcctcccagggacttgtggacggtcatctgtctacaccgagccccagactgggcagctggctgttgcagggagtttgaagacctgcaggaaacccttgcctttgaataaggtacacagagagaaaatgtcctctcttccaaatacgtcttgccaaaatgcagggcaaccttgcctctctttctccagtgagggcctcgtgtactacagacttgggtttctaaatacctgacctagagtttcagatcctcactcaccgtccaacagaaacgtaacgtgagccacaggggtaccactaaattttctagatgctcagtaaaaaacacaagtgaaactaattttaataataaattttatcatcccagtatgtccaaaacatgattatatcaacttgtaatcaatataaagacatcaaggagatacttgaaattcattttttctttgaaatgtgttgtgtgtgggtcactggcagcccctctctctccagacctgcccagctctgagtgtgtaattggcacgtgtgccctggctgcgggactggatgtcatagacccagacaacttgtgcttcaaatgcaaggtacagatacatgaatttattttcatcagtcccaaacttgctcatttccttgactgcctagttttttggaattgacttcatacagcattcaacatattcttcaacaactatttcctgagggtttatgatgggctcaccactgtttcaagcactgaagatttaacaagacaaaacaaaatgaacaaaagaccaaattagaccccttctctgttcacccaggctgagaaccatatgatcatttcggagccttttcttaatcccagatttgggggagttgccggaacctgccagtccacccctctctccacctggtcccccatgcagctgctgggcctgatcctggatgctgataagagcttcctaaatgaatctcatgcaccgtaccctagaactccccccaggtggaggtctgagaggctcctcctgcccgaagaccttcaggggctccttggcactcaggatcctcccgatgtggcctagagccgctttccccagcaccgccgctccctcggcagccacttcatgctcactccacttcccctctcccactcttgcccatgcaaccaggattgccacatcgtgtctttgctcctgatgcctagaagccctggaaatatgcaaatcagatcctgctaaaatgcttctgtgaactgcagtcacctctgggtgcagccccagcttccgagctcatcgcctcccaggagtggtcctgcctcagccggaacccgtctccctctggccattcacagtgcggttctcaggggcccccgccacgtgtcctctcttctcagggacccttggttcttctgcctggagcagcccctctcaccccgcccaaccccctcccaagcccagtcagcttttgttcaccttgagcattcacctccgggcccctagatctggccattctcctgtgagcgtgttcggctcatgctgccaatccatgtccctcccagccctcatcacatgaggccctcatcacttgtgcagctgccgtttctttctggcagggtcaaaagtcgcaggacaaagaggttaggatcggggctctgccatcagaccctcctagttacgagcctcactccatcactgggagaaaaggttcccagcatttctgaacctgctcctcaagtgtcagacaacaaaatctagcctgtcaggtatatgcggtgcagtcatgagctgtctccctggaactggctcagtacatgccagttacgatctgtaatcgctcatttatctccagcacctgtgataaggcctagcatatagtaggtgctattgaatattcctaaaaaggagaatgacacccccctggttggaatacttcctggaggctggccctcggcattgggctagacctgaattcaaatcatggttctgccagttaccagcctgccatgatgggcaggccacttcacttctttgcctcacgttcttcagtaggacagccaaggtcaggcctttgcccttgcaggggtgtggggaggccactgcatgggctggagacaatgcaggtgacagtggtgtccctcatggcagagactcaagaaatatgattgaagttgttattactattcttcctcttcttcaattgctccttcaacaaatgtttccttaatctctcagccagaaagaagcacttctcatgctgagctcccgcaccctgtggcactgtctgtggtgagaacgtcattcacttaaggtgctgacttgagtccctgtgtcctccgcacgtgacctcctgaaccctttgagctgtccagggtgagaacgtggtctccctaaggtgctgacgtgagtccctgtgtcctccacatgtgacctcccgcaccctttgagctgtccagggtgagaacgtggtccctctaaggtgctgacctctgtccctgcgactccccaggtgacctcccgctccctttagagctgtccatggtgagaacgtggtccccctaaggtgcggacgtgtatccctgcatcctccccacaagatctcccacaccctttagatctgcctatggtgagaacgtggttgctctaaggtgctcatgtgtgtccctgcgtccccctcatatgacctcctgcatccatctcccacatcagatgcttgctgctggctatagcttagcttaatcatcttatcctccttggccacttaattattaagaggccactgatgaaattttgttgaatgaatataaggccactactataatcgcgccagtttatggaacaaacagaaggctgacttgaggaagagagagcactccctgtctctataggacatttcattttacttttttttttattattattatactttaagttttagggtacatgtgcacaatgtgcaggtcagttacatatgtatacatgtgccatgctggtgcactgcacccactaactcgtcatctagcattaggtatatctcccagtgctatccctcccccctccccccaccccacaacagtcctcagagtgtgatgttccccttcctgtgtccatgtgttctcattgttcaattcctacctatgagtgagaatatgcggtgtttggttttttgttcttgcgatagtttactgagaatgatgatttccaatttcatccatgtccctacaaaggacatgaactcatcattttttatggctgcatagtattccatggtgtatatgtgccacattttcttaatccagtctatcattgttggacatttgggttggttccaagtctttgctattgtgaataatgccgcaataaacatacgtgtgcaggtgtctttatagcaacatgatttatagtccattgggtatatacccagtaataggatggctgggtcaaatggtatttctagttctagatccctgaggaatcgccacactgacttccacaatggttgaactagcttacagtcccaccaacagtgtaaaagtgttcctatttctccacatccaacgttagacctaaaaccataaaaaccctagaagaaaacctaggcattaccattcaggacatatgcatgggcaaggacttcatgtctaaaacaccaaaagcaatggcaacaaaagccagaattgacaaatgggatctaattaaactaaagagcttctgcacagcaaaagaaactaccatcagagtgaacaggcaacctacaaaatgggagaaaatttttgcaacctactcatctgacaaagggctaatatccagaatctacaatgaactcaaacaaatttacaagaaaaaaacaaacaaccccatcaaaaagtgggcaaaggtcatgaacagacacttctcaaaagaagacatttatgcagccaaaaaacacatgaaaaaatgctcaccatcactggccatcagagaaatgcaaatcaaaaccacagcgagataccatctcacaccagttagaatggcaatcattaaaaagtcaggaaacaacaggtgattttacttttattaccttttttttttttttaatttctgcctttaaaacaaacccagagctttgtaataatagcaatgccttttgccttaacagctcttagggtcagtgggccgcagggtgaattcaagattcctgtgatctcaattcatctaatttctagagaatttgagcaatggctcctccagcgattcaggcctggcctcggccgtagacctgcatcccacctggcctgggggccgacgtgcagcagcaccggtgccttcccctccctcccgtgcagggctctccgctctcctcgcctggaatgataccattcctgtccttctgattacgctggcaccaggtcttctgtgaaatttgcttgataacattttaggttctggacctctcattgtgctctggcctgtaatttgccccatgatcatctgtatgtctctcagtctacaactttggatatatttatgtgcattattctggtttctttatacaaaagacacaagaaacctcttattgtgtctttttctgttttaatctaattccaggaaaaatcattgcctgcaacacagatcgaatgcgtcttcatgaaccactataaatacatgggtatgcatgtaatgttatgcctcccctcccccttctctaagcacgctgtcttctccggtgctgtctatctttttagatccatggatatacttggaatttctgaaatggaactgaaagtgtccacaagaggagaagaggctgaggggaggcagcagggaaaggggccaatctcttgggggccttagaaacaattagggagcatttttgaaaggcgtctgacttctgccacccaggaaaagagagatttgaatactagaatttggccacctagaataatttaccttactctgtcgagtgagggcaagcagctttttcctcctgttttccacaatttgtcccggctgactatacactgtgtttgtggtatgccaaagacacttatttcatcaaagtattaggaatgagtattttatccgaagaagattcctggaaagaagggacatttcggtcatctgtcttggaggttcggtgtgttcacgcgcttctccgtggtgggcagcattgcctgctctggtcctgcctgtaactctgcaccccaccctatcagccatcaccgtctcagcttaactctgcaagcaaaggaagccaggattgcagagccctccatgtaggctggtctgagaaggacagagttaaaagatcttaatacttttctcatcgttacttctcctctaggttgagctcagtctagcaaaaaaaaaaaaaaaaaaaaaaaaaaaaaaaaaaaaaaaaaaaaaaactcccctgtgtacagtgagtgtgtgtgtatctagttgagaatattttgtaattgtttgtaagatggtttacttcctgtgaagctttcactgtcatgtcacatacccagggttagcagttgttggatttgccagggacagacccagcttttgtccccgtaccatgtaatttctgctagcaccccttgcccacttaacagcatcctggtttagaaaaggattcatattttcagtctacacatgtgtctcctttaaagaacggtactaagaaattgttttttctctttcgttagcaattctaatttgttttcccaagttgctactctaaagaccaggtaccatgaaatcctaattgctttccctcaatagctgtgcacacgagaaagtaatttggaaataatggacagcgttttagtggttactgtggggaaaaagaagtgccttcatttttcagtagaacaattgtatgtgattcagtgatgtatattttctaatagcagatggcagattcaatgagagaaattgcaactcaaatcattagttaaaaaatttgtgtcactttgttagatgtggtgattgcattctaaactggaggctgaattatacactatttagttttacatatcctgtttaactcttctatatattgtttatctacatataacgattttaactgcaaaattccatgcatgtatatgttcctttcttaaatgtgtgcttccatataactacattctttaaaattctaacatctggctaaagcaatttttatgaacagaaaataatgtcactataattgacttaaaattaataggaagatcagaaatgaagaagtataaatatacaacacacctgtcaggaaagaaaataaaaaccctggggttttagaaatacaatgtaagtaagaattcttaattgtattctctttagtttagacttcagagcagacttagaattgtggaagtttagagagcgaaggacgaacagtaggaaggccagtgggcacccatgtgggtgaggctgagggtgactgggggtccctgtgatgctcagaggaagtctgtgggtcctccccccaccgagaagcagacctgctcacactgatgcctgtgcatttggaagattggagtctggtcttttgaaaacctgcccgtccacttcaaatccttttccaagaagcctgagatgacccagtactttctagatgctctttctcccaacgtgctttgagctcgcaggcgtgaacccagtgcggtgggatgggtggtgcctggatgtggctgtgggtgttggctttagcatgggtctctgcaccttgcccaaggttcacatcccaggtctgtccctcccactctcccaggccaggggaccctcactggccacaatccttccatcaatctgtcgggacccaaagcaaactgcccccactctgaagagaaaatgaaaggacggtcagcccctgccaggggacttcatgccaggacacaggacgtggccaggcatggaggcttcgtgcttgtgcctcttagctctgcccaggtgcctccacagccctaccagggcactgctgacttcgaggctgctgatgctcgatgtcttggaggcagaccttcttttatcctctcttcctcaccactatcttcctcacaaggattcgtccactaccatgcgcacagcaggggctcaaagagcgtttgttgaaggaatgggaaactgaggaatggatggttatgtgcctcactcgaggccaaggtgtttagcagccagacaggcccgggatctgatcctgactcctcggagtgccctttgcctcctgcctgcgggagcagctcagagacaccgttgatggcacggcatcaccccatctggagcagctcgatccttgggaacctgtgtcacacagcagcagctgccattctctctaactcacaggaaacttaaacaggttcacaggaaacacaactgaagaatactgaatcatctcagtgaccagtgagagacggcgcagtgcaaaccacccggggaacagtgtcacctcgcagggcctgagccgccactggggaacccttgacatagctgaggagtttcaacagaggcttggccaggcctccgctgtcctgactctgccctggtgtcctatattggtctagatggagcttgggaccacggctgccaggaaacgctcagcggggaggcggagggaaggaagggctcctgcaccagcagcacagaaaagcagcaccgatggtccagccggaggggcctcagcgaacacacggtccagctgcggggccgtctccgcagacactggctccccgcaaccaaacttctcaccagtcaacctgcccacgtgaacccagaagtctgtggttttagtaaaaggctatttgccaagttaatagtttaaaaaataccaaaaagatgaaagaagaaagaaaagaaagaaagaaaagaaggaaggaagaaagaaaaaagagaggaaggaggaaaggagggagggagggaggaaggaaggaaggaaagaaagctggaggtcttcacatggagttaaaatgtcactgtttcctaaggagtttggagaccaggcccttggacaggtaagcagatctgatttactgacactgggcccaactcctgaaatgctgacttttgaatctaaacttctgtgtgcatatatctatatgtctctatctctatctatctatctatctatctatctatctatctatctatctatgagctaaatggacaaagcacacacggcagaatcccccatttgtcttgagcctctgtggctagttcagttccccaagtgaataagttacgatttgtatgatgacctggaaggatctgagacaggagatgcgcccattagaaggcgaggcgagatggtgagagagagacacagagagacagagacagagcgggacagagatagagagacagagagaaagagagacagagacagacacacagagacagacagagagagacagggatataaagaaagagacagagacaaagagagagacagagagtcagagagagacagagatatataaggagagggacagagagagagagaggcagagacagaggcagagagagagacagtgaccaaaagagaaggtggtggcgggggagagacagagagcgagagagagagacagagagagagaactggatccagaatgtacccagtggcctccagcagcggctgcttctttgctgtttcttgcccatcgtgtggcaccagacacacagcctgtgtcatgaacccccagcctgcagaacgtgagcagcaggaggcatgtagagaggatgggcagttggggagcaatcctctctcattcccagagggagcgtggctggtttacccaacacctaacgaggtcagcaaaggttgcctctgggttctgactccgtctatttttcagcttctgattttattcttaaattctgttctgatgagctgcagaggaggaggcctttggaagtaagcatttctatattcgcacctgtctcctttttagaaattaaatgcaaccatttgtcatatcttaaaatcagtttagggtttaattggccataaatttgatcatattttgccttcatactctagacacatagaaattattttctaaagtatcatttttttttaaaaaaatgtaatactgctcaaaatactatgatattatgctcaagactttcttataaatgacgtcctaaaagaatggcagcatttggcactgcttgttttttatccctacatttttatactgccttgggacattgacaattattatttaaatcaaaaaggaaaccaaaaataattcacattgttggtcactgttttcttccttgaatatattactaaaccatgtctgggaactccattttgaaagtagcagtttctcctgacatgaaaactacatatattgatttttggcaccgagaacaagatttgttgtctcattcacatacaaacgtatatacgttaaaattaccttaaaacttcagtataatttagaagatgttaaatgcatccacttatgacatatcgatttgtgcggttttattttttaacagtatatgttgaagttgagtgtgccactatttaaaaatgtttgcggtatggtgaatatacactaggatttagctcgagactgcttttttttaagatgtactaaacacatgtgtttgctttgctgtctctcccccttggcggttgctacctgggctgattaaccacggctttctcccttttgggtcccccagcacctgcacctgcgaggtgctgggtagaatgcccagtgacagtggaggggaagcaggacgggcaggcaccatgctcaccgcacggcaggaaaggcctccctcccgagtgtgtctctaagcctggtggcttcaggatttgctgatttcttggtgaagcctcagctgaagcacagaccttttgcctcagatcatgtggcagtcttacatcatttctctcaccagagagtctcatgccccctggcctgtcacagcagtgggtgagtcaggagggcacaactatgggagaagatggggattctgacaggcaaaagaccaaagtgagtcctgctagtgcttcggaaaggcatgggggctggttattgtagtggctgggaggacggggcagataggaacccacagggacaggggggcgctggacctgagtggggacacagagagaacaccgcatgctggaaacttccaggaggatgggagcccgcatcctggaaaccggaggacttgagtgacaggtgcaggagaggctgctgctccaatcatctgagagcacagtctggccaatggggaactcagggcaaacacctgctgggctttagggtctcctgcctcccagacaaaacctgtcattgggtcttccagtttcatggaattgaattgattccatttatttattccaataaataaatatcgaatgatgtgaaagaatcagcatttctaagaataatttttaatgcactcagaattaaggtggagttaaaagaaagcccactctaaagtcttttcttgaaggccctcgcatttgaacatctgccatccagcaaaggagacacacactttactgcagagcaaaactgggatcatactgtatacttttagaagtgtaacttttgatctatttttacttttttttttttaaaaaaagcctgtatgacaggttttgtttacaatttcatgaaaatatttgcttggtgcttgatactgatactatagtttatttcaatcatgtttgtgttctgtgatattttctcattataaatttaggaagtaaaacagataaatggtgtggagttgttcaaagcaaaatcaccactgggatttgaaatgtttttctgctgcaaatgagtaagaattgtggatattgtggcagctgcagttcctgaggagctatgaagccagatacgtgggtatcaggactccctctttcatctcccctttcatttagttgcagaggtgagagtgcaggcgagcaggcaggtgagtatgcaggtgagtggacaggtgagtgtgcaggtgagtgtgcaggtgagtggacaggtgagtggacaggtgagtgtgctggtgagtgtgcaggtgaatggacaggtgagtgtgcaggtgagtggacaggtgagtaggcaggtgatatgctggtgagtggacaggtgagtggacaggtgagtatgcaggtgatatgctggtgagtgggcaggtgagtatgcaggtgagtgtgcaggcgagtaggcaggtgagtgtgctggtgagtggaaaggtgagtaggcaggtgatatgctggtgagcggacaggtgagtaggcaggtgagtgtgcaggtgagtgtgctggtgagtgtgcaggtgagtgtgctgctgagtggaaaggtgagtaggcaagtgagtgtgcaggtgagtggacaggggagtgtgcaggtgagtggacaggtgagtgtgctggtgagtgtgcaggtgagtggacaggtgagtaggcaggtgagtgtgcaggtgagtggacaggtgagtgtgcaggtgagtgtgcaggcgagtaggcaggtgagtgtgctggtgagtgtgcaggtgagtgtacaagtgagtaggcaggtgagtatgcaggtgagtgtgctggtgagaaggcaggtgagtgtgaagatgagtgaacaggtgagcttgcaggtgcgtgtgcaggtgagtgggcacctgtttatctcaggtctctacagggctgagccaggcaggcatcaggcagctatgctgtgacgccaccagcatatagaagagggaagataaaaatggctgcaggaggctcttcaggaactgacggtgggtgccctttctcgtccatctgaatgactgtgagggtgtttgttttgttttgtagcatgttggtttgtatagaagagacaagtgcccaagtcttgtcattctcacttataaaatggaaggaccacctctgcgccatgctgggctgagtactgactgggtaggatgtgggcagaacttggcataatactgagccctcagtaaatagtagataaagaagaaaataaacacaaagctttgttaagagagagggctggggaagaagggcagtgaagaggaggtcactgagtgggaggatccagagagcaggtgctgcagcctgggctccccaggggccatcctgagccaggacttcccctgcgtggacatttgctgctggtgcttctgggcccccaaatgctcctagtgctcttctgcacccacgtacagcgtttccctgcttggctcactcacacaccctactgcagcactgtaggcaggtcttttcctgcagcggtgacctttctccacatccactgcccccgagtgctcatttacatggccagagtggccccagcctgtgagagggttggcttcagcagcccaggctcctgcaggccagcgagctctcagcagaggtggagctcagaacagggctttgggcttcagttcaggaggccagtaaatgaacagaggatgcatctgctgacgtttgtttggaggcagacagtggctctgtgtgcttgtctggggtgggcctgtccctgtcactgatggggatgaggggctcagtgagccaggggaccagggctctcagctgggaaaggacagcttggatgagccccggtggggctgtcaccggcactcaactgtgctcaggttgcaactccccaccccatgtgcaccagctgtcaatggctgctgcctgggataaaagggccttcccccatttctcctcatgtcacagaagagcttggggatgtgttgagtgtggagcggaaactggtgaggccgaagtacacagcagaaagtaaaggtgccatcagcagagagccaggccggtgcctccaacaccccaccctcactctcattccgtcccctgatgtccatttcttagagaaggtgaataaaatggatcatgcagtggccacggcggcctcccccttcccctcccaggcccaggcgcactctgcacctccttgcttaggcctgaggaagagctcagtgtccttgggaggttgaggaggaaaatgctggggttctcgttatgaggttttccatgcagcaggcacccagcaggacggtgctctacccagcccctcaaggcaagatgatgggggccaggactggggcaccctgggctgcaagctcaacggggtcttgtgaggccctcctgccgcccagtgagcccgctgcagccagctcctcaactggccatagaggtcagtgacacccagtaagatggccgctgggcaggacacaagacacgtcctgctaaccctccatctgtcatgaactacatctcttaaccttttggggcctttgtttcttacattaaaacaatgacaagacctccgtgatgtccctggcattttttgaagatcaaagtgtcttatatctgaaagacctttaggaaaaaaattagatacccacacagggaatcctgaggctgcaaatcatggaaggtggcgtccttccctcccgcctcccagctgagccgtctgctgagcgaggaggagccacaagtgatgtgggccgagagcacggaacggacagcctcttacacatgcacagcatgaaggaaacagccggtttgagggcattttctcagaggacatgagtcgaacctgcatagatgatgaggtgtcaggctgggacaagggctttgagttgaagattgagaaaccggtgctgaaagcagaggggacatggcgaaaggtggagttttaggaaagagaattgggcagacgacgggagccagaggacgggttagaagtggcacaagtcttcttagactttcctggaaagcaccacagagaacagacactcctgttcccagcgttttggaggctgggtgaacagacactcctgttcccagcgttttggaggctgggtgtccaaggtcaaggtgtcggcagggctggttcctcctaaggtccctgtccttatagaccctgctgtctccctgtgtcctcacggggtcctccctctgtgcatgtctgtgtcctaacgtctgcttttataaggacaccatgcagattggagtagggtccaccctaaagacctcattttatcttaattatctctgtaaagaccccacctccaaacccagtcaactgaggtcctgggggtcagacttcaacctgtgaattcgggggacacatacagcctggaagaggcagctatttcagttacctgacataaggcaggaggggctatgttggcagagtggagaggaaagaggatttgaggggtgatctcaggatgttgagtggcactgccaggagatccaggggcagcgattcaggggctgagttgacagaaaaacagaagtcaaaagagaaaccatgggcagcaacattgtaacaggtaacagggctgcaacattgtaataggtaactcaacttcctgactcccttgtacaggttattaagctgaattggttttgtgggtgaattaagattattgatggaccagaatgaatcaatagaagtaaaaccttaataagtagtgctaattaattcacccctcatggaacggcttgcttgtgattggattttatgaacagagcaattctactgtttttgtttcttaaaaaaaaattaaaactaatatattcccctggctgctaagaagctgctataaattaaaagccagtctgctcagctcattaaaaaggtagtggctggattctgtagtctcagtgctgattatttttctgggagggaaatgcatgcttgttctggcaactcacaggtggtgatcgtggagaataatgggtcttaaagatgccaaagcagcacatttcatagcagagacatgggagaaaagtaagcagatgggcatgcagcactcagcaccagcactgccgggtcagaggggccctggagccccttcctgtttgcacacactggagacacatgcgtgcagacgctgctctgaggggctctgtgcacagccaccctctctctccctcagtcctcagcctcctccccacctgctcctgcgcctctctggccctggggtggaggagggtgggaggttcagctgggggactctgtgggatccccctgtggtcaagctccatggtttccagatggggtcacagagaccgagagagcctggcggtttggctctggccttggggcagtgccagggtcgtttctgaatcagctcaacccagtccacctgcatccctcctccactgcacattgctcaggaaacccttcctgtcagagagcccatgaagcccctcaagtcagagaggggcacctatagctgcagagcacaaagcgcatgggaggggtactccggggccatgggagggggctcagggtcactaaagggaagttcaggatccatgggagggggcccagggccactcggcgggggggtcagggtcacaggagggggcccagggtcacaggagggggctcagggccacgggagggggctcagagtcacaggagggggcccagggtcacaagaggggggtccacggtcacaggaggggggttcagggtcacaggacaggtctcagggtcactggaggagctcagggtcacaggacaggtctcagggtcacaggaggtggcttagggtcactgtagggctcagggtcaaaggagggggctcaggatcactggaggggctcagggtcacaggatgggtctcagggtcacaggatgggtctcagggtcacaggaagtggcttagggtcacaggagggggctcagagtcacaggagggggctcaggatcactggaggggctcaggggccattgcaggagggctctccctgctggacttcctgcaaatacggtagcagcagttcatgctatggttctgtggtgctggcaggagccgagaggactgagggtcccgtgaactgcaggtgggaccccagggataagcagtgctaggtctgtgtctccatccagcgatcttcggtctcaagtgggtgaggggcactgtgcaacccccgtttggagacaggtgatcatcagtctgtagtgagcggaggggcgctgtgcaccctccagttggagatggagcagctgtgtttcctgaagctttgagccctgaaacccacatccccagggtctctcaaggaaaggcccttggggacaatggctgcaaaacacattgaaggtggaggatgaggaggggcgtgtggacttcgtcaagtgcgattcagtctgctgtgtggccctggggcagcagctgcttgccctctccaagcctcagttccccttctggtcttggaggcagtgaggtgtctccaaggggctggggctgggtgacagcgggcctcaggctctgggtaggttgctggcccggggaggctcagcaggtgcagtggttgctgtccccttgggttcccatggctgattgaacagattcagtgcagttctcacgaaggaccctccaactttctccaccttgtagagccctaggcctggggtggctcagacacagcaaggaaagaagcccaggtgcgctctggtgtaaggccatccagaagctgcagtgataccctcatgcacacaggtggtgggtggaaagaagctcaggtgcatcctggtgcaaagctgtcccggaaactgcagtaataccctcatgcacacagaaggtggatggaaagaagctcaggtgcatcctggtgtaaggccatccagaagctgcagtgataccctcatgcacacaggaggtggatggaaagaagctcaggtgcatcctggtgtaaggccatccagaagctgcagtgataccctcatgcacacagaaggtggatgttgtttattgaaattagaatctgatcaggtctcctttatttggtctggtgactctatccaaaagcagtggggcttgtccccagactagcactgacgtcattgagaccagggcctccgaccagggctggcagctgtgaacgtgccaggctgtacgaaggccttgtggctgtggctggtgagggtggtgcccaggggacggtgggaaaggacggtgggtggagcgaatgtgcagccccaccatccctgccgcacacgacacacagggagcagcccaatgtgctgcatgtgagctgtgtcccccaaagtcccatgctgaagccctaacccccaggacatcagacggtgactgtatttggagatcgggatcttcaaacaggtaattaagataaaatgagatcattaggatgggcacaaatccgatctgcctggtgtccttataaaaagaggagatgaggacacagacacaaccagagggacaaccctgtgaggacacagggagaagacagtggctgcaagccatgaagagaagccttaggcagagccagccctgtggacacgctgatctcagactccagcctccaggactgtggaagcaggaaagtcagttgctccagccaccccatctgcggggcttctttcagcagacccagcaaagcaaggcggtgtgtgctgtatatcatttatacctcttcaccaccccataggatggaaatttgaacgaggtgaacttaaggggttcccagcacttcccgcagcggaacagatggcacgtgcagaggcaggagggccaggcagcaaaaaagagcaggtgacaaagcatgaagtcacactcatccctgttttgaatacacatttaaaaatattgcgttactaaaattttcttatttttctttaatgagttcatgttaattgtgacatttttaaattaaaaatataaacaacttagtttcattttatcactgcaagcgactttgaaacctgcgtgaggctttatttctaggacagacttgagcttgaacaagtcactggcagtagtgagctgggagctgtgctggtgcaaaggcagccccgcctgtgagtgctcggcttcctggggcccttggcgtgggtctggaggctcccctggcagccgtgggtgctgtcgggccgggtacccaaatccttggctgaaccactgttctccatgagctcacactgtgtaccatgttaccccaaacacacacacacacagagagaagtgtgtgcacacacatgctcatgcacactcacacagactcaggcacacattcacgccgcacacaggtacctatgtttatacacacaggtactcgtttacagacatgtcccccccatatatgcacacacacgcatatacacacacctacaaacaccaccagcacccacaggcccacactcatgcattctccctggggccctgggagagcttccccatgcgcctggtgaggctgggcgctggggtctggggtgggacacagaggaaggatgccgcagccaggggcagaggtgggcagggaccagcaagcctggcccatcagggcaggaggcaggtggatagcgagcgggatggatcaggataccacgaggtgggagagccccaggtgcccacactgcctcagtttaccctgccttccagctctgataggctggcatcctcctagcacaccgctttatatcaagtacttagagtcaggcaggtgaagatgctcagcggtcacagacctgtcatctgggaatgtcggtcacctgttcgagggcaaatacactgtttcccatgaggcttagagccctggcaaaaccacacaatgaatagaaggcacaatttacatcctcctacgattgcctgcgttagactcagccacatggttatgtgtgccgctgaatcatgtaatttctgcattttttaaagaaagatgaaaatggagaaattatagtatgcacataacagcaagttaatcatcagttggtcggaatcaagagaattgttgactatgatttgagagattgtgactcagctgtaaagagtacatgaggaaacaggcgctcaatgaaagcgatccctttctgatttgacagtcaaggggtggaagggactctaaaatactctccagtgaggcagcatgtcacagacacagagcatctcacttttctaagtgaagcagaaatacttcctaaaaaataaaataaagactccaaatctgagctagttgatttaaatatgctagtttatcatgtgagaaagaggaaggacgaacttctcaacagaaggcgaattccttggccccaactgacacctctgaggttaccgctggtgacttctcatcccaaaccctcatcacacttggtctgacttctgagtggtccagacatcctgcacaggctggccatggatgcccaggtggcattctctccccgaatctccccagacatgcctggtgtctctagcagccgctcacctttcaggactcaggggctcccttttgaagtcttgtctgttcacccagtaaacattagttatccctgttcacgaaaacagtctccactcccccaggaatgtacaacttggacgaggcagacgagcgagtcaccagttgctgaacagtgcccccgaattgtctatgctgtgtgccagatttctttcttatttttaaaaaacctttatcatggtttcaggagtacatgtacgtgtttgttgcacaggtaaatcgcgtgttgccagggtacattggtgtacagattatttcaccacccagctcatatgcaaagtggctgatagatggtttttcaatccttgccctcctcctgccctccaccatcaagcagggtgtgtattggtccttctttgtgttcatgaagtctcaacatctagcccccacttataagtgagaaaatgtggtgtttggttttctgtcctgcattagttcgcttaggataatgctatgccatatttctaaaattgtgtatatatgttggtctggcattgtaacttatctcttcacgggtctttctttctgagatgagaaaatttgtcttaaggcttttttttttttagagatttcattttatttagagcagtttgtggttctcagcaaagaaggtagagagagctcccctgtacctcctccccacaaatgcacaaccaccccgttatcaagtccacagattaagctggggcttacgcttggtgttgaaccttctatgggcttggaccggtggagagtgtcttggatccacattggaacatcacacagagcagcgtccctgccctaaaaatccgccatgctccttctgttcctccctccttccccacaagccctggccaccactggtatgttttcatagctttatgttttcagaatatacaccttataaccatttcagactgcctcattcacgtagcaacgtgcacttaagattcctccaggttcttccatggcttgatcgctcatttctctctgtgctgaatcatgcaccatcgtgcggatgaagcccagtgcttattccctcacccactgaagggcatcttggttgcctcctattctgaataaagccgctataagcatctgtgtgcaggattttgtgtggacatgtttccagctcctttgggtaaatactcagcgtggagctgctggaatacgtggtgaaaatgtttacggccctctatatcctcgccaatacactgactagaagcagggatagaacctggtctgggagaagactgctgtggggccagcagtcctcaaacgatgttcaaggtgcggggaagaagcctggaactgttgtgaggcttaaacccatcagacgttccgctcgtgggagctttccctgtgacagctacctggaagcatacacccagttccactggagctgggtttctaggaaggtgctgcctctgctggtagagaaatgtcaccatctcccccgaggacaggagctcaggcggccacgtggcctcttcactcccagagcaggaggcgcaacagtggagcctgggccctggagccacctcctgagttcccagcctggctctactccttgttagctgccaccgtgaccaggtaatgagcctgtacgtaaacctgtagaatggaacaacagtaactaccacaggggtaggtctagagtatctgatactactcacctcatggataatttttgagtattaagtgtgtgtgtgtatacctatatacatacatgtgtgtgaacatacatctggatagagctagatatagacagagaatgtatacacagcacatacagatgagagaacacactcagagtcacctgcacatacatagacatagtgcatagagagagacacagatgcacccagataggcatagagatgacttagaaatagatgtgtgtgtgtgtgtgtgtgtgtgtgtgtgtgtgtgtgtgtgtgcagagaggccaagatctcagcacgctgcccacacatgctaagtacacagtggctgttttctctgccctggaacaggaaaccatctcctcccccagaggccacttccctactcactgcggtccactgagcttggttgacactcgagctgcataaacagcacttgacttgaggtccgagcagaccttcttaatctaatcagctctaaaatacttgctgtcgagggctaacagcctcttgaagaaacttgggaccattccacgtttcatttacatgatggatgagaggcagaaatggattaagtggtagatgagcaccttgggacacaggaaaccatttggagttggagttgtctctggcccagctacttcggcagcagtgggaagtgacgtgaccctgcgttacctgctggtggcagagggagggcctcgctgcctcccatgctcagtctcagggcccctatcagcagcagccctcactggggtctgcccagcactgacccacagctggtagatccctgcgtttgactccacattttatgccttaggaagcaaaatccatcctcgtgctgccctggtttccctggcagtgtcagaagaccagaaatggccttcgaagaataaatccatgcatttttttcttgatatattttccacctttactggagatgaatgacagtcatagctacagaacgatgaccacttccattgcaattgccaccatgtttgaatgcaatgggtgcaccaagcagcaccctcagccaaacagtcagtgccagtgcatgaactcaagccacatctgctggtgtctgtggctcgaccctaacactagtgcaaatgctactcttctcaggctgctcaagctcctctcaccctccataaattcccatgagttccatgtcacagggaagcatggttttcaggaagatcaatgtcagccaggccccattcagcaccctcctcgtagtgcccttcagcactgatttcataatcatggtgcctctgctcagacccaggggctataagagcccccagctctgatgagcgtgttaatgacactacagagcagtcatgggcctgtcttggaaagccctccctggtgcatgggctgagccacttgtgtctctgtattcccagatgcatccactttgtacttgttgtcaccaatattgctctttctcctggtgactgcgatttcatctatcatcacaaagtaattgttggattaaggacgaacaatttttcaggatttcagccattgggacttcatgccatagatcaacacttgacctattctgcctccacagaggtcacatttcaatatgcagtgttcaaaatttcaccttcccagagaaaagtaaaaaatgccacatgataagaggatggcaaggggtcactgtcataaaaacagttgtagaattgtatatactgacagggcccttaatgcaaatatgatcttgagaatctacagagctttgcattttacagatagctttcaagtctgatttatcatttggtctttgcaacagccctgtgcagtgtataaagcagaatttttaagatgaagtgatgcaggcctaaaggagatgaatggcttactaaaatagataattaggtcaacaaagaactcagcccacccccaagtcagatgcttaggtatgaatctaacgaatcatgtacaagatatgaggaaaactacgaaactcgaaagaaagaaattcaagaaccaaatgagagaaattccatgttcatggataggaagactcagtatttttaagatgtcacttcttcctcacttgatttgtagattcaatatattctcaatcaaaatctgagcaagtgatgttgtggatatcaccaaactcattctaaagtttatgtggagaggcaaaaggcccagagtagccaatacaatgctgaaggagaagcaccaactggtgaaagaaaggacaaatagatcagtggaacagaatagagaacccagaaatagacccacacaaatacagggttagggttaagggttgattgttgacagagcagcaaaggtgctataataattagacatccgcaagccaaaaaatgagtccagacacaaatctaacagcttttgtaaaaattaattcaaaatgaatcacagacctaaatgtaaaatgcaaagctataaaactcctacaagatgacataggagaaaatgtagatgaccttaggtatgatgctgactttttagatacgacacccaagaaacaatccataaaaacaaaatcaataaatgggacttaatttaaaaacttgtgcacggtagaacccaacatcaagaaaatgagaatgcataccatagattaggagaaaatatataaaggacagttaaaactcaacaatagaaaaacaaacaacccaattaaaaaatgcacctaagaccttaactgataccacgccaaagaagagatacagatggcaaatcaacctatgaaaagtcgccccgtatcatatgtcactagagaacgcagataaaaacaccaatgagatgccactacacccctaatagcatggccaaaatccagaacatggacaccctggatgctggtgaggatgtggagcagcaggaactcccatcattgctggtgggaatgcaaaatagcacagcttctgtggatgacagttccatggtttctaacaaaagtaaacattgtttggtcatatgatccagcaatcgtgcttcttggcatttactcaaaggagtttaaaacttatgtccacgcaaaaacctgcacttggatggttgtaggagctttatccataactgccaaaacttggagcgaccaagaggcccttcagtgggtgaatggatacatcgtctgtggttcatccagatcatggcatattatccagctattcagtgcttgaaagaaatgagctacaaagccacaaaaagacacgggggaaatgtaagtgcatattgctaactgaaagaagaaagaccatctgaaaaggctacatcctgtaggagtccatctctaggacattctggaaaaggtgaaaatttgcagacaatgaaaagatcaggggttgccagggtttggaggagggggaggtaaacaagtggagtacatgggatttgggacagaaaaatcaccctgtatggtgctgtatactgtaatggtggatacatgccattgtacatttgtctacacccacagaatgtacaatacattctgctatggtgaaccctaatgtaaactgtgaactctgggtgggtggtggtgattgtcaatgtaggttcatcgactacaacaaaaaccccctttgatgggcagtgcggacagtgggggaggctgcgactatactggggacaggggcatggggtaactctgtactcaccactcaattatgctgtgaaccccatgaaaggaaaataaatctcaggatccccaaatcgctaagccaaagggaaaagtcgagttgggaactgcatcggacaaacctgttttccatttggttcctaaataagatcgctacaaagataaaaaaaagctacatgcttccctcgtgatttgcccacaaggaaattccctgtggacaaaggacagacagaattcaaagtcatccccctgtgcacctgagacaaacatatatctaattgcttcctctgccctattgcttatgtaacaatgcagagtcactgagccagaccaaggcttacgtgatgattcctgctctaccctcctctcacatgggaattgtgtattcggtgaaaagctacctatgacctggaagcccctgctgacctcaagttgtcctacctttctagaccaactgatgtacattttacgcagactgatattgattgatgtctcaggtctccctgaaatctataaaaccaaactgtgtctgggtgcggtgtctcacacctgtaatctcagcactttgggaggccaaggtgggcagatcacgaggtcaggagatcgagaccatcctggctaacacggtgaaaccccgtctctactaaaaatacaaaaaactggctgggtggggtggcgggcggctgtagtcccagctacttgggaggctgaggcaggagaatggtgtgaacctgggaggcggagcttgcagtgagccaagatagcgccactgcactccagcctgggtgacagagcgagactccatctcaaacaaacaaacgaacaaaaaacaaaaaacaccccaaaaccaaactgtgacctgaccaccttgggcacacgtcatcaggacctactgaggctgtgtcatgggtgcatccttaaccttggcaaaataaattttctaaattgattgagacctgtctcaggtattttctgttcacaacccccaaattattaaagtctattaacaacaaacagccacaaaaagtccaacccagttcttctgaccccagtctttggctttctactcctgcagcaactacaagaattatgaggcagcaaagggtattggctgaaggaccccgagtgcttgatctgaaagccaccaaatccagaagatgaggcacctgagagcagctggcgggatggtcgggaatggctcagcccacattttcagatgcatttgacttcacttccggaatagagtgaagcctttcttgtgggaagatcaatgcaggctggcatttcaacatggtgccaaggtcaggatctcactttcctaagtgattacctgcatctctgccccgaggggatctgctcaccttactcaatcaggtgatggttagatctttctcaacacctttttctttcaagtaaatctcaagttgctttgcccagaaaacaaggaaaaccgactccttcctacacagagaatagattcctggattctctgcgattatttaatgtcagtggaaaaacattctcattactgtagctgggaagaaaaaaatgtgttgcacaagtgtgatttctattcaggacgtagtgtgggtttgtgagtagcataaagaaatatataaaacgcctcctttattaactcgttaaaatatgaaacaataaacagaaatgaaatacaatgtaatgaaatcaatatataagttagggttgtttttaattataacttaaattaaccagggtatctccattgtgcaagaatttatttccaaaactaaaatgaagtctataaacgtgcactcaattacaccggggaattgcaaattttctgtcttctggcattcaaaagatttttgtttcattaatggctaaaatgattataaccgcttgtatactcatttcctttaccaaaggtgcttatctcctttcctgagtacacatagtttgagagtaaaattaatttgtccctaaagaattattttgacctcaaaaacaaaacaacaaaacaaaacaaaaagaacaatgatttctgacatgaaggctccagagatgtaagtcgggttctgggcgtccgggggccctttagagaccctcaggggttcctccagcaaaggggaacggctgaggttccagtcctcatccagacagaagaactcagctttgttttaaatataggactttcttgcttcccttgaaaaatgaaaaaatgtttgaaaatcactccttcagcagggtgtatgatcatggtgtaggttcggtttcagacagaagaaggtggttctgtgtgaatatggttatgcatttggtctatttgttgttttgattttttttttcataagcacttacaaagcaatataggtaagtgtggggagatagcgtgggttcccgtgagaaataatactgatctctttcttgtgcctcagctgaacaatttgaaaccaagcattttatttttttctgtgctaaacaattgatatggtttgttgtgttcccacccaaatctcatcttgaattgtagctcccataattcccacgtgttgtgggagcgacctggtgggaggtaattgaatcatgggggcggttccccctgtactattctcacggtagtgagccttatgagatctaatgattttataaggggtttcccctttctcttggctctcattctctcttgactgccgccatgtaagatgtgcctttcatcctctgccatgattgtgaggcctccctagtctcatggaactgtgagtccattaagtgtctttttctttataaattacccagtctcggttgcgtctttatcaacagctgaaagcggactaatgcaacaatactatgacaaggggaaaatgacttggctccagtaaatctttgtttgacccaatcacaggctacacactgaggccaccctggctcaaggctcacttcaagacccaccttgcaggacaagcagttctaagctcacaggtcacaccctctccccaatccctccagttgctgccctgaaacactcaccttaaagctgcccagcccaggcctgaaaccctgaacgtatcttcctctattcccattttgagataccccggatgctatgtcaaggtggttttttatctgcagcgggtccaacaagcctggatttggtgatcaacaaagcccttccttgggtttttggagcatgagcaaccaatataaggaacttgataggccaaatgatgggaatttaatgtgcagattgtcttaaacagattcccccttggtagacagagctaggtaggccagacggtgctgctgttgggaggatttgctggtgaacaatcaaacgcagaaagatggcaccaagagtcacccttctgcggctggaacatcgcctggatgaaggcagagaaaacctttctatgcctgataccgagctcggaattttggcctaaggaggagaaagtgggttcgacagccagaagtcagggaacaaaggcaggaagacagcccgaccctggatggacgccagcccctgccttggggttcacactcaattctggaggcaatggggtgtgggatctgctttgacacaaattcatgagaaaaagatgtggagagcttcgcagatgacaagatcgatacagatcaagacagagctcctgacagaggcagcatggcctccgatgcttggaggagtcggcttgaggcctggctggctttgttctgatcaggcctatccagcccagaaccacagcacagcaccctcatccacattttaaaaagctcccaaatctaaaaccctgtggctgggagacgtaacctgaagcgacctaaggctctttgtcttcttgtgtacccctcttcctctgaatattcctgtgttctcatgcacaagttactggcatggctccatcagtccactggttattatttatgtgcaccgaattccttcctttcacatcggaaagaccctggttctgaattctgccacatttgtggcgaacagatggtgggcatttttaggactgatactttcatatgggaacctacccaccttcagcctgaccgccagcctccaggggagaacgtatggtggaaaggtgcggaccctgccacggtcagggcatccatggtcggggcatccacgatcagggcatccatggtagggtgtccactgttggggcatccatggtcaaggcatccacggaggggcgtctgcggtcagggcatccatggtcggggtgtccatggtcggggtgtccatggttggggtgtccacagtggggcatccatggtcaggacatccacggtcggggcgtccatggtccaggcgtccacagtctgggcatccagctccatcagaaccatgggccccgcctctttggcctatgcttgtccatggccacccctgagttagaagcctgctggcttctgtcctcggctgcttgtcccccatcccatgtttcaggaggtttttatttttatttttcatgtatgagatggagtctcgctctgtcgcccagtctggagtgcaatggcatgatctcagctcaccacaacctccgcttcctgagttcaagcaattctccagtctcagcctcctgagtagctgggattacaggtgcctgccaccatacccggctaatttttttgtttgtaggagacaggatttcaccatattagccaggctggtctcaaactcctgacctcaggtgatgcacccgccttggcctcccaaagtgtcaagtggtttttaaatggtccttctggcttcagcaggtgctcctctgggagccaggctgtgagctgtgggctggccttgctggatttggggaatgggcctgagagagtgtccaggcccctgtgggctgtgtgaggttggcctggcttgctggcagcatcgcctccatggttgctcccagcacctccatgtcttgggtgcccatgtggtatcatcgcaaggcatagtggcgctgagcctgcacaggtcagtggccttggtgacttccatctgtgctcattttcacattttggttgtggcacccagcccattaggagcctcagattgcttggccagactgggatcagctattaataccaggaattcaggttttaattaagcatgggtgaatcaggctcaagataatagctccatatgacgaagttcattccataacgttgctggttctaatgtgaatgggttctcgttgatttttattctaaatttcatttttatgaataatatatccacatggttaaataaaaagtggaaaacacataaaaataaggcagcagttccccctcctgcccagaggcattttctctggacctggttcctcatggaggcagcaccagtgtctgtcatcgtggttcccctctggccgttagacgagaggctctgcaatgctgaccggaaaaaaccatgtgcttttgtcaggcttggagatttgcagcagtcttttcatgtatttcatgtagaggttgtaaaagttggtagcatagtcaaactcatagaaacagagagcagaagggtggttgccagagccggagagtcgtgcagggggttgctggtgtgaggtggacggtggacggtttcagggatgggaggagtgccttctggagacctgatgctcagcacgggaaacgcagtcagtaaccgtgcgtcgtctgctgcaggagctgtgatgagagagtctccagggtgctcaggttactcagtaaaaggggaactgaccacctgaggccacaggcgtgctactgagcacagatgtggaaatcgtttcacaatgtacctgtccatctaatgccacgctgggctccgcaaacaggtgcaatttctatgtgtcgattatacctcagtgaaactgttctaagaatctgtgtccgaagcctttttaattcatcctttgtggttcctcagaagaggattcctcaaccttgcctgggctggggcctcaccgggagcctggtccccaggttatggactccgcctgagtttgatgggtgtgggtgggagaagccaccctgaatccagacgcagcaccagaggcagggctgctgctgtccctgcctcggccacactgcagggctgctcggaggctccgcgagggcgtgccatccccttccttctttcctccctctcaaaaatgccccttcgtacccccacccacagctcattcccactaagcactgttaaaagggttcgctgctgagggtctacagctgcattattggcgaatgcctggacccaaaggcatcgagacagtggggctgcatttgggggcaggggtcttcatgggagcccctgagttcattctgtgcccttttgggggttgggggactgctccctgtcttcagtgtctgtgcaattcagaaagtgctctctgggtgccacttccctccacattaaatggatctctagtttccctgtctctgaatctctcttacacacagaggcgtgcacgcacacacacacacacacacgcacacactcaccaggacccccccacctgccgccgtcttgttggacgaggtggcagattgtgttatgcttgtctgacatgattccacttatgcctcccatggaaaactccttagggcagggacttggttcagcacaatttcatctattattcagcaatctctgtgtagcgctggtatcttgtaagtgataaattattataatgaaagaaaatcttcttgccagttcatcttggaaaacacaagatcgacctccggccggcatccttcacctcacccaccagcctgtggacagcggctctcaggccctcctgggcaggggttccggctctacggctgaccctggtacatgggctttttacaaccctggttttccccggattctcctgtcagggtgggatccctttagagtgaattcaagatcttgtttaggaaggtttggaagaagatgctgagagcaccagacacccaggatgggataaaatgcttttgatgacaataataagctcagatgccctcgcaagtataacaaagcccagctcctcctccgtgccacatgatcccctctgtcacccagctcccctggcccaagccacactctgtaggtctcctctctggcatggtcccctctgtcacccagcttccctcgcccaagccaccctccataggtctcctctctggcatggtcccctctgtcacccagctcccttcgcccaagccaccctccataggtctcctctctggcatggtcccctctgtcacccagctaccctcgcccaagccaccctccataggtctcctctctggcatggtcccctctgtcacccagcttccctcgcccaagccaccctccataggtctcctctctggcatggtcccctctgtcacccagctcccttcgccaaagccaccctccataggtctcctctctggcatggtcccctctgtcacccagctaccctcgcccaagccaccctccataggtctcctctctggcatggtcccctctgtcacccagcttccctcgcccaagccaccctccataggtctcctctctggcatggtcccctctgtcacccagattcactcacccaagccaccctccataggtctcttctctggcatggtcccctctgtcacccagcttccctcgcccaagccaccctccataggtttcctctctggcatggtcccctctgtcacccagcttccctcacccaagccaccctccataggtctcctctctggcatggtcccctctgtcacccagcttccctcgcccaagccaccctccataggtctcctctctggcatggtcccctctgtcacccagcttccctcacccaagccaccctccataggtctcctctctggcatggtcccctctgtcacccagcttccctcgcccacgccaccctccataggtctcctctctggcatggtcccctctgtcacccagctcccttcacccaagccacgctccatcggtctcctctctggcatggtcccctctgtcacccagctcccttcgcccaagccaccctccataggtctcctctctggcatggtcccctctgtcacccagcttccctcacccaagccaccctccataggtctcctctctggcatggtcccctctgtcacccagctcccctggcccaaaccacactctgtaggtctcctctctggcatggtcccctctgtcacccagctccccttgccctagccatgctccataggtcgcctctctggtccaacagtgtcaggtgaccatgagtgcccaatactcttgagtttatttaaatcatatgaaacatcctttaggtgactggtaattagaaatacaagcaatgacaattttttaaaatttaaattcctcaagtatggtccactgtacaccatttctgcgaagtagtaataagtgcgggcttaaagaagcagagagttctgtagtctcaagagtttagaaaagtcttctttgaattaattaatttatgatttggtttgtttttgcttataactgtggctcctcagcaatattacttctaacgtgactgcatggacaaggttgatgatgggcaactttttccaagtttatttgacttttacccttctctctcttttttcctaatacagtgcttggtagaatggtttgggggaattttataagaatgagcccttgagagtagaatttgatgatatgtgaagtgcttctacatgacatcttctgcccggcccatctcatgggattcggagagctgcaggacccataagagccatccagtcagctgcggcttgtcctcctgatgtactgacttaaaaacaagtctgtgaggccgggtgcagtggctcatgcttgtaatcccagcactttgggaggccgaggctggtagatcacgaggtcaggagttcgggaccagcctggccaacatagtgaaaccctgtctctactaaaaatacaaaaattagccaggcatggtggcgggcgcctgtaatcccagctactcgggaggctgaggcaggagaatcgcttaaaatccaggaggcagaggttgcagggacctgagatcgtgccactgcactccagcctgggtgatagagcaagactccatctcaaaagaaaatcaaaaaacaaacaaaacaacaacaacaacaaaaaccacgtctgcgtgactgcctcccggggcgaggtagcatgcctcctgtccacatagctgtaggtttctctctccatttttctcctcaggtcttctgtggtggggccattttcacctcaagtctccaagagcagggcctttccacccagtctgttggaaaggattttggcgtgggtgtttgccgtgagcagatgttgctaactcaccatcaagcggcccaatctctctgagtgggctgagcaaacaccctggctccagcacagggcctcagacagaccctttgcagtggccttagcactgagagaaacgcccactcctcgttttcttggctaagcaaggggctccttttcagaattaacagttaaagcagcttaggctgctggagcaagatcaagagcctgtgctggaggacgcttaaagagcctccagtttttcagccagtggcatgatatcaggtcctgtaagtggagactcgcagaattgcacaatccgggctcccttcctcccaccacttcgttgtatcggggcagagcaaggcttgaagatgtgtggcatacctgtggtggggtgccatccacgcatccagcacacagccgctgagcgcccactgcctcccccatctctgctggggaccagggctgtgctgcaggatctgaggaagtgcaggaagcggtctttcctcaggggcttggtggctcattcctagacctgcccgcccagcacagacaatgcagggagccaggtggcacctggggcgtggcctgaatgtcatacggaagctgaggcttgggaacggtgcacttataacatagccgaggttcctccgcatggataatctttgagctggcttttggaaaataagtaaacatttgcaaggcacagaaaaagataaaaactttgccctcagagaacagatgatgattaaattcaagaaatgcgctgaagaacagcttgcctgcatggaattcctgtgttgagaagagagggtctcagagtacagcaacagggagaccagaaagaccaactgagcacccggcagtggcatcagacagtatggtatggaggctaggcctcaccccagggcactggctaaggacgttcagaaggatcaacacatcaatacagtcagatttgtattagaaaaaatagtgtggagggcggatgtggcaggggcatctgctggtcggaaccatggctgccatcagggtcagaggctgagggccgaggctcagctgtcaccatgaggccagaccctgggattcttccctgtcctcccagtccaatgccttttccctggagccccatgcaggcactgcttgttctgcacagaccccagagagaccagagagaagtattctgcatggtgcctgtcttcacaatttctacaattcagccgagagacaaaatcctcccaggtgaaccattttaaaaacatttgtgccggtcataatggacttcaaagttggtttgtggggatccacagagatcagagcagccctaggcccagcagctttggacatctacatgttggagcctatggggagaatgagctcacttccaggaaagtaaatgtgctgtgttccacagcccgctggcctcgctcatgccttctgcactctccaggtgtgtgcttcacagacaggctgctctgcctacggctttgtggtctgtttccacttgtggccaggtctcatggacaccccttcatgacttgttcacagaaagagtgaagggggctctcttcatgctggtaaccagccaggtgcaagagctggatgactggattttgtggactgctgggttgcatatatctttaggatgattgtcttctaagaactcatattcaaaaatgacaataacatagtttgaagtggtactcaatggcaatgacatttttgacaaggaaaacagtgatgggcatcaattggaacatcatgattgtttttcttatatcccatttacttgtggggaaaaaccaacaagtttatcttgtttaggagtaaaatggctcaagtataaagaaaatcttccatgaagagggatccttttggcctccctgtaagcattactgctctataaatgatttaataacactgataatgaccatcggcagctaggagaataaagtccggcaccgggagagaaatgtcacttaacaaatattcacgtgcaaccccctgcactaagagctgagtgaagccccctggagaggccccatcaggacagaggcttgcaggagagatgcttcctggcacaggccctgatccctgcaggggctggggaggtgccgaggatggacccgctggctgagtggctgagaccaggggagcactgctcagaataggatgagggaatcggtgtcacccggccatgagccccgggacacagagcacaaccggacagaagcacctccgggaaggcctgtggggtccgtggggtctagtggggaagatggcaatgttgacgaagtggcaaagcaagggtgtcccgcagcaggagggagagtgggagcaagccaggatttactggcacccggagggtttagtcttttattccatttcccgtcactggtgcccagagtcttcttgggcaaaagggaatgggggggcttcatcgccgacttctctccacggtgggtggcagtgtgtgattgttaaagggaaagtgagcctcctgcccaggagccacgagactcaagaaagttcactagaactaccgaccacagtattaaggaattatgattatataggcacagagcatggaataattatacattatgctgatggtgcctttcttttgaagagttgtaagccttcattaaaatcttgcaaatgacagtaatgaaatgaaaataaagcctttcaagtgaagccctctgggtgtttttcttttctcttttgggggagggggatatgtgtatatagcaaaaatgaagcagatatttaggtgactatgatttttatcatctttaaggcaattcccaattgacagagtaaacagacaacctacagaataggagaaatatttgcaaactttgcatctgacatagggtcaatacccagaatctacaaggagctcaaacaactcaacagaaaaaaaataacctcattaaaaagtgggcacaggacatgagcagacattttcaaaaagagacatatgaggggccaagaaacatatgaaaaaatgcttaaccatcatcactaaccatcagagaaatgcaaattaaaaccacaatgggacatcgtctcacaccagtcagaatggcagttattaaaaagtcaatgaacaacagatgctggtgagcttgtgaagcaaagggaatgctactatgctcttggtgagaatgtaaattagtatagcttctattgaaaacagcttggagattttgcaaagaactaaaaatagaactaccattcagtccagcaatcccactactggatatctacccaaagggaaagaaatcattgtataaaaaagatgcttgccttcctttgtttattgcagcactactcataatagcagagcatggaatcaacctaagtgtccatcagcaatgcactgaataaagacaatgtggtacatatacactgtggaatactatgcagccatgaaaaagaaagaagtcatatcttttacagcaacatggatagagctggagaccattgtcctaagaaaaataactcagagcatgtatcaaatgccacatgttctgacttgtaagtaagagctaaacagtgagtacccatggatacactgagtggaaaagtagacactggaggctccacaaggcagagggcagaggtgggggcatgagctgaaatgtcacctgctgggtgccctgtttacaattccggtggtgggtgcaccgagacattccctgctgggtgccctgctcacaattccagaggtgggtgcactgggacatcccctgctgggtgccctgctcacaattccagaggtgggtgcactgagacatcccctgctgggtgccctgctcacaattccagaggtgggtgcactaaacccagactccaccactatccaatatatgcatggaagaaatctgcagctatagcccccaaatctatagaaataaaataaatgaggatcataacttaaaataacaaaagcaagtccccaccacccagccttgctcagatgcccacagtagacaaatatccgtggagaaacgggtggcgatgtggcccattgcttggaccgaaacgggtcggggatgtggcccattgcttggagtcctgatgctgagctacacacaattccggaagatcctgacagcaagcccctgagaggagaggaggaaggatccctgggcaggaggagcccacagaagatgcagaaggccccaggagagctggcgtggggacacgaaggagctggctgtctggggagctctgggtcaaagcttaagcaagccagggagagccctggccctctggtcaggaggcagactggaatccgcagacagaagcgaagggatctcccaggcagggatctcacagcctgcggcacccaggcaggaaggagtgaagcccaggggagggagcggatgcccatgaggttcccaaccggaagcccagggccgcggtgcacacctgctgtgtggctggacagaggcgcagctgccggtgtgtggtggccccaggccctcagctgttaccatgcagcccagtattgtagctcacaaccaagagtgccatgttaacgggaggactcaaaagaaatcttaattgataaattgagaaagtgtgtatgtgttttgtgagctaccagtgtatctcagacgtaaaattccagcttcccagtttatgattggcacgggccatcctccctgcagcgttgactcgcttgacaaagagtttcaggggctgagggggtggaaacaaagatggaaaggccgtggagaatctcactgttctatgaccagggactgacccagaggcttctgtttgctgagctgcaaaatgaggatgatgacgggtgaaattcatacaagaactgtacagattaagtgagaaacatgtaaagtgtgtgtcactttgacctgcaagcatgcagtgacgaccggtagctgtgaatactgccactgtcatcactatcatcatttccacgaccatctcacattatgatcctgtgtacagggaagcacgtattggaaatatgggtttggggagggtgtagtcctgaagagccgttaattaatattttaatacacattcatggtaccagaaaggacactaaatttatgtggaagatgcaaccctcccagttggactttaaatcacaacagaaagacagattgtgaagtgggtcagtgaggggtttaggaaaaaattcgcacctggcctcttaagtatcccttcctctgtctggaagcctttgtgaaactttgttttttttctctttttgagacagggtgctgctctgttgccgaggctggagtagagtacagtggtgctatcacagctcactggaacctctgcctccctaggctcaagtgattctcctacctcagcctcccaagtagctaggactccaggcatgcatcaccacacctaatttttgtattttttttctagaaatggagtttcaccatgttgccctggctggtctcaaacacttgggctccagagatctgagcacctaggcctcccaaagtgctgggattacagacatgtgccactgtgcccggcctgtgaaataatttgatgacaacaattgcttctactttttaaaaagtcatgaggactccacgtgacaatgccaggttcacctgagggtaggccacatgtggtataaatagtgcagaaatgggagtggtgggaaaagcaaatctgctggcagggagaagctgcagcctcagatgggcccattaggtgtttgcctgggatggggtgctgaggcctggctacacttagggaaactggcattggcaataccttatcccagaaactgctggccttcattgcccgggtccaatcctattgttaacacctgatagaggatggatattaagattcaagcaggaggccgggcacagtggctcacgcctataatcccaacactttgggaagctgagatggggggatcatctgaggtcaggagtttgagaccagcctggtcaacatggcgaaagccccgtctctactaaaaatacaaaaagtagctgggcgtggtggtgcgcccctgtaatcccagctactccgaagtccgagtcatgaggatcacttgaactcaggaggcggaggctgcaatgagccgaaattgcatcactgcaccccagcctgggcaacagagtgagactctgtctcaaaaaaaaaaaaaaaaaaaaaaagattcagtgttaccagaaaggacactaatttattatgtaatagctgctccgactagaaggagtcccattgatttccactctcccattcttcctatttggcagggaacttaacaacagcacatgtttgggcaaatctatgattctctgaggcccctgttccatggtgatgctaaatccctcctcccaggtgcatgtgaaaatggcattctatggtggagaggaagcagccagcacgcagctcctcaaggcagattagctggtgggagcgatgatgacggcggccgcagaagcagtgactcttgcagcagggccttgctcagtctcagaggctgatgctacgtctaattcatgagaggaagtgagctctgagtgtgaagagcctgcagtactcagacacaagttcagacaggtttgcattggccacagaccggctgctcagaacagaaagccagtttgcctgttcccgtcctctttggaacacccaactcataaagtcacagagacaccacgtgtggctcagagactcagtgggagcttccctaggtttttgtgaagcctgtgagtggtcactggagcccaggcgtcaatgaccaagtggaagataggccaggtgggcccccactggtggccatcggacagaatccaggttcggctctgcagtgtgggtctaagttaactttagtccagttttcttgccagcatgcccttctcacagtaaacggtttcctgtgccctgaaggaatctccccatctcagccttgccaaatgcattcaattttcctgtaacaacatgatttaaagcctactttaaaaaataaacaccgatcttagctattgtgtcttagccagagagctggcctcacaggaaaaaggctcatgtctgttccttttgcatgaaacttggcatgctgtacacacgttagaaacatgtgctgagctgatgagcagctcaccaaaaagaaccacaaagctgatcggtgtccaaggaacgttggtgggagagacgatgtgctcctgacgacagccacctgctcccccgaaagccagcatcagccgctgcggtctgtgctccggggtacttccatgcatctttcaaagaaatctttaggaacagttgtcactgcaatccttgtgggtcacagtgagaaaagttcagtttcaatagaaaactaagccacagataaaacaaagcaaaagcaaaagcattgaatgtgagggggtcccattccctttgtggaaacccaggactcagcagaattcatggacgttcttagtagagtcagccatcactacagcaagttctccctcagagatggactcttggaagccactggcaggagggctcatgggaaccggtgcgtgttgggtgctgtgtgcaaacggagcagggacaggctcagagggcctgaagctggcggggaagtcgctaccctaccacccagcgatggctggctgtcctgcagtgggttctgctgactccacacgggggactgactcccagagaccctgatgtggactttcaaactggcacctgctgaatgcacaccacgggtggtcaggccagtagggtggaggagccgcttcccgaggttccttctgtgcctgcagaggcctgagagccaggtccactctgctttcaatgccacttttgagcgcgttgtgttttcccagcgtctccctccccacatcagcaattcctcacaccacgctgagggaagaatggctcccgatgacaggcctcccaaggaatggaggaggggaagcgtgatttttctcctttcctcatccctccggcatccatcgactctccatgataaatgaggagggcacgacttcttttgtcattggagaaactgactccacattgcacagccagggagaggctatcctggctatttcctcaagaatgaaccttgatggtggctgtgcagatacacacacacatccacatacatatgcacacacacctgtacatacacatccacacacatatgcacacacacctgtacatacacacatccacacacatatgcacacacacctgtacatacagacacacaacacacacacacctgtacatacacacacatccacatacatccacacacatatgcatacacacctgtacatccacacacatatgcacatctgtacatacacacacctctacatacacacatacacatatcaacacacacacacttgtacatacacatatgaacacacacctgtatatacatagatgcacatcatgcgcacacctgtacacacatgcacacacagacacacatcaacacgtgcacacacaccaacacacacaactgtacacacacatacacacatcaatataaacacacacgcacacacacctatacatacacacaacacagacacctgtacacacatacacacatcaacacacacacctatacacacacacctatacacacataaacacacacacacctgtacacacattaacacacacacacctgtacacacattcacacatgtggccggggtggagctgggatgaggaagatggattcttcggacaattggtaggcagcacccccggatgacagcagggctgtgtcagggacggccatggctatggctcttcctggtgccgcattgacaagggccaggaagcagcaccggcttggagcccgaccctggtagtcgctccgctctaaggacctttgcacctcgaggtcctgagtagggccagccctgctacctggacagagatgaggatcacaggactgaagatttctgcttgtgaaaaggatgtcccctaacctcctacccatagcgtctgaaatcaccctgattagaacgatttccttggccgaaggaaggcctgagtgtcaccgagagagcacgaggtgcccagtgccatggaggttctctctacgctgccagttgcacttttgtggtttatgtgacagctcacagtatgtacagtggtcataagtcacagtcacatacaattttagagctgtgatcttttttttttttttaccattttcaaattttatcgtaaaaaatggagtcctaaaaatttgataatttgcttaggcacaaactgtagtattaatatacagtcatatatattttatttatttatttattttgagacagagttttactctgtctccaggctgtaatgcagtggtgtgatctcagctcactgcaacctctctgcctcctgggttcaagcgattctcctgcctcagcctcctgagtagctgggattacaggtgcacaccatcatgcctgactaatttttgtatttttagtaaagatggggtttcactatgttggccaggctggtctcaaactcctgacctcaagtgatccacccacctcggcctcccaaagtgctgggattacaggcatgagccactgcctctggccaatattttatatctatctatctatctagtcaatactcagtcatcaatcagcatttactatgaatttttcagaaaaatatatttttttcagctactacagaacccagataaattctagctctcaaggaatggccttataaagtataaacaataaacagtattttctccagaagttagtgaatgtcagagccttttttgcattatctcattttaatctttacaagaattatttgatgtcgacccgacgttgactgtttctagaagaaactgatgttgaaggcgtgggtgtggcttccctgtgatctccaggctgggaacaggcaggaagattcgacccagatccctagagccctgggtcagcccttcctggaaagggagagggagtggatggagaattactccagggagaggccaggcactgttttgtttgcactgccacggtttacgttttcacaccacaatcagaaatactgtagcacaatttaggggtaaaatacaaagagcctggttttgtagtgttttgaatcttacatctgctgtatattctctttactgttaacaccaaaaggaaagagctgctgtgaatctattacctgtaaccggtccttgtctcctctaagcctgttcctcctcaacgcatgagaacgttacaatgagttcatgcatcaactatagtgtctggtgtattttatttggttctagattcaaggggcacccaaccacttctcgtggtaagtttggtgaggacgtctgtgtgcatgaagctctgagcaatactacaagtgtctcccaattttatcatttctgctatgacggagatgcatactatagccaaaactcagaaaagagataaaaagggcaaactcttatggtcagagaactcaaaaggcacattttccatgcaattatttttgtaacagcagaataaacccatttatctaatagagttatagtaataaatagtatattcaatttttcgtagggatgatggaaatgtcatctacataaagccagaccgaaaaagctgttttcaaacagaccctcagggcagaatccatggttcaggtgagtcctcccttccttctcttcttctggctggcaagccatgccttctctttgtggcctcagtgggtccctgagcgcctcgttccttcagcctggggtttacagggaacccctgagggtttgctggtcactgatgcaatcaggttcttgtgattccacgcagctcttactgtgacaatgtcaccttcccgtctctcagaggcattgcccagggagcgaggtgggcctggagaccactggtgcccttctttccttgccaatctctgattctggattgaatgggtatgaatggtctcctctgagaagcctggatttaggattcagtaaaaagtccagggtgaccatttcctactgcacttgcacttataattctacttgtaacttatttttaatatatgtagtttctattgggataaggaaaatgcacttacttattcaagtcctagtaagttgctttttataactattttcttaaaaagtaagtacccaacctacagctactattgcctgaggaggcaaaacattttggatatataaagagggcccttacctttgaaaagaaatgaaatttctgctttagatgtctcaataacaggaagagtgatgcaaaagggcttcaacgtatattggcttagaatatgaatttatggacaacttagagaacgttaagaggactagcagcccattatctggcaaatgaatgtctaaagtcaatgattggaatgaaataaaatattgattttcatgacaaaatgtccatagaacaatcagtttgggtgaacagctgcacagttctggaatttaaacattcaaacagtctagtgatcacgatgtttaccaatcaatttgttagtgatttagtttaaaggatggcatttacaatatgtatatttctttcacgtgaaaattacacgcaattcaagatcattcccgttggtgattcctgggctgggtttcaggttctccatgtctcttcccccgctccttcctttcctgttgcccaagtttgggcatgcagctggtgtcccagcacctttctgggggcctacagtcttcaccctatggcactagttctcgaagttctcctcacatggggcttagaagtgcaaagtcaagccccagcccagactctctgagctggaaacctgagcgggggggagcatcctggctgtgcctggcaagctcccaggtaaccctggacacacctggtgaggagtgtgaaagaatgctctctacgcaagcaggtgagagccctgcttcacagcccaaggaagggacgtgggaaaggtttagggcctgcaagagacaatatgcctttcagacagaggctgattggcaaaacatgcaatgagatgaatccatcaagcctgtgtccatcccaagtccgaaggagaccacgagagagccagctagagtcccacaggtggtcaagagggaagaaaaggtgcagggaagggatgatttctttctggccggaagttctttctctaagcaagcaggtttagcggtagtagaagggactctatgggagtgtgggttggggcacttggagagctgacaggctcctgcacagactgaacaggagacacactgggctggtacctgcttcctgcacggggaacagaagccattgaagccagggcccattgagtcaacaacaagtgtgtgtcaggcaaactaaacctgaggttcacattaccccagtgaaacggcctgtgctgttgtgccattttgtactgattttgtccatccatgacagaatgtggggcaaatagaccagtaattcaggcaaagaatgaagaattccaccatctacttaaactgccaaaaggagtgaggatttttaacaacaacaaaaacaaagcaaaaaatataatgtctaatctggacaggtaacaatatacacgttttgaaatgtctataattcaacaacaaatatgaaatgtaatccatttcagttaggccttttaactttgataaataaaatgaaactttgaattttcttctcgcaagtggctgatccctaactctggtgggcagaagttgggcttcccctggccgaggtctccgagggctgagctgcccctcttcctccattcatgaacgattcaccacgtccatcagaggctagagaggacccggttctctgtcacttgttagtaatgctaggccatttaggctgggacagaggtctgaaggaccctgaaactctggagtcacagaaatatagtccacgctctgtgtcccaagacctaacctcggctctgaagtttctcatcacctaatgctgtgatctgcagctgagacacacgtttgagccacaggctgctgtcctgcttgagaaatgatgatgaccacatcccagacaccaggcaccagctaccgaagccctattcacctgcagacatggagggacgccctgacccaggagctctgcatcagtgccattcactcctccagtaaagtacgagagctcgttgatgctgacacgatgggaaccctagggaccctgcccgcagcgacatgcatagaatcatgactccaggcaggggacgtcacacggctgacttctgactccaggaggcatccgcccagtgcctctggacctgcctggggctccagccatcacccacactggacatgacgcggctgacctctgtgggcttagggcatggtcctccaggcctcgcatgaactttaagtggaaaagtggcttctaataggtaagtagtggttgtttttaacatggctcccagcttgataatttcagagactgctgtctacccatcacaccccacacaacagtgtgcaagggcaatgcaatatagccctgtcccatggggggccaagaccacagcatccactggaaactgacgtaggtttcagggggattctgaaagaagggtaaaacacaacttctggcatcatctatttatcatcttgttcatgaaacaagatccatgcaaatggaaagtgatttgacatagtataaaagtctgtgccaacgtctggagcggggtttggaaagtccataagatattaaaggaggaaaaggtattttgagatgaccttttgcatttgcctcacagtttatttcctggatttatgctcaccgggtccctcagtcccagaggtcatggagacgcagcgtgcctgtgctgctgctgagatgtttgtccaagagaatttaaatcgtcaccagcggcaggaaatagtgagtgtgcagtgcatgaaagaactctaccactctatcttcggggaccattgacagacgggaggaaggaaggggatgagaggagggaaggaaggaaaaaaggaagaaaaggggaaaagaagggagaaagagaaggaaggagaatggaggaaggaaagtgggaaggaagagaaagaaagacagaaggagggaaggagagaggaaggaaaaaaggaatgaggaaggaagaaaggaagaaaaaagagaaatgaagggagggagggaaggagggaggacgagaaggaagaaaaaatggaaggaggaggaaaaagtaagaaagaaaaaggaaggaaggaaagaaaaaagtaagaaagaaagagaagaaagaaggaaggaaggaaagaaagagaaagagaaagaaagaaagaaagaaagaaaagcaagggagggaggaggaaggaaggagagaaggaagtctgggagggaggggagatgggggtagggacagcatttccctccgcattgccggccctctgtcttgagcccctgcagggtgccggatggccatgccctattgtgcgtccctcttgcagcaacaccacattaaaccgtggcatcctcttgaggctgcccctgcggattgcacggctaatgcagaaggctagaaagaaggacccgaaacgcccaccaaactataaattaaggcgaagatctcaggagcaatgtgcctggtgcccggcgtcgctggcctttggtcccctttcagggagcctgaccctgctcccagagacgcttttcggattcgctcagctcacaggcgggatgggaatgtgccgcagggctgctgcctcacacgtccgggtttaatagacttttttccactgataaaagaccactaatgagttcattttcaagctattaaacgggctataatagctagttctcctgatgattgcacagagacccgctggtcacagcgggtttgtctccctgattaactctttgctgccctggtgccaggaggctgcgtgcctgggaaggcggcacccccacctgccagccctgtctgcccctgtctcctgctttcaggttctcagggccaagaagcctcctggcccgaggacccacaaatctgctctcctgcatgcatccaacagctgccatctcttcccttatgagaaaccttcggtcctaagccagggcatcagctgactggttgcacagagggtgtttcaatattcacatttcacatgagggactgcgtgctctcttaactgtgtgtctgtaatcctgaaagaacaccctaggaagacgcttcccttggggacactcttttatcaacacagggagcacatgggcggggctttaacccacacactgggctctactgggcccgggtgagctgtgtggctgcaaagagtgtgtcgccctgtgtctgtggtcatgaccacgcgtagcgttagcaaatcacctctccaggtgtctggtttaaacacccttctccagcatcggagggcaggtgatgaatagcagggcgctgacagtccccgtctgccctcttcattaggattgcagcaggccgacttcagatgcttctgcttagcataattttgttttcagctatttaagcaaaggtgcccagagaccttcaagcttgggcagccaccagctgaattggattgctgcatttttttttttattattactgcctgttttcctttttaagattgttttattatgagaggcccaataggtcagagatgttaaattgcacagtgataaatgctcctaggccccctccagcctgttctcaggatccttccagaatcaccgtgggctccctgcctccctgcagccccagggcccctacacgggcagttctgctgctcgcctccagcctctgcacaaggtgctggctgggaacccaggtgcagtctcaacgatacgatatgtccacaggcccctttctcctagcccagaccccaagttaagggccagaaacaggctttgctcccctctgtccccacactcagtgatgaacattgcatctatgtctttgcaaagacagaaaaagggataattttcagtaactagcactacttttctgggtaaaacaagtggacagaaagaaaagcactaggcactggggcctgtaaacctgagtcattgatgtggggtcgggacaggtgcctgccggggtcctcatccagcaccagctgctgagccgggaataaggggcttcctcgtcagagccctcgtctagggacttgctgggccacagatgcctctccatccggggtcttttagtttgtgtcccggcatttcacaaggtcataaggccaagcaagaatgctttaagcaggactgttcatggagatgggcaggcgcacacacacacacacacacacatgcacagacacacatgtgcacaggcacatgcacacatacagacacatacagacacagacatgcacacacaaagactcgcagacacacccatacatacacatacaaacacacatagacatgtaaatgcacacacacagactcacacacacacatgaggtgggggctttaactcatgaattttggggacctattcagcccataaaatgtccaccaaattgtacattagtggtaggaaatacatatggtccatacgacgacatcaacgttacaagcctttactttccagtcactggtgccgcgtgtctgcaagtagtcctaaacctccccaaacatacaaagggcaagggagggggaggaaaccttccccgtggacccggctttccccagaaaggctgaggagtgtcacaggctgagggctgggggctctctcaggcccgttttggaggcgcggagtgaatgcatcttccagcggccgatctttcttcttctcctggaccttcagtgtgcccaaggcccataaatcagcgtgtgctgctgaaatctgtaatactcagttcctctctcaacttactctcagaacaaataatttaagacactaagacagtggcagtatatctgatccaagggggaaattcactctcatttcgttggaaagcagctgcctggatgaaattctctctccaataattgattttctccctcttgctgcttcactcgctggagctccccattccccaaatgctggggaggtggggggtctcgtgggatgagaactcggctctccccctccactcacatccttaatgcatcttggcctcttcctccctccttgggaacagggcacggtgcccccattgatgttcctaatacgggaacatgacacatacattaggctgaaggaaaggaggaaaaaacatttttgccttgttgtaatttcagcccagaagtagcggattcatttcacacgaccttagctcaaggtgacttgatatatcgtcccagcgatgagattttttttgtgtctctcttatccacccatctccttctgaaggaaactcttgcagcagtgaaaaaagatggacagacagagccctgggcaaccctggaccatgcaccccagatgcgtggtgcctgggggtgcagctggggcctcttcccgcccccacctgcccttgtctgtttctttctgtttcaccccgtgtgagcaaggagaccggtcttcagaatcacaaggaattaggcagaactcatctcccagcgctggggggcacgatgaggtgggttcgggccgaccagggagattggaggggatctttccagctggcaggtcctgtgactcggttcctccccagggctgagccgagggggccgcctctcccacagctcatcagccattaagagaaattcagaagaggctggggtcctcgtctttttctgagttgtgaggaggggccgcgtccttgtgcttctgcaccaagcacgaatctgccctgcaggagggaatgggcgtgttcctcaaatagaacacgggaagccaggaggaaagagcagagcggccatggccgccctccccagccaggacccgaggcctgagctccagagggaggggctggacataaggaggcggtcacaacgccggtgggtcaagcctattagaaagcagcaggtggtcatgaaatgttgttgaaacagaggctaagacagggctagcaattgttctgtagatagtacacattcctaatattactcatcttcccaactctgaggcagcctctattattgtccttgtttataggtgagaaaattagggttgaaagtcattaaataacgtgtccaaatcacctgccagtgatagagccaatatcgcagccctgtgtgttgcctgaggctcttctcttgaaccagaggtcagcaaactatggcccttgagctggatccagccagcagcctgcatatcttgttatttatttgtttatttggcatccatgaggtaacaatggtttttatttataagggctacgttgtataagcaggtacataatatcctcgttttgcctcttgctctgcaaaacctaagctactcactatctgatcttgaggataagtgtgcagagccctatcttaaactattgggttgtagtgattagtagctgaaataaatgttattttaaattatagtgtctgaagttttgatgaaagctgttgataatgggttgtgaacaagttaacacttccgtttacttctagagttacagcccacatgaattgaatgacttctagtgggcgtaacagagcttcagaattgtaaaggctctgatggacagctccccggcatctgtctgacagagataaaagtaaactttactgttaccctaacgtctccagagtaagatctgtggaaggagaaatgtacaaagaaaggcgtttacttacaggaagcaacatggttctcagaatgcctttggggcaaaacaagcattagccatgcctgaaatgtgtgtcttgtgtggtcagttgaatgtcttcaaacccattccatgaaaagattttttttaagcaaaaatataaatatcatgattcttcaatggcatgtctttataatttttcctactacttcttgtcgttaccatttcaaggacaacatccatgagacattcttcagtcctcaggattacctgtgatttcaaagcgaatttgaaaatccaccccagcagcagggtggggtaactgtgcagagtttccagcaactcatgcagccacccaaaacaaaaggagtatacagcagatgctcattttcgtgaatgcagagctgagtaaactattagcacgtcagtgtatccaggtttacatgctgtaatcgtgttcacccatgagctgggattttcctggaagttatcttttggtagagtcttcaaaggtggagttgaatagacatgtttcttattagctggtttctgctactttatgattagaacacgatgcctttatgtacaaagctaataatggagataaggctggatggtgagccgaaagcccgcagctctgcacctgagagcagcaagccagtggttaaatgtgcgcgggaagcacggggaaattcaaggagtttatttctccaggctttccaatttgattactatagagtacaaagctattaaaaatatgacctttgtattttttataccttggcaaaaagccagataataactttgtttgacttggttagtgtgatagagtgcttattcagatggaaataaaatgacttttctttactggaaattataccttgaagtctaaatgtccatcactgatacaacacacagacagcctgaaaaccaccgaggctgttaaagagaagaatgcagcatttccattttctcaaaggaaaaatttatatttttgtacagatgtcatcaacttaacatggtaaaaggtaaatctattgtttcaatacaaaagttaaaaaaattgattacattaacagaacatcaatgtttattacagctttaaaaagcaaaatagatactgttctctccttaaaacattgttttctcattggaacttttaaactaggcaaagcaaaaacatttggctacatcagcctgggttttaatttgaattttaaagaatacagaaaaagcaatgattttatttatctaaattaaggatcaatttctgaaagttcaccaaacatgggagatgttgctctcagggtttataacgagtgaaataaaaagcagattttgttgatgagttcccatcccatacagaaaaataggttccctcaatgagtattagcagagagagggtgtgtctgtttcaggacttagtaagaattttagaaaaaaatgccctttttggctgggcatggtggcttacgcctgtcatcccagcactttgggaggccgaggcgggcggatcacgagttcaggagattgagaccatcctggctaacacggtgaaaccccgtctctactaaagatacaaaaaattagccgggtgtggtggcgggcacctgtagtcccagctactcgggaggctgaggcaggagaatggcgtgaacctgggaggcggagcttgcagtgagctgagatcgcgccagtgcactccagtatgggtgacagagcgagactctgactcaaaaaaaaataataaaatgccctttttgttttgggtttaggaacataaactggtctcaggggtttatggctctttcttctcattgttggggaggagctcatgggccctgggtacacctcggtctactgagaagtgtatgtgttggattggtaaaaaacagcaaacaaagttacttctgtctgaggcctgaagttttaaatttttatttttttgctattagaaaataatgacaaaaattacaatagtgagaacagggtatgaaggaaagttctagaatggtcagcaggtgcactgcttagtggtctgtctgcctccaggttcactctccactgcctgccccaccttggagccaatgccatggccttgccttcccgccctgccatgctgtgctcacagcagccttccagattgaagtgtgcctgcccctccccagagaagctgggcatcccctccagcccatgctggggaggcagcacagccctggatgtggcccaggactcactgccatcgccagttacccaccacccagaggcccaggatgcgcggtatggtggatgtgtcagggtgcacagctgtccgggtggggcattgtccacccgggagagtgtgtcttacaccaagtccgatgcatgccatttccctcagtcagaaggcacagaacgcacagactcgaatgggaattgggctctcccactgacaacctcactggaaggatgtgtttcttccacccccaggacttgggtatgctggatttggagatgtagtgagcaaaggaggttttcctctactggagaagatggccatgcttctgtaagaaggaggctgaggctgttcccaggacactttcacctctccagtgttgacaccacttggcagggcagggactgttgtcctgaataccacagtccctcccttcggaaagtgggtgctcctacccagtggggcagcaacactgtgttgtaaacacgccgaattcaccagcctatgatgttcattgcatttgtcaatgggaaactgtgacccctaaataaggagaaagccactgaaaattggattctactagaaggcagattcagatcaccccacctgtcaaaccagcagaggagatggcaaagtggatcatccattttacaatgctggtggcagggggaggctggaattctatatttaggctttgtgccctccttcagaagtgaggaatatggcagctgtgttttatgttgactaattatactttttctcccatttttcttgccaccacataggaagggcattgatggtggcttgcatttctatagagggtcccagtgggagtgtaactggattgaaatcatcattcaaaactactgctgctagaactttgtatttctcttctgttgggaacttgaatgtttcatcgagaaaaaaaagaaaaacgaggatcagaaccagcaagtagtgctagatgtctgtgtgcccctccagacacactctaccctgagctgctgagctctgcatcctgggaactggcctcagagggttgcattctgtcgctagatgtttgtgtgcccgtccagacacactccacaccaccctgctgagctctgcatcctgggaactggcctcagagggttgcattctgtcgctagatgtttgtgtgcccgtccagacacactccgcaccaccctgctgtgctctgcatcctgggaactggcctcagagggttgcattctgtcgctagatgtttgtgtgcccgtccagacacactccgcaccaccctgctgagctctgcatcctgggaactggcctcagagggctgcattctgttgctagatgtttgtgtgcccgtccagacacactccacactgccctgctgagctctgcatcctgggaactggcctcagagggctgcattctgttgctagatgtttgtgtgcctctccagacacactccacaccgccctgctgtgctctgcatcctgggaactggcctcagacggttgcattctgttgctagatgtttgtgtgcccgtccagacacactccgcaccaccctgctgtgctctgcatcctgggaactgacctcagagggttacattctgtcgctagatgtttgtgtgcccgtccagacacactccacaccgccctgctgtgctctgcctcctgggaactgacctcagagggttacattctgtcgctagatgtttgtgtgcccgtcctgcccgtccagacacactctgcactgccctgctgagctctgcatcctgggaactggcctcagagggctgcattctgttgctagatgtttgtgtgcccgtccagacacactccacaccgccctgctgtgctctgcatcctgggaactggcctcagagggctgcattctgttgctagatgtttgtgtgcccgtccagacacactccacaccgccctgctgagctctgcatcctgggaaccggcctcagagggctgcattctgtcgctagatgtttgtgtgcccgtccagacacactccgcaccaccctgctgagctctgcctcatgggaactgacctcagagggttgcattctgtcgctagatgtttgtgtgcccgtccagacacactccacaccgccctgctgtgctctgcctcctgggaactgacctcagagggttacattctgtcgctagatgtttgtgtgcctctccagacacactctgcactgccctgctgagctctgcatcctgggaactggcgtcagagggctgcattctgttgctagatgtttgtgtgcccgtccagacacactccacaccgccctgctgtgctctgcatcctgggaactggcctcagagggttgcattctgtcgctagatgtttgtttgcctgtgcagacacactccacaccaccctgctgagctctgcatcctgggaactggcctcagagggttttgcattctgttggtttcagtgatagggagggaggctcaagggttagttttccttccagtctgtttgacagttgctgtgtttctcttaagctcaaaacttttgttggacggctcttcccctccaactacagatttccctgagttcagtgaattgctgtccacttttttcccctaaggctgcatctccccgggagcttcatcatgccctttagtttctgtgacattctctgcacctttaagacgacttcctttattaaatttcttacttaaccctctgagtgtgccatctgctgcctgcccaaacaggtgtacctaagttccagcctttactctaacagaatgcctttaggtgagtcacagaattgctctgtaaattagaagagcaggcttgtttatgaacttttcttatttaagatcctataagtccagctttactttaaaaaatccaccaccatgactataacctctttactgccattcaacaaccccaaattataactgtttagtggatattgtaaaagtatgtatagcttatcacctttttaataagtccaataatgcttcaaacttaagatgaatgagaagattctaccaaccctgaaaattcacatacctatagaaaattctgattattcaaccataagacacttcataataatttgcaaaagtaatttttactttcaacaagtcattttttttgttcaagtacagtgtcactaggtttaaaaatcagatttttttttgagagagggtcttgcacttcacatatgctggagtgcagtggcccaatattggctgactgcaacctccatccctggggctcaggtgatgctcccctctcaggctcccaaaagtcagatcttaagtggtgccacctagcaagtttgaggtagttaaaaatctgtgacgtggtaatcgacagtttctcaatgaattaaatacaaataaaagagtattgttttgttggagagatcattgtggcaggctcaacaacaaaaacattaaagccactaaaaacaaatcacaggcgagatttccagcaatggccatttgaagagaaaattaaaccctctcctccaaaagcaactatacagctgaaacccctgccccctgcagcttgtagaagttctgtcagattaaggcaggctgcgaaggaactgtagcttcttggctgcaattaatggatcacctggcttggaggaatgaatggtgtaaaataatcaacagaggagttaaagtgatacactcagttattcaggaagagattgagaaggcgagagacatgtggaaaataaattgcaaaatggtaaatgtaaatccagccatatcattagttgcattaaatatgaatggtctaaacacccaaataaaaagagcagagatcatcagattagataaataagtaagatttagctacatgctgtctacaagatacattttagaatcaaagacacaaatacattgaaagtaaaaaaaaaaaaaaaaaaagaaaaaatacgcaccatacaatgactctaaaaaaactacatttgctgtattatttattgatagaacaattaggtggaaaattaaatgacagtattaatcaactcaatctatttaacaaaaataagcacttcatgtaataactgcagaacatgtatttttgttttttcagagtctcgctctgtcaccaggctggagtgcagtggtgcgatcttggctcactgcaacctccacctcccaggttcaagcaattctcctgtctcagcctcccaagtagctgggattacaggggtatgccaccatgcccagctaatttttatatttttagtagagatggggtttcaccatgttggccaggagggtctcaatatcttgacctagagatctgcccatattggcctcccaaagtgctgggattacaggcatgagccaccattccctgcccacatattgtttttaaggacaagaaacattttacgaatagataatatgctagattagaaaaaaaatcaatacatttaatagaactggcatcatataatgatgtttttgaccacaatgaaagtaaatcagaattgaacaacagaaagaaatctggaaaatctgcaaatatttagaaattaaacaatatacttctaaataacccatggatcaataaaggaaaaacaagaaaaataagaaaaaaatttaactgcactaaaacaaaattatattaaaatttatggggtgcaactaagacagtagagggaaatttatagctttaaacacctatatcagaaagaaaggaagatctcaaatcaatattctaagcttccatgtgaatatagtagaaaaataagagcaaactaaaatcaaagtaagacataataaagattagagcaaaaatccatgaaatagaaaaccaaaaaaatcaacaaattgacatatttagattgaccgaccagtaataaaagacagaagacacaaattatgaaaattagaaatgaaagaagaaacattatcaccaatctacaaaaattaaaggggtcataagcacatgttatgggcaactttatggcccaaatgaggcaacttagatgagatgggggaaattactggaaatgcgcagatttccaaaaatgactaaagaggaaataaaaaaactacaaaaataacaattaagaaaattaaactaacaattagagatccctttacacaagaaaaggcccaggcccaaatggtgtcactggtgaatttgttaaataaagaaaaaatactaacaatcttttacaaactgttctagaaaatgcagaaggggagacgactctccattcattcagttgttctaatattatattgatagcaagcacaaaaatatcacaaaaagtatagcccaagatttcttatgaatatggatgtgaaactattaacacaacatcacctaactgaatcaagcaccatatgaaaagggtgtatgtaaagaccaagttagatttacgcctacagtgaaaagttggcctaaaatgtaaaaatcacctagtgtaatatactatattaatcaaataaagatcagacacctgattatcacaatacatgcagaaaaaagtattggaaaaatccagtactcattcatgacaaactcccttaacaactctgagtacaatggaacttctgcaagctataaaagggcatatatgaatcactcatgcccagctccatccttagtcatgagtggctgagtgctttcctgtagatcagggacaagggaaggatgtctactttcacacttgaattcaacagtatactgctggtccttgcaagtatgagaacaaaacaaacaaaataaacaaacatgccaatcattcaaggcatccagcataggaaatattaaaatgtattcatttgtagatgacatgaacatctatgtagaaaatctgatagaatcaacaaaaaatatattagaactagtaggtattttagcaagattgcaggacatatgattagtataaacatatcaatcgtctttttatatattactaacaatctgaaaagaaaaacaagaacattgttacatttacaagagcctcaaaaataaataactaggaatagtttcttctttttctttttctttctttctttttttttttttgagacagggtctcactctgccacttgggctggagagcagtggcatgatcacagctcactgcagcctcggcctcccaggctcgagtggttctcctgcctcagcctctggaattgctgggacagcaggcacatgccaccacatccagctagtttttgtattacttgtagagatgagttttcactgtgttaggaacacacttaacagcaacaacaacaacagtgaaatgcaagacttgtgtactgaaaactacaaaacattactgaaagaaatcaaaggagacctaagtaaatagggagaaattccatgtttctggatttaaagactcagtaatgtcaagatgtcaagataacaattcatcccaaattatccatggattcaatgcaatctctgccaaatctcaaatcccaggattttttttgtagagaatgtcaagctcctcttaaaatatgtatgaaaataaaatgcaaaggatctaatagtaaaaaacaattttgcaaaaaaataaagaaagaaaaaggttggaaaacttatactagctgatttcaaaatttactaccaaggtaaggtaatctagataaattgaacagagttgagggttcatgaattaatgcttacatccatgggcaactaattcctccaaaggtactaagaaatttcaatggggaaaggatactcttttcaagaaatggttctggttctactgtatactcacattcaaagaaatgaatatacaccattaccttacactatacacaaaacgcacaatgaaccacagacctaaagaccctagctaaaattttaaaactcctagaagaaaacaggaaaaaatctttattagcttgaatttggcaaataattcttagacacaacataaaaggcacaattcattaaggaaatatcaaaaagttggacttcatcaacttttaaaactttgagcttcaaaacacatctttaatgaaaaaataaatcttatacaggttgaaaatatttgcaagttatatatctgataaagaacttttatctagaatatatatataaagaatcctacaactcagtaatgacaagaatccagtaaaaaggagtaaaattttgaacagtcatgccactaaagaggacatgtagaaaacaaaaacttaaaaagatgtataccgtcattagtaattagggaaatgtaaatgaaaccacaatgagatacagctatataccctctagaatagctctaattaaaaagacagaaaataccaagtgttggatgaactatgaaaagaggcgattcctcatgcgtggctgctcagcatttagaatgcaacagctactttggaaaattgtttgtttgtttcttaaatagctaaacatatacccgccatataacagagtacttcagcacctaggcacccacctcggaggaatgaaaacacgtccacgcaaaggcatgtcagggaatgctcacgtggcttcattcataacaagcaagagctgatgacaccacaaacgtccatcaacagagagggggagaaacaacaggaactctatccaaaccttagaatagcattccgtaggccaaaggtgcaaactacggacacgcgccccaacacagatgagcctcaaaaacattgtgctgagcaggagttggaaggaagacgtgacgtatggcatgattctatttatacaaaatctccaaaagaggaaaatatttagagatggggcatccattagtggttgcccagggctgggggtgggattggattgttgcaaaaacatcattaaataaatgaaaaaataagcttccttctgcacacacatccatgaagcccacattctcaagaggacgtgaggcgcatcccaggtggtcatgcagctcaacactgtagatgtgtgaaaatgattgaattgtgcacgggcaaagtctattgaatggaagcatgtcagtaatgctgcaacaaatacatgaactgcaaactacagtagtttctactgtatagctagaatggcacttacttgattacacttgagtaagaatataaactgttgttttgggaaaatttttgttagaaaactagatttcacacagcccatagaatttttgtcactacccatagaattccattgtcagcgcctacacccgcctctggccgccttcccaggcatggtccaccgtgagccgtaactgctttgaactccttgtctgtcccgttgtaccgtcatcaccttctctgtcatcagtgcgattgcacacgcatggattccctgccttattgaagacattggagacctccctcccgcctacaggaccaggggccttcaccctcaggaatgcccagtacgagggctgagtttgcagtcaaatagttaatgttcatagagcttattagagacccacagcatttaatcctcaaacagccccttcagtaggcactattattatcatcatttgttcatggggccactgaggcacagcaagatgaaatgatttggccaaggtagctcagctggtgaaagagattcagggtaagaatcaaggctggtgcagtgactcacacgtatgatctagcgatttgggaggctgaggcggatcgatcacttaagcccaagagtttgagaccagcctgggcaacatggcaaaaccccatctctactaaaaacatgaaaaattagcctggcatggtggcacgcacctgtggtcccagctatttgggaggctgaggtgggggtatcacctgagcccaggaggctgagaccccagtgggctttgaaggcatcactccactcctgcctgggtgacagagtgaaatcctgtctcggaaaaaacaaaacaaaacaaaacaaaaacaaacaaaaaccaaagaaaaaaagaaagagaataagaatccagactgcctccattttaaaccactaaagacgatttggggttctcctcgtattatctgatgcaactccaggctccagcgagcatgccgtcctgcctggtctcctacccgtggctccgagcacagccccacagctgggagccgagcacgccctcccaccttgcctccccaccggctggggaccatggtgtgcacttccagatgctactgtcatttcctgcgacaacagaacacacacatctgtgaagtctataatcacaaactgagcgaaactcacgaggttatgacaatttcccacctctgaaaataacattgatggatatgtttttaagagactgacacatgtaactctttattaaaaaaattattaaataactccttgaaataaaaaggcagtcatgtaattaatagttatgtactacttgacagcataattactcattaccaatatgcaggaacaaaatgacttctaattttatcttcagagtctttaaaggtaaaaaagtacttgaaaggaagtaaactagaaagagaagatggcttttgtgagtgcttgagattcttcttgacttggaattaaaaaaaactaaaggttaaattacagatgatgttatgctgcatttactgaagcaggtgaatcatgaaaaccacttgtatatctcaataaaaataaattaaacatatatatatatgtagaaggcagtctaacacaggtttctcctactgttgtgttagctaaagatttttcttttaactgtctggggaaatgtgaatttatctgcatctgttcagaattggccaaacacctccacaagttgttcagaattattgacgagtcctgagagctaaaccccaagagacatttttccagcctgttttctgtggtgcagaaaggagcgtggtgtgcgggagcagaggctgctctcagctcatgtgctgagtccaggcctgtgcggagcctgaggctgaactcgccatctttacactcctttaagggaaaatacccctttttccagggaaaactgggagacagacagtcgacgtgggttgcaatcccaatgccggttgcagtgctgagggctggcccatcaggggcagcttacagggactgaggtttgcaccttggcgctggtggggtgtttagtgccctggatggaaacaatgctgggatcccagtgaacagacggcagggaatgttcctcggagggaaaaacaggcctctggaggtgcagggcttggttttggaatctaagctccacaggtggaggccacagaacagctttctcgggagtccccactggctttgtgaagagcagggaaggcatggtgagtgtccaagtgtcatcacattaatacagaattgacacatgtccactgaccatcagacagcagacatgccctggaatgacagcctccacagatccagcccgtgggacccagccccaggttgctaagtgtccccagcgaggcctgcccgacccctctcacccttctcctgctgagctgtggccttcccatgtcctcatcacccagcacagccatgcctcctgctcctgccctctgtgtgcacctgcctggctgccccacttctcacgcctctgcctgaccctgcgctctctcctgcatggacacaggcctccagtggacctcggatgctaaccccacgtctgcccacgctcgctccagcatggacacaggcctccactggacctcagctcctgcatggacacaggcctccactggacctcggacactaaccccacatctgcccacgctctctcttgcatagacacaggcctccactggacctcagacactaaccccacgtctgcccatgctctctcctgcatggacacaggcctccactggacctcggacgctaaccccacatctgcccacgctcgctcctgcatggacacaggcctccactggacctcagacgctaaccccacatctgcccatgctctctcctgcatggacacaggcctccactggacctcggacgctaaccccacgtctgcccatgctctctcctgcatggacacaggcctccactggacctcggatgctaaccccatgtctgcccacgctctctcctgcatggacacaggcctccactggatctcggacgctaaccccacgtctgcccacgcctcaggcacctcttgaactccggggcttcctctgctcagcagccgaggtcttttccgcaggtgctgcctggccctcctcccgtggctgtgaactcccctgcacgtgtcatgggagttcccaggccatccgtgaggcagactggctcctctcaaactcccacgacggcctgtcctcagtgatatttccgggctgcccccacactcgacatggaagaacgtgaatgacttgccagggccatgggcagagggaaggtggctacacacgtcccggcttgtcgctcaccacctgttaacagccacgcacaaagcaacccgcacggtctgaagtggcccgattgttacatgttgtattatatatagtttactatatatttaaaaaatgcaaaaaccacagttacttttgcaccaacctaatataaacatgtatcggtttctgctgtggttatgcatctcctgccttccctcatcagcacccaccctgtgccttcctcctaagaatccctctctgtggggtcctgctgccctctccttgcctgacccactcaggtcccaccttttccccgggccccggcgcacccgctagcaccgctttctgcccaccctggcctggacgcctctccctccccacaggctcacacatcagtcacccactcgaactggagccgggccctcgggtgaatcgttagctcctcgagcaccgagactgagacttatacattttaataacttgggacgtgcacaagaaggggcttgacgagcctcggattgatttattgatttagaggttgcttttctagccaaggcaactgaagattagactcctgatcacggacacttgactccattcggagagcagggcccatctgtgcatgcaagatcgcctcccacaaaggagagaaattctcctccattctttctcttgattgcctttctatcttaattttttttctctctctctcatcaccttcttacatctgttgcaggttaaagggcacagttcaatgtctatcaggtgaactttgactttaaacttaaatctcagtccttgcacagaccccataatcaaagtagaaaaccataagctgtgaaaacttcatgtagaagtttgcccacagctacacagccatggccatgacatctaacgttcctagatttctaatggaattaacttctactggtttgtcataagaaatggagatgcagaagcactggctgttttacagattacactagaaagagacataggggttttctctggcttttctctctctacagcagctgtctgtactgctctctcccagagtgatttctttccttttaattgatcacccattctctaatatacaaaatcaaataaaaccgagacacagcctcgtagagatcacctgtctctttggtcatgtttgtcctcaaggtgccagcacttgaagaggtggagctggagggcatcagccatggagaaggtgtgactccccccagcatcacccctcctccactcacactgcagacaggtctgccccgtctgaaatcagcttgaccctccatcctggaaaactgccggctgatgtgggctttcgcccatccctctgtgactggcctgagctctgcccttgtccacgcgtgggtagatcagaggcaggaaagacacatctaccctggagcaccctggcagcaggtgcctgaggggctgagagcaaacgggcggcgatgcattgcctgcagcctcctctggcctccctggcatgcttagggggaaaagtcgcttctgtgcacattgtcaaggagcgagggggcctcatcagtactttatgataacagcacacaaccctgctagccgtgggtagtgcctgtgattacttgctttctaccgatgttaggctgcgttacgatcggcattcactgttcagcgcttgctaggctgttaattattgttgtgtggctctaagtgatgctttcaaaacattttagaattttgttactgtgaaggcaccgggaggaacttaataagccaagattctacatgagaatgacacagatattaaaacaatgaaaatagtttaatcacggccttttcttccacagctatggctgataaaaatgtgtttctgacacttggccgaatgtcactagagactcagctgtctagggtccctgtttcattctgtacaagaaacctccatgggtgtggaagtaagtcagtttcaaggaaaagaatttgaatcctgagctattttagcatggatctctacgttttaaatgaaatccttcttttcagcgaactgggagaaatacaaagactttcctggtgtgtctttctcttctggaaactatggagaaaaatgaaaccagtcccgccatttgctcacggcggcctccggccaggccctggtcccacttccaggccagcgaatcacggctgcccagtgtcgtgaccactggaggggcctccctggtgtccgttgggttctgactcaagatcggtctgtgcttcttccctgtagctcctgcgagggctggacagctggccgggtttcatttgcctcatgaggggcttggagacattgatgagaagacagagagaggggagtgctgagaccctcagtgaggacaggcgtgaaactggctcaagctgttcgccagggtgtcccctagcaacacagagtccacgagtaacatgttccttggaagtttaggttattattttttaattttgagaggtttgtggttacttgatttactctttctcctttgtttagacaagaaaactaaggcccagggaattggactccctggtgagtgatgagccagggcacagtttctacctgccagtttgcagttggtaaaaatcagtttctgagacaagtgtgggtttactcctagccatgctgtcccctgggattggtggagacctcctcatcgtgatggtcaggacttcacagtgacattctaattcacttcccccattacctcctgctcccatggagctaaagcctcagcgctcaagcaccccgccagcgcccaaccccgccctgcgcccaacctccccactgcgcccaacaccacccagtgcccaagtccccccagtactcaaacccccccagcacccaacccccccagcactcaagcccctcaggtcgtcacaaaggccgggtgcttccgctctgggtctgtccccattgcctgggcacctgcagatcctgcaagtccagctcacccccggcccttcacaaactcccccaaactgccatccctgacaagacacgttgtctctcttcactaaacccctacagcttgtaacctgagacaaaatttgcctgtgacccttgtgtggcctctaggggttacacaacagccttgcacatgccattccgagaatggctgctaagtaaaacagcattaacacaaagtgacctggacacaaagacagggagcgagacacagagaatgcgggggaagggagcgtgaggagggaggaacctgacaaaaccaacccccgtcattccttcatctacttgcccaacaccatctgccgagcccttgctcaccccagcagtcacccagccacacccacttggcacttcatggccacctagacaggagcctctagccttgcttgctagagctgcagttgatttatgagataacccagcaatggcaccaggtcctttggctttgagtgtttcatcttagaaataggagataattatttctttatacatttagcaaacattcatgaagggtccactgtggccagagaccattctgggtccatgaatgggacagactagagcttggccctcccgacacttatgttctcgtgaggatgggagaagatgacactcgtgcaggtaacaggataatttcagatggtgatcaacgcagtacagaagcaaggcagggcataaaggggtggggagggcttcctacccagcggtgacacccttccctgggtaccagcctgttctcagggagggggcggaggaaagtggcttaccctgtgccctggttacagtaaactctctatcagaagccacgagtcatttacatttcagtctctaccctcgctcagctcttgggtctcccatggtgacagtgactctgggcagggcagagggggtgtgtgctggatccagaggctgaagtttcaggcagagaaatggcgactctatgaatgcctcagtgcatttttccacatggtggtttattaaaggtctatgtgcattttagatttctggattacagaaatatgaaggaacactttgggaggccgaggtgggcagatcatgaggtcaagagattgagaccagcctggtcaacatggtggaaccccgtctctactaaaagtaccaaaattagccaggtgtggtggtgggcgtctgtagtcccagatactcaggaggctgaggcaggggaatcacttgaacccaggagatggaggttgcagtgagccgagatcatgccattgcactccagcctgggtgacagagcgagactccttctcaaaaacaaacaaacaaacaaacaaacaaacaaacaaacaaataaatgaaagaaagaaaaaaagaaaagaattatgagggaaatacttatttctcagtagagccaccacccgcggtgaagtgtgggaagagtggcctgtgaaccagtgccccaacagtgagttcctagcttccctggaacaagaaaaaagggtgtgcaacacgttcgatgtgccaggtgcctccacgtggggtcccgacgccatccatgaacgtccacctccaccctttctaccctgtcttccttctttactttcttccttcctccattccattcaatgaggcctgtagagcacccaccactacctggcaccgagacaggctggacgcggcagggaacagctcacccagctttagccagcggggacctgacaaaggctgcctcgggttccactgtgaggtcccgttcctggtgactgggcaggctcgggctcagggccagctggtgtcatgccagggcgtatcaccttcccatgcccgatgtcagagcgcaaaaaatatgcttaacaggaaacccaaatgaacagcagtgcttccgtcactctttgatgcctgggaaggacttctacatccaggaagtgctaggtcaccctttgaacgtcagttacagttgcagtgaggtggctggcagatgaatgggtctggtgatttgatggtgtctgtctactggagatcttgggtaaaggacgacgctgtgtgggctgcagtgcaggaccaagcttccattctcctcctgctgccagatctaggaaaatgtggctcggttcacagttaggaaggaaaatatgtattttttaaatggtaatttgtaaaaacaatgtgagaattttatcagattattgtagttattctggaaatgtatagtgtcatagaaattctaaacaacaacttttctctctgttaaaattctcaccttcttcttctgaaactgctacccagaggtgtggataagcgtgatcttagagaggagcttgccatgcactgccttaggagaatgtgtccgctcttcacagggaaaaacaacatggcagtgggaggactgagacattttaataaaatgctgttgattttcaaaggtatacatcttagaaacatccttgtttttagctaatatttaagctgttcctagggccataaaataatctaaactggataaattcatcattatactaaatatctcatgaagaaaaacaacatagatcttaaacatccaacttcataaacacacttgtgcaggcatgtgcacattacacacacatgccacatgcatgcatacactacacacacatatgcacacactacacacatgcgcacacacacaggcacacaatactcacgtgcacacacatgcacacacagtacacgtatactcacacaggcttgcaaacacaagcatgcacaatatgcatctgcatacacattatacatgggcacacaagtgcttgcacacacatgcacactacacatgtgcacacacatgcacacacactggatactcacagcactagccttgtgaccatgcacctgcccatgtggctgggcctatggcgaggctgtgggctgagttgtggccctcaccccagagacagtgtccatgacggttctccaagtctggtgagactagaggggaaataactgccctaaagccctgagaagtcaaggactgatggcagatcctcacaccagtgtcctcctcccactcactgtgggactgcatgaagtggcattgaatagacagagacctcacagcccagcagtcacgaagaaccactcccatctgcacactcgttccaagttagcgtgacatgctgtaaaggctcatcttatgtggcaacttgactgggcttggggctgcccagggggctggtcaactgttatttctgggtgtatctgggaggatgtttctggaagagaccagcatttgaaatggtaaactgagtcaagaagctctgcccttgtccatgtgggtgggtgcatccagtccacagagggccaaatggaatggaagctgggggcagggtggatcgcctctgctggagtgggcctccctctccccagggcctcagactcccgtgctcctgcttcctctcctgcttttcctgcttctcctcctgcttctcctgcttcttctgcctctggactcaggctagggctacactgttggctcccctggttctgagccctttgggcttggactgaactatgtcactgatttcctggttcaccagtgcccaagcagggattgagggacgtcttagcctccatgatcacatgagccagttcccataataaacctccccatacacaggttgagtgtccctaatcaaaaaatccaaaatccgcaatgctccatagttcaaaactttttcagtgccaacaggaatttcaaaggaaatgctcaccagaatatttcagatcttggattttcagagtgtggacgctgaactgatgagtgtattgaaaatattccaaaatctgaaaaaacccaaatcccaagtgaacatctcaggtaagggatactcaatgagtgagtctgtctgtctgtctgtctatctatcatctatctatctatctatctatctatctatctatctatctatctatctatctatctatctatccctctatgtaatctatctatccatccatctatcatactggttctgtttctctggagaaccctggctagtgcacacactatcttatattgaataatgctgagtagtttccaaaatattttcacatgaaattttgtcagttgactctccgagctggtgttcaggggacaggctgtcctgggctctccctgagggtttgagcaggcccagggactcagtccaggcccccgactctgacccctcctctagtgtggagcagcctgaagcccgagggagtgtcctgtgccagcaccatgtgaacccgcatgtccaggcgacccgccatcctacatggcacctcacgagccccatggagctccttgccagcacagagggacacagagctcctcgtctccaccctctcttcacacctcccttgatctgcacatttctgctgccggctgtgctgtggctcctggggcccctctcccaccctcgcctgctcccacctgccctctgcgcctgtccccacgggtgtgtttcctcctccctcaacaccgggaggaccctggggccacacccgctccagagtcagattcaagtaagcaggtccttcagccgaaagtggactcaatggcccaagacctaacccatctgtgagaacactggacatgggcatttgtattttgcaatcaggccacagacacagcacacagaggtgatgtttcctaaagaaaaccacagcggttgttttcccaggactctccaggtgtccagcctaggcaagggcaaggtgacctcagaactggctgttctcaacgctgctccttggaaacgtggacccccagggaccatctgagctgagaggaggggcggccggctggccctgggctctggaagctccttcctccaggcactccttcctacctggaaggatgtgtttcttctggagtttgcaggttagggtcactccaggtgtacaagtgtttggaaatgaacctgccaagtattgtcatatacttggcaagattcctgcactgaattcatgtttattataatatgtcgcatgacctcaaaactttagaagcacacaatatccatataatctttccagttgatacactctgaagagttatatgtatgtgtaataaaaatattttaattgaattcaattcattaccagaacaaccaacactggttaactgaaagcaatataaaagtgcaaatattcattaatagtccatttttaacaagctctaataagcttttcataaaaccagtagttactttccagaacaaacattttttaatttttctgatctattctcattctagtcgattcttggtcacagctggatgtggttaagcaaaccaatctgtatttgtaaaagctggttttcatttcaaccctggaaagctggcataaacttaaatatttctctggatccaatacatattaactaaagtaagtgtatttgtgaaattgaaaagattataatgtacactgaaagagtctatggcatttttacaattccaaatgtatcttacgtagaggagtgcctttaaaaaatatcaaccatgggtgccacagtttaaaaacacacaattttaataggttaccttgagaatgatcaccttccttcattatttagatcatttctagagtgaaatgttcccatgttaatttattcaatagagtttttggagtcaagctctgtgcaaagtgctgggcctggagtggtgaactcggcaggctgagcagtcctggcaggtgcacgtcctatgtaacttagaatacgtctgcaagatcttcatctaagacggtatgagccttgagaccacagcgctgtgcttgctgaaagcattagtgtcaaattttcccttggagaagaccaaacccaacaggtccccttgagatgtggctctgcctagtgttgcgttgaaatctccggatgatgaaacctccctgctttgtgggtgattgccccgcccactctgagcttccctccgtcgggacagcctcacgttggattaggttcaaagctctcccactgtcttcatctcccttccctccctgtgaacggaactggctggccacatttctcttagagaattttaaatcattactcagttactcttcatttatctcagacacatgttgagcgattctggtcccttttatcttcactcatttcgttccttgcaataggctttggctatctctggacacctcctcactctatccctggacagttgctggtgtggctgtcaaagcccctccactgacccagaggcctcttatctagcaacagggctctctggaacactgtgcagaaaacctgatgttaaaacaaactaacaaagaaacgaagagacataaaccacggctggataggtaaacccagccgtgacgaagtccacatgggacatcagtgttgggctcccaggtgtggctctgaggcacgtttttggaggtcgggtgctcccttgttaaagctgactttataccgggaactggtttccagtacacagaagatgagaaatagctcaacggagcgagttgaggggggtgcaagacataaagcaaggctgggagaaaaaccaaaactggtctaggcagactgactttcttaaaaagtactaaagagccaggtgcagtggctcacgcctgtaatcccaatactttgggaggctgaagcaggcggatcacttgagcccaggagtttgagaccagcctgggctacaaagaaaagtcccatctctataaaaaatataaaaattaaccagacatggtagtgtgagcctgtagtcccagctactcaggaggctgaggcaggaggattgtttgagcctcagaggttgaggctgcagtgagctgtgattgcaccattgcactctagcctgggggacagtgagaaaccctgtaaaaaaccaaaagaaatggtgcctatgtaatgtggggggaggctccgcacagaccagcagttgcaagagataccacagttcatgccaccagtaatgccaacaagaatgttggtaagaacactttgttgatataaatcttgtacttattcaatttttatatatatgtagatagatatctatctatctacatatatcaatatatagatatttgatatataccgatatgatgtataatatacatcatatcaatatacaatatatgaaatatatcaatattatatgacatatataatattgttatatatgtcatatattatataacatatatcacaaattataaaacatataatattgatatgtaatatatataatattgatatatatatctatttctatgtagaatatatataatatctctctctatatataaaatttccaaccaacacttttgggtcacctttgtttaacttttggcacttacaataacagtctttcttttttttctgaaaagtgccctcatgatttaatactcattcatgattgaaaggctgttgcttaaatcttacagaattaaaggtgtccgcaacacaacagatgtagacacactgaaggaatacttctgcctgagccattttattttaaattactgagatttcttttaccacaagtggctctgctctagctaacatcagatacttggcagtttatatttctgccgtgatgatgtaaatcctgtttccacagaatcctttaaattccacaccttgccagctcggagtgggaaggaaggagcagcgttgcctgtcaccagcttcattctttaattatggcattcttccttgattagagctataatcacatagcaatccccaaatcttgattactggtggaaaatgcaagtctaatgaaacccattatactcttgaaaagcaaatacactttcttttagaagatggcaagggtttttgtcttaaatgattaccctcaatgcagaatttcagggtgttgaggttttcaaataattttccctaaaataacgtatttgttccttgatcctaagaagttacaatccatggcaacatgtagggaaagtattgtaaggtgaattcttgtcctctaacagtatgattcttctgattagatttctatcccatccctataaaatatcaataacttaaatgtgttgccactcttaaactgcagtttcatacgatgatgtattaatcgctcgcaataatttgcctcgtcaccaagttaatgtgtctgcgtggctcctgtttatgagcaaagcaaacctcctactgctccgggctgcctcctaacgccacttctgcgatttccctacagacactagtatcaggggtgctgaatggaaaagtagaaattaaaatggaaaagttctttgtctggcattgaaagaaaccgccaatatttttatgtgagaatgaacagttggagctgcttccaccagaagacagaaaagagaggtttgggggaaaatgggtcttgggtggctgggaggagatgctccaggctgttttccacatggaggaaacttggcaataatgaaagttccttttctagctctcattagttgcctctgtatttcctgaattaccctgtcacattcaatacccaatataaatgaagcaacttttaatcattccaggagagatggaggacagatgcagatattacacttcaatatatggaagtagtctcaaaatgtcattaactcgtgaattaacaatgagctttgattgttgaaaaaagatgacatatttccccatttagagtttgggacaagaagttaatttaaatgctaaaagtacatatatttgactaacttgatgtcacatatatctcttagcattaatacagaaatggcatttataaaagccataatgcatgtagctcaaggcaagctttcttaaacagtttgactcaattgagaccttataaagctttggtctattgttccactttcatgaggtttttttttttggtcaggccaattatagcgaaggatacatatttcaggtgaacctttattgagtgctgactgctagccagacatcgttctctgagcctcgtgtgcattacacagtttcttacaacaagccgatgaggcagataattttatcaccatcattttccaggtgagtagaatgagatttaggattaagtgttttttttgtaaggttgctcatctaataaatggtggttcccactgcagccagtcctctccatgtctgcgagatgacacagctggacccgacgagctgggagaaaaggcaaaatcaccactcatcactcatcttctatttgcttaaaatggtgtgtcgggggctcacatacttctcatccgtgctccctccatgcaggtgacacaagtcacacaggtctttttcttaaaggaggtggagaggctgccttgcctgcactcacacggacttccagtggggaagaagccgtcttggcgagtgtcttggtttgagatcatcagggccataccctcatcatggtacaagtgtttgtgcagtcagggtggaaacagcagggagcagacatgctgtggccatctcctaaagctggagcacttcaggagaatgggagggccatggtcccatgggcatgagtgctctcctgctgcctgccaagcctgtcctggaactgagccaggaggctgactgcatccaggaagctgaccgcatccaggaggctgaccgcatccaggaggttgaccgcatccaggaggctgactgcatggttcttcctagagcagggcttagagcctgctctgtggtcagtcatgtggccctggaagagaagtccccagagccttcaggaatgtcccagggtcttggaatcagagaagaccaagaaacgccaccagctttggaactgggtgagctttatctgggtgtttctccctggctggcccacagtaccagaccattcacgagcagcctgatgatcacagctgatccttaccctaagaaagctttgggctccaacatgacttcccgttcttataaaacacaaagagggccgggcgcagtggctcacgcctgtcatcccagcactttgggaggccaaggcgagaagatcatgaggtcaggagttcgagaccatcctgaccaacatggtgaaacctgtctctactaaaatacaaaaaattagctgggtgtggtggcgggcgcctgtagtcccagctactcaggaggctgaggcaggggaatcacttgaacccaggaggcggaggttgcagcgagcggagatcatgccactgcactccagcctggatgacagagtgagactcctctgtctcaaacaaaacaaaacaaagcaaaacaaaacaaacaaacaaacaaacaaacaaaaacatgaagagggctcaggccaagccgcaaagccatgacctgcccttctaacaggcacagtggttctttgtggaaccactcagaaaaaaacttcaggccttaatggggtgttggcgggaagatctgaagtgtgttttaatcccacagcccgtaaacactggatgccatcgatgagggagcatggcggctatacttacatacctctagtgatggggaactcactatctcctgagggtgtttttctgtttctcccaaggaaatttactccatccttagccagtttgttagagattgtaccgttgtaaaattcagtttagaagtctcgttttccttggacaattatagtcttactccttaagtggaaggggttgagttcaagctctccttctgaacgcctgcttctttaatagggacacactagggagggaggggtagatatcatggttcctgtccagtatgagaatcactagtgttgttgaaagaaagtgacaaataaacagaactaattctaccttttttaaagcaggttaaaagcaagtgtcagagcttgcagtttgctgccattagaggggctccaggggcccatttacattttgacataaaatatgaggaaaacacaattgagacagaaatcataaaaatggcggatgctctaaactaaacccacaagttaagctgaacatcttaagcattttccagataacaaactacgtaggtgaatcctgttgttgcctgggagacacacacacacacaaaaacacacacacagacacaaaaacatgcacacacataaatgtctatacactataaatatttttatggacaatcttctgaaacactattaaactatgaagtattttgtttgttttgtatatcatttgaaaaatatattagtgagaagatagacgtctcaaaaggagaccaatggtaaatggtgaattttagtaacagaaagtaaaggatataagaagaaagcttagggtgagatggtgaggtgaatgtaacgcatcccggctggacaaagctgccctgtggtctcacttggctacaattgcaagatccgaaattcactcttagctaacgtcagtgaacccatgaaaagcttagattctagcgaaaaagtattcattgttttgtcttcattcttagttatctttgctaaaaggaaaggttagctaaatctaaaaaacattttcataaactacaaatatatattaaaaatatctgtaatggatatgaacaccatgtgttaccaagggtggatctcattatattatttagcacccgatataaaataattcaataaaaagtctctgggcatttaaatctgaatctagcattgacaaagcatggattagctccaaaagggtctaaaagctgataagctccaatcaaagcaacagcacgaagtggtgtgtttccactttgacctgccacgtgctgacctatcataactgaagtcagctgctttattataatttcataaaaacaaatgatgtgaacaacccaatatcaggtctaaaaaccacataggctgttgtttaaaccacagcattttttgaaggaaataaaaggtctgtatttatttctagaacacagaagctactggggttttagccagaaactcatctgtagttaaaagagcagcagaaagctgattctttaaggtcttagggagcacctgtttcactgcgtctttgctgcgagagtgtggctgggagactctggcccctcctccatctgcacgtcttaccagcatctgctagcgttctgctttccaagttagtccgttaagattatttccttataaatcttttttaaaaaatgtgttcctggctgggcgtggcggctcacacctgtcatcccagcactttaggaggccaaggtgggtggatcacctgaggtcaggagtttgagaccagcctggccaacacgatgaaaccctgtctctactaaaaatacaaaaattagtcaggtgtggtggcgggcgcctgtaatcccagctacctgggaggctgaggcaggagaatcacttgaaaccaggagctggaggttgaagtgagccgagatggtgccactgcactccagcctgggctacagagcgagactccatttaaaaaaaaaagtgttcctgttataactaatttacattttacctcagtgcaaatatttgacatttattatgatttctttttattttttagaccaaaaagtctcattctgtgtatttgtgccattaatgacttcttttgaaaatttgacccaaaagctcagaaatcaaaaccagaacttgtgtgaggtcataaacttcaaaagcacacggattttggctaccttatatcaaaaatactcaaagcattgcttgccacattgtcggtgctcaatgattacttgttgaatgaacaatccacccaaatcctttaacttcaaatcttcctgaaacccgtgaacttggccctgcagaaagggatgcaggcacttcagttcccctatcttcctgggatgagttaagtattagtaaacatcgtcaacagcagaggcagccacatgcacgttttggaaaatttatgtcagtatttattacaattaagtatttcccagttgttatggctcaaataacatattatagccaatcagatcatttgatcagaaaaaaccaccacattggtataatttatataaaataaaagcaagataaagaaggagctactagagttgacctgctaccaataagtatcactcaccacagggctttcaaaatagcgaattagctcaaggccatctcaccatagacactcacacactcacacactcacactcacacatttacccacaaactcacatccacactcacatgcacacacactcacactccctcactcacacacccactcacactcagtattcagacacacatccacactcacactcacacacactcgccccttggctgtgaactgcaggcaggtatgttctgggtgaagcgggagaggcagacggcctgcacactgacccctctaagtctaggaaacctccaccccgcggccccctcctaattagcaatgacatcagcatgaacggattcccactgtgtgcaagcgcagggccaagaggcctgggtgtttattcaggtaatgcaactaataaacaggaggtaggcacacatctccactttacacctggggaaactgaggcacagacacccaaaggccatgggactggtgagcagcaaaactggaatttaaaactcatctctaatggactctactctgccttccctatttacggtgctacattaaataagacatgccatcaaacacagaaaaaacagatttctgcctaaagggtgttaatgatgttttacatgaaagggctggaatttcccttttgcagcgttttcagtacaaagtctctgcacctataaacttagccacctgcagatggaaggtgaatgactcatttttccccgcactcactttcataccagatgaggcaacttccagttacacttgacgtgttacattttcccagactggagggctagaggccactcttaggtcagggtcacctggagggtggctgatggtggggggctagggttacttcatgatttcatcccccaaaaaacaaaagcaacagtgacgtcagcttcaccagtatggggaagtgagtgaataaggtggaagagggagctgccatgacctgggagaggccaggaagaactcaagtcctgctgcgaagcgcgtcagaaccacggacagctcctggttccctatcccttagggtgcctgggcttcatgaccacaaaggtcccttccagcctccgcatgcagctccaaaatcaagtttttttcttttttttctgtacagaggcattggggctaatttgctgtctctgcagaaacccaatcccagatctctaattccaatcctgagaatgattggagcctgcggagtgacagtgacaaggtgcctggtggattaggctggtccctagaaaagtggatgctacattaggtcagtaatgtgaaagtagggcggtgtgatctcctctccccaggcttcctcatggagagcttcattaccgaatcgcacgcagcccacacggctgtctcccggccccactcggcccaaggtaaataaaactccaggttatctcaaaggcaggagtggaagcagctaatgcggggagatggggcattcattatgccatttacacgagctgaggataaatgatcaaattccctctgtcaaccacaaagagctcaaggataatttttaaatgcaggaagtattcctccagggcttttgtattttcttcctccaggctgcagccgcatttgcgagtgtgccaagctacgccactactgatttactgcgctgggaacagcactccatcaatgtccccgagctgccattgccaccaagctccccctgtccccgggcgtctttcttacagaagaaaattattcacttgcttgtatgttacatgcaaaacaaactatttttagctgcctacatctgtcacctccctttgctatccaagctcggtcgggggagcagggagaaggagaaggacaaaggagaggggaattctcaaatgttctttaaaaaagcaaaacgtgcacatgctggtggtgacacaggttatcatcggtggtgacagagaaatgtgcaggctgttcccattgctgtcacatgagctttgtcttgtcctgccaggcgcctacgcggagtggacagtcaatgatgctggcggagcacaagcaatttttcttgtctgtacaagaaaggctccatggagtctcctgctgctgatgcctctcacacttgtaaggagggtgggaagcctttcaaatgacttttctgaccgaatgagagattgcattggcactgaattcctcttcttgaggttctggattttcactttgttttgttaatgtttaaatttatgactcgagatttcactctcaaatagtgatggctaggggctcttccagtgtgactttgtcacactaattttcgcaagcagttttaagagtgcgtgtcacgcctatacaaacacacaaaaaagaggtcaaggtagactgtagaatgccagcgtttggctaaggagggtgtttatgtggtcagtgtatataaaaggaatgttattttgcaaaaatgccaacgcatggaaaactggtgtcagagaggagaatcagtgggtcctgggattctggcaggggatctggccccctttgcaggcgatgtgggatgacacagggaccaaggttctgagcacttaagacgcttcagtcagattagccaatagcacgattcgctccatgctcattgttgcattgcttacgcatgcatggctatggtacagcccactggatgggctctaaagccttaggtgtggcagaatccaaaaagactgattctatatgtccctactgggaggttagatggaccagggtagagatgcatgccagcccatcgacctggagcctgcacagctatggaactcccactgcccctgcagtgccattgcctagcagaagtaagggggatgcaaccactttgttacttccacataaagcctctaacttgacttcttgaagtttgcaagaagcagcatccacttaaagtccaactctgattgtgacagcttcctcacctggtctaaggatgcctcagtcacacaaaaccaaaactcacaccgtcagtgtatttaaacgtacatctaagcactcctcagaccggttggagactctgtcacatctaacccagctctgagtccatccctggcacttgactgcctcccacctccctgccatctacacctcatctccatcacgaaactctgcaatgttgagctgccccctctgcctctcctcctggagttcactttaacgcctatactccaatgcttgggatctcttcttttgctcaagacatccctttttcatccgtcattcttcttcatttatcaggtttattcattcataaactcaatcagtcattccagcacagggaaggtgcgctgtgaggtgctgtctgtccctgcctggtggagctcaccatcctgcagacatgaaacagataatgacaaatcacaaccagagtggtgttaggagacgtgtcccagggacacatgaggatggcacccagtctgatgcagagaggtccaggaaaggctcccagagggaagatccccatgtggactctacaaggtgcacacaggtgagttaggggcagcttaaaacccctgagggatttccattaggacacacccaggtctatccacatggcccaagtgctctgaaaacgatgtgtcctggggtccagcctagctcgtgacagttccctttactgctgccatcttagccatgctgggctttgtcaagcagcaaaatggcatgaaagctcaagcccccatgcacacccagaccatgtgcatcttgagggactattttctagcctgggctctctctctctgcatgttcttggcatcctttgaatccacaaacaatgaacagtggtctcattgaataggaagagagcaaatcagacattgaaagaaaaactaatggtgtgtgggtcttgatgactattgggaagggcagcggctttagccgctggtgggcgtggctgcacggtgaactcacactgctgccaatgcagtcacagaagacagtcaggttgaccccactggcagcaaaatgccagtctttccatcaagatgagagcagggctctggactcaaatccgaacttgcaacagtcccttctagtcctaaattctctgctcttcaccattttgctatagctcagacaactctctccctttttgttcatttgttttcacatgtgggagggggtgtgtgatgtgctatttgaggtgctgatgaactcagcaaagaccctggagatacactgagtgtgattgctgtgtgctcaccacaagacaccagcaactgagcatgcacccttggtgcagtcttgccagtgcctgcgtgcctgcgaccagcatgcaagagttcctctggatcctagaaataaggtggctgtcagtgagggaggccagtgtaaaaatggaaaggccccaccatttttgggaggataaaatccaaaggagaaaactgtgtgccgtgttgccaccaacactcgcacgagttccgtcctcactgccagtgttattcattacagtgcctgctgctctggaggcataatttaaaaagatgcattactgcagagaccctccccaagataagtcagtactctgaggctctttcacttcaaagtctttttccaggaacgttagaaagaagaaagtgctttagagttctttgtagaaacatagacaattgcaggattgcatgagtcactattttctgttagctgtgatttcttctaccattggctccttatgaaaaaaaagtgtgtgtgcatatatgtgtgcatgtatatatgtgtgtgtgcacacgtgtgtctatatatgtatgcgtatacatgtgcatacatgtgtgtgcatatatgtgtatacatatgtgtatacctgtgtatatacatttaaatatgtgtatatgtacgtgtgtatacttgtgtatatacatgtgtatatatatgcctgcatatatgcatgcatgtgtgtttatgtgagtatacatgtgtatatatatatctgcatgtatgtgtgtgtatagtgtgtgtatatatgtctgtgtggggatatgtatttatatgtgtgtggatatatatgtgtgggggtatatgagtatatatgtgtatgtgtgtatacatgtgtgtatgtgtgcatatatgtgtgtatatgcatgtatgtgcatgcatatgtgtatatatgtatgtgtgtatatgttgtgtatgtgtggtgtgtgtatatatgtgtatgcatgtgtatatgtgtgtgtgtatgcatgtgtgtatatgtgtatatatgcatgtgtgtatatgtgtatgtgtgtgtatgtgtggtgtgtctatatatgtatgtgtgtatgtattatatatacaatttttaaatttagggtatatctcgaactggaggctccagtttatgagcctgaaatgccattaaactggtgtgataaattctaattgagtggatacatgtcttctctgagagggataatttagggaaatccaagaagactgcagtttaaagccacatagacatgttagcagaaagtttaggaaactgaaaacacatttttatagttttaaaaagcttctgttttcttttttctgaagtgtaacatttctctggcttctgaacttctgcaggtgattacatgaagtttacactgtatctgtgctgcactttcccctttgcttcctaaaataattcatcttccatagtaacagtctcttcaaagcaggatttatctcgaaccctttcacacacaaccaggcacaaagtcacgttctttaccttgaagctgggacacaggaagagccgtgggcttgatttccagcctcctcctcaagcatccccaggacccttcataaacggaatgaactcgagctggctcaactgcttgttttaaaagtgtgttttttaggaaatacttgttctgccatctcccccatagttttacaaagtaaatcacgttgtgcttggaatcgtccctgcctacgctcgagaactgttcacttagaaaataaacatgtgggtaagcattggtccatacgtataagcgatcaagagaccctggcccccgtggaaacatgttttcaggcaatccagctctggtactctttgagctgcctttctattttacggcatgttcagaagatgaatctaccattacgctgactaacgaagtctagtcatagcgatagcggtgtcttagcagcagaagtgatggttggttaactgagcgtgttttagacgccatctgcattacaaagtatcttccatggggtaggccatggagtcagcaccactgttctcgaggggcagtctctagctcctcatcttacaagggcaactgacgctgacattcaacaactggtgcaatgtcagctgcaggcgagtaggtggagcaggacctactcagcaccaggcgggctgcccctccacagtttgcggtgataataaggcactttacagaggatgctaccatacttggtatagaaatcttgaaaaagtggatgctccggtgaagctcagagaggctgtgtggggtacccggggtgcacaggcacggacctcagacgcaaactcaacacattcatgcccatctttccatttatgtttggttggatcagcctaatttgcttgtatggaatgaaattcagaaaaaaaagaaggatgatttatttttacagcctttgaaatgtccttagtcatgtacttgtacttggtttgaaatcgtatcataaattggaatcagggaatttgaagggaattttcaaagtcccttgtgactctacatgtgcaatcttcagcatcgagtattccccaattttccacaggggatacacttttctatcatgatctgggcccctgtcctgcccttcagccacagttcatctttcctgaccattctgtcctatgataacgtctccctttaattttctccgtggctcatttgacagctaacctgtgtccacttttctgttttaacagctagcttctttacacaaggtatgggtgtctcaaatgtttaggcacatatgtgaaattctaattggttgattgctttgccagaaatgaccctataacctgggccagattaccagatgtgccagagtgtgctccagtcggtgggatatgcccctgggccagccagggtgtatctcagccagacagccacaagatgcagtgctggacaccccagtcctgagttgatggagctgctgactttctgggtttcagctgtatcatcagtaagagtgctgtatctattcaggcagaggagatggtctctccagctccactagagatcttagatctgtgatgcacaggtaattactcctaaaattacctgagacgatttctgaaatcatgagggagtggcttcctgaggagcgatgattacacaaacccgggaggacctggaggtcctgcttctgtcactggctgggctgcgtatcataccttttcataactacaaaccctccctgaaggtcttcccaaggtgaaatatccaagaacaagtagactgtatttgctcttgctgttgttccccatggtggacgcttgccataaatatggtggtggtgtctgcaagactggctacgttcatgactgctctcacatgcttttctgaagcatagattaagtggcagctctacaaagagtgagatttatagcctagtttatgttttttgggggtaagaaattcttcagtgtttctagaagctacttaaccttggttgatgtcacttaaaggagaggaaaattctgggtttgcaaggggagcctcctggtgttttgagtaggtcagcatccacattaccagatggtaaagacactttgctaggacctttgacaagctaagtactcgaggggctgtgatactgaagggggtggagaatggaggtggctcataaataatgtggtgctggtaggctgcagcccagacatgaccacagcgcagggaaacgcacctccgccagtcttggcgaacttcacagcaccttcccatacaaaagtggcagatactgatctaactgcatcagaagtccttgctatcggtccgtgaaaggtctaagttaatctgtcccttactatcttaaattaaacgggcacatgactccaccgaccgtccacgaggtctttcctggagtgaagctttaattctctgtccgcccactgcagtcccggataggggagtaagaaggtctgacagttaatgacacttgaggaagatgtgcgtgcctggagcttctcagcagtgggacatttgcccctagcagagggtcgagggacactggcaaatgctgacgtggatgtagcacggtcaccaaaaccccgcgtgtccgagatggtggagcagcttttcccggctcatgtgagggctggccagccacacagcaccaggctgactttagcagcttggtctcccaagccgaggctatctgaaggacaccagagagctgcgtttctccttctgtgccaaggtgaacacacaacgcttcagatgttccgctctcccctcgtgagacagacggcccggcttctgtgtggctttggggatgggagtgccagtcactggccacagaatgacaaattgcctccctgccaatatcagagcagggacagttctcgccacagcgtcctccagatgggcccaattaaactattagccaatgagcaaggtctgatggctccattaggaaccaccctgtgcttaaataaacagctcagaatacatagtttctccatcgagccctggctcggcgaaggccccatctgggcaaggtctccaaggttggccctggcgagccccagggggtgttggggtggctggggcaggccgccctccctggttctcagggtcctgcaagccacaccgcagtgggtgatgtgagagagggggcagcacccccacctgccatggccagggccaagttctccaccagctgcacccctttgcttgtgcacgcctagacaaccacactccctgactggatggaacttccagaaccagcccctgacctcagcacactagtcccttgccagctgtctttcccacatacagaaatttcaggcccgtgctgtttggctgttcatcatttgtaattactgccaagcaaggggcacatttcgtgcagaataaatgaagacagcagacagcgaagcggggccttactgcctgagcgtggtgggcgtgactctcggggggagcgggggctgcctgcttatgggtgctgctttctctctgcccgtgaaggtgaccatcacacaggcccagggcccctcagggctcttctcacccccacacgacccagggttggttcccagtgggagcagagcctgcccaggagagaccgctatctccactggtccagcttacacaaagatccatcgaaaagcatcagttcttgagaaaaacgacactataaataaaatggttttcaatacagagagctgggctccatcaaccctgctgagatccttggggacggggctgcgcctttctctttgtgattatggtcactgtattccagtaatttgggtgaactctgattggccatccaatatctttgatgttctaggaggtcacacactgcaaaaagcaaagcgggtctgtcccctgcttgcttctattgggaggggccacctcacgccctgcagcacagccctggccagtgacagctcagcatggctgcccagtctcagcttttaactggggcatctgttctgcaaatgctcctgagcacccactgtgcaccggccctgctagggacgtagcagtgaccaggactgccaaggcccctactgggtttaattcattccgtgtaatctcaggctgctgccagctcccgggaagaccaagccatctgtgctcctcccgggagcatcccacttcctttccagagctcggggctcaccttttggattctgtcctcctaccactgacatctgctcttaggggaggaagagaaacttcctcggggggcaaatgagaaatagctaatttgtgcggtgtgcaaaagaaagtcattgcttgctagaattgttgctatgatttttccttattcattaatttccttttgctactgggtagcatattgttgttcttggtttgtgttgaccttttcagtcctcatgaaaacaagccgtcctgaggcaggccttctttgcacaggtcagcatcagcaaggaaggctcattacccatttttaatgcagttagatggtgctgaacttgactgtgtgctttcactccaagatttgccctcttatcaccccccaagactaaggtcttggcctaggactgataaacaaaccagccgatccgtgacagtgatggaagggtgcgtgtgtgcagagttggggggcatgcacgctttctctgctctactcctcttctgccaaggccagtgtcctccctgagatgccaagcccctcagacgatggaggcctcctcccccctgggatcctgatgacaaccatctcaggcacccaatcacagagtgcttggaaatggccacttagagcttccctgcaaaagggtggctgatcccaatgtgaggctgttgttgtctccaagggccaccttcccacggaggtgacttgcacgagggtgtcagcgtccaggggaaatatggggctgctgccacagcctagagacagacaggagatggcgaggagggagactggtgcccaggcgctggcttgcctggggtcccagtcatggcagaaggacttggggagacagcatggaacaggaatccctgctcagagctgctgttgagacacagaaagaacctcccttgctggtgtctggcagagggtgttgatgacagtccaggggcatgaagaggctggggtttgaggctgctgtaggctctgtggggtcccaggaatgttggggggcccaggaatgtgcccactttcaatcttggtcagcgctctccacccgacgccttgtgtgcctgcagagccgcagtctccaccagacgcctcgtgtgcctgcagagccacagtctccaccccacgcctcatgtgcctgcagagccacagtctccacccaacgccttctgtgcctgcagagccgcagtgtccacccaacaccttctgtgcctgcagagccgcagggtctgggttttgtggcaccacatgttcggtctcatctcctcccaaatcctgttaaatttccctgaatttaggaccaggcccaatgccatggacacagtagaccctcaataaatgagtaatcaaattgatggtgaagaactgattttttttcctgttaaccctccctagcagggtttttattaatggggttttcagcagcttgcgattgaaaggccgccttgccccagggtacaatgaagtcaggacccccaggagggaggctccgtgtggctgggggaggggagtaacagaatgagcataaaatcgcagggagatgccccacagctgccccgggggtcctgggggctggctctgtggaggtagaggagcagaggtgccttcagcatccgatgctcctgcctgtgtctgggtctcctctccacgcctgctccttccccatcaccctgttctctgtggccattgcaggtgttgtaagccacatcaaatccacttgaaatggggtgaaatgaatctaccaatacctgaatcagtcagtagcaacctgaggtgatcatgtagttttctggttgcctgaggcttgcatttcaggctcagcttcaacaggttccagtggccatggggacaggaagtgcacgcctcccccgagggtcttagctcacccaaggctgcagtgtgagggccacatttcctgggggccaccccatggcactggctaccccaggggtgctgagacaggcctgttcctggagaccacctagaccctccaatatcacctgcttctgtctaagctctgaaatccccttccggcgtggtggtgcctcccctgtgcagccccacccagaacccctctttccacctgtgcagtgtgccccagcttccccgcagggtggcagttcagggctcactccccagcttcccacttactgcccacctacccctctagacagaggttctgccagggcggggctttcctgtttcctttggttctgtcagatcccagcatggaccgatcccgaagtgcagtccctcagagggtggagtgggcatttatgtgggctatttggtaatggcagcaatgtcgcctctccctgacgactctaccaggttggccctgcatgcttctgtgtgctgcaggtgagcttggctcatggctgctgatcactgcagccccttcccagccacacgccaggcccaaggtgatgcatgctgggccatgccaggcacctgtgatgaaatgctcagttgtgtgaaggtgctggccagcccacgagagctggaatgccagagtcacattcagttacaaggtggagccatcagcacagcaggcaggcgtgagggtgaggacgcggtcgggaggaatctcacttcccctgcagacccttgggagagatgcaggggacacagggcgaggactgggaggtgaggttccagcaggggcagggttagccctgcatggggcctttccttgaggtttctctgtagggtgtcccctgagccctgaggccacaccccttggctgctgaacctgcctgtgctatgacagttcattgtcctggacaataaggcactagaacagagggggtgttgataattaagccaagctccatgctgtggaaagcgggtgcccactcaacaccccaggtctaaggggacgtggcaggtttcactcccagactggccctaatgcagaagagaagggagaaaccaccaggttcccacattgccatccaggcatcttttccgggctgagttttctgcaaggcttgtcgggtccatcagaggtaaaaactgcaacgcacacctaattatacctaatttgctattgattaactatttattctaacagaaccactgtaaaactgtcctgtgtgtttaactatcaaaataaaggagtgctggcaccttctgcattttcaaacattctatgctctaggtcaaagttcagcatttttattgactctaaacaggagatggaaaaccacattagaaaaagtggaattaaaaaaaaaaagaaaactggaaatgcctttttattagaaaatggcctcatgggcatggctggctttcaggagtaagttcatggaggatcccttttgatgtgtcagtactggaacaagcgaggttttgagtattttcagtagcatctttgttcaaagttaatcttgtggatatcaaaccacctcttggaaggaggaagaatatctattttcatgtttacattacaaaagagcttataaattagtgggtttcactaaaagttgtattgaagtaagctgtgggttttgtgtgaggtgtgaggtgtgcccacacacctatatatctcgtttatctagcttcatccagacaaaacagtgttcacatttaatttttcagataactgaaataaagctgtctaagagtaaagtctttataaaattgtaagcacttttattaatgcacttctgggatatttttcttactccccctgcttttgaaaacagaaactacatcataacgtaatcttttaaaggtactacatcgccaaaatgggcatcaattaaaaccctggaaagtaactttgaaataatcccccttgtgttagtagaacaatgtatgctcatctggggcctcagatgacgtcgaacctagggactcatggcgtctcctccaccaggaatccctgccagcctcccagggtccacgtgtaattctacttttctcttctgccatgactcctagcccaaagacaaatacttctttgcaatctcatattgtgctaattttacaacatctgatatttttggggtggtattagatagcttcactttcatactggttgagaggttgggggaaagagagagagggaaagagagaaaaagggagagagagagagagagagctgctaataatatacaactctattcctctagtgcgtggtcttgtgaatgacgcacacttgttgcataaaaggcctttctcttcatattggggtgttggctatgacttgagatttgggactctcacgcgtcttcatgtgggatgtgccagctttgactctgtgactagaactgacttctttaggccaatgtgctcaaagataataatggtaattaatctttttttaatgtgcctattatatatgggaaggttatcttaaaattaaaattatcttcaaggcttatttatcctgttgcccagagaatgctgtggattttttttccatgccatgaagtagaggcattaggatgggccagaaaaaaacaaagcaaattccttcaaagataagatactttaagttgaaaaatcaaggaactctctcttcctaaagcagtggtacccatctagtgttttgtgtgtgtgtgtgtgtgtgtgtgtgtggtgtttaacaaaagttctcataaaacttagggtttctgattaactcagtgatgccaaattctattttttttttccacaacgtacaccatagaaagcatgcagccttgtgaaaagttcgaaaagaggtcttcagattcagagtctccaggtggccaatttcttctgatctagattttcaaaaaagtatgaaagcagcaaaaagttattaagcaaagctcaatggcacagctcaacttcagtacgttgcttcttgtagtactgcaaattctaattaatggcttgctcattgcacacaggaagtgagatttagcctagggaaaagaaagcaaggagtaactcaaggaatttgataaatcatatttttttatgtttaaaattccttctttttaaaagcggtgaaaatgtaacactttctcttcctcttactggaaattttcaaataattttgtctttcctcctctcttggcctcagacagattatggagataatgcactcaccatctctctcccctctgaagccacggtttcctgaaggtctcccatttctggagtctctcgaggcctccaacagaaggcagcatctcctgtgctgcaggcggttaccaagtaacagacctcagaagccttccaaggtccaaggatgtaaatgcagtatgtcctctaagccgagcgcagggtgctggaatccgagagccaggggccatggtgagagcttcctttgctgggaggcatggatgggatgaactccctggaggtggaagggcagcctccctcccggtctttctctcctgtctctccctctctatctctgtctctgattctctctctttctctctgctctcagtttctctctggttctgtttctccccgtctctgtctctctttatctgattctctgtctctctttatctgattctctgtctgtgtctgcctcagtctctctctatctcagtctctctctctctttctgtgtctctctgtctcttatctgatcctgtgtgtgtctgtgtatctcttctgtctctactgtctctctctgtgtctctgtgtctctctgtctgattctctctctctgtctctatctgattctgtctgatgctgtctctctctctctctgtatcttattctccctgtctctctctgtgtctctctatctctatctgattgtctttttctgtctctctctgtctctatctgattctctctctctctgtatgtctctctgtctgattctctctgtttttctctgtctctctctctatgtagctcttctgtctctctctatctgattctgtctctctctgtctctatctgattctctgattctctctgtttttctctgtctctctgtgtatctcttgtctttctctgtctctatctgatactgtctctgtctgattctctctgtttttctctctctgtgtatctcttttctctctctgtctctgtctgattctgtctgtctctttttctgtctctatctgattctgcctgattcgcgtctctctctgtctctgattctctctgtctctctatctctctctcactccattggcatcagcacaggacccagtggtgcaggggaagctcccagccatacaggacaagcctctgtcacgacagcccttgctggtgtctgcatcaggaggtctccttggcgatgaggtctaaggagcaactggcatcagaacagagcctccaacctgccttaggtcgtcaagactttgaagcaagagcctcagatgcaattagcaggacctgcctttgtgtcgtgtgctctgagctagtctcgcggaggctgctattgtttggggttcagctgtcagtattgttatcctgcaaaatctctgaatttccacttctctgtccaagtgccatgaagccagccaagtggggagaaagggttcttctgagattgattttttcccagacactgtggttctgttcaattgaattcactcaagttgtggttaacataagcactacggagagtatgacatgtcaaattagcagctttgcaaatctcctgttaattgtcagcctaattaaaaaattgctaattataatgtttataacttcaaataactgctcagctataaagtaggcctgtcaggtgtaacacaggggactggagggaaaaagtcaatcgacatctgttaatttatcagcggcagtataccaaattgaaaaatagattgcctattgcactgtaaatctgcattacaatgaaaagaccgaatcattccacacctgctaaataaacggggatgggagtccttcctggcctgccccgggctcctctgctgctcacatccccgtcctgtctatgagctgggggaaggccggagccaggcacagggacagaaaatgggggtccccacgcgacatctaaaaaacgaaaaaaccaaactgactaaaacgtgcacagaaacacgattcagacagtgggagcggggtgatccctcttccctggaaggagcctggagccccactgccggccccggtcactttagtctgaattctcagcgcgtctccagctgcagaacgatgaggctggaatacaacgcctttgtctctaagatccgggcaatcccagcccaactttcagagcctggtgaactcgcctatgcccacatctgcaggggtagctcctgctgggccctgccccatctgggcaacccatcatgctgcttccagtagttcctccgcctgccttccctcctctcctccagtgtcctgtgagactccggggcaggggctgtctccaccctcttcctccattgcctgccctgcctgggcgacccatcatgctgcttctgggttcatctgcctgccttccctcctctcctccagtgtcctgtgagactccggggcaggggctgtctccaccctcttcctccattgcctgccctgcctgggcgacccatcatgctgcttctgggttcatctgcctgccttccttcctctcctccactgtcctgtgagaccccggggcaggggctgtctccaccctcttcctccattgcctgccctgcctgggcaacccatcatgcagcttcctggttcatccgcctgccttccttgctctcctccagtatcctgtgtccaccctcctcctccatcgcccccttccagtctggggagtggagcatgcagaatagaagctccctgtgaccgagcctgtgctcacaaagcactggctacttcctggaggataatcatcaatccccttctgcaggtgcactaacagcacttgggtgttgtttagtttggttcaacaaacatttattgagcatttcactctgtgtcagaaattattaattattaatatattcagatgagggaagcaaagtcggtcgtaaggtcccacctttgggaagtttacagatgagtgtgactatgtatgttggattaaactggggtggaatggtggccagtcatgtcagccacaggtaactgcatgtaatgaggggtaaagaaggaacgaatagctccagtatctggggctccagagcccctgggattttgccctgtcaaccagaacacgtaaggcccaagaccccagaaaaagggtggatttgtcttataattgtgcccctctgatgtttcctgttgggaccccgtgtatcaggtgagcagtagcagagttggatccagtgtcggggtatccatggacacctgcccatccccagccctgcaccttggccccaaagtctctgaacttttgatccgcactgtgtcagtatacgtctggccttgccttcattccactgcatgtttaaccacattctgatagagcaggagcatcaccatcttggacaaacgccaccattttaagttctccttgattaaaaaccacctaaatccagccccaaaacatcagcctaatggctaatgtcagcatgaccagaaacattccaaccctgagataaaccccccctctgaccagaaacatgccaaccctgagataacctcgtctccaaacagaggcattccaaccctgcaataaactttccctcacacagaaacattccgagcctgcgataagctcccctccctaaacccttaaatacccttagtctgtaagagagtgctcctgaccgaaatcagccagaagcccctctcaggtttattttccaaaataaacctgtctttgactgtgaagccacttttcatgtttcctttcttctttctttaactcttacacattccccaggccctgtccccgtcgtcactttctctgggtcataattgggtacattcccagtggttttgtgtaccttagctagagggagggtgggtttccacggtttcctgagtcacagatggcctatgtctcacaggttatccctttcttccccacccaaacgtcctctcatctcatctcccaatagaggagaaagagaattagaaagcttcactgccttgggccaggtttctttccttcatggtctttattttacaggatgccttggaagttgtctgtctgaagaggcagctagggttgggggagggccccggcaagcacctagagtgcagacaagttaagcagagggtgggctttagccagggaagcagagccagggtggggagtacagaaccagcccagagcagagacagagggagggcaccatgtgagggtcggcattcaccgagcagacaggaaccagcagtcacactgcccaggatcctcttccaaacctgcctcagataatgtcacaatcactcccattgcacagacagatacttcaggcactgactttcacacacttgccctaaatttcccaagtgcaaagggacggggagaatcaggcactcaagtctctgggcagcttcaccgtcttccctctacggaaccgcactgctgctggggagggaaaggggctaggagctataaatcaggctgaagaaagggaaatgcaggcactgaggcagcggcagacgctctgacagatgaacctgcactgcagctgctcctctcagggcatgtgcattgagcccaggagtccccagggaggtccacaccctaagcccgggacccagacatgttacttttcagcgttgaaggtgctttaaggatgtggttaaggttactgaccctgcagtgggaggatgtcccagactattcttggaagggttattggcccaatccaataacccttcaaagcagagaactttctcccactaaaatcagagaggtttggaggtgaggggagcccggtccacgggtttgaggaggaattcatccaggcagcctccaggagcccaggctggccccagcggagaggagatgggcctccatcctcggcctcaggaactgaattcagccagcgccctgattgaaccggggcagggccctcggagccccctgcagagcttccccatggaccccttcccccacccagagcctgacctgcctgctcttggttccggccttgcaagggtttttcagaggactcagtgcagccacgtgggcccagacttctgactcacggaaccatgaggtaacaaatggcatggttttatgctgcttagtttgtggtaattttaccacagctattaaaaactagagcgagtttatttcctgttccagaactgtcaaatctgggtgaggctagggtctgcagtgaactacggcccctcgaaacccatggcttccagcaggccagagacagaggacagcagggaggagtccgcaggctccggttgcaacaattcacatcatttccgctcctgctgtgaccacgccgggtgcccagggtgctgggcaggaagttggggcgacgtctcccagcagtgcccctctaggggaagaagcactggctcctgacgggcagcggccacctctgctctggtttctacggaccagacatttgtacacatgtggcctgggagcatcagcagaacgccagggtgtgacccagagaactgccaatcaaccagacgcggaacacgacatcaccaggcagacacaggacaaagctaaatttaagtccagtggatgtgattagctgcaatgttcaattgaattatttggtaaactcagttaataaattttataaattcaatatattttatagtgtgcaattaaagtattttaaaagtgatcaactattttagagcagttttcggtttacagaaaagttgagcagaaagtacagagacttcccatacatgccgcctccttgtacacagtttgtcctactattaacatcttgcatccatgtgcgcattgattacgactgatgaagcagtattgatgcattattattggctctatttacatctgggttactctgcgtggtgcggctctgagaattgcgacaagtgcatctccccgccgtggctgctacagagcgctgctacagagcgctgccactcccgaaacgccctccgtgctccgcctgctcatccctccctccccgccacccctggaaaccatgaatctttttactgtccgcgtagtttcgctcttttcagaacatcatagagttgaaatcacatagtttgtaacctttgcagatgggcttctttcacttaataatgtgcatttaagctttctctatgtgtcttcatgacttgacaaatgaatttttttttttttctttgagacagagtctcgctctgtcacccaggctagagtgcagtgacgtgatctcggctcactgcaatctctgcctcctgggttcaagtgattcttctgccttagcctcccaagtatctgggactacaggcacatgctaccatgcctggctaatttttgtatttttagtagacagggtttcgccatcttgaccaggctggtctggaactcctggcttcaggtgatctgcttgcctcggactcccaaagtgctgggattgcaggtgtgagccaccacgcctggccaggtcatttctttttagcatgaaatatcattccctggtctgaacgtgctactgtttatccattcacccactgaaggacatctggctgctgccgagttttggcaatgatgaatagtgtggctgtaaacagctgtttctgtgcagtttctgtgtgcctgtgttttcacgcctgtgggtcagtgtgcgggtttgtgtgtgtccgcgtttccatgcctgttggtcagtatgtgggtttctgtgtgcccgtgtttctgtgcctgtgggtcagtatgtgggtttctgtgtgtccgtgtttccatgcctgttggtcagtgtgtgggtttctgtgtgcccgtgtttccatgcctgctggtcagtgtgtgggtttctgtgtgcctgtgtttccatgcctgtgggtcagtatcaaggtatgcacttgctgaatcgtatgaacagagtgtgttcagctttgcaggaaacttccagaccactctccacagtggctgcaccatcctgcactcccaccagcaatgaatgagggtttctgttgctccacatccttcaaagacctgacctaacgacccacaaatgctgctgtcacggcttctttctaagaggcttcacggtccagagaaatgcatttcacgaatggcctttagcagttggtaagaagaattgctgtttacggcgagcaggctgtgtgctgggcatctctcatgttcatcatctcatttcatcatctcggtcgtctggtaggagtgcactagcctccctcaatttctgacaagtagctgaagactggggagatgaagtaacttctcaaagatcacagtcagcagacggcaaggggaacgtgggactcccatgcggctgactctgggggccctgccatccccagcctagggcgctgtgtgctgcatcctcatcgctctgttgccaaatggctcctcaagactgccagagttcttctgtgccccactgagttgcgtgggcttaattgcttagaatgagatggcagaagaaatgttgagaagggaaatcaagaaaacagatggcattcaggaggccacagaaccgaaagaaagaacaccagggacccatgagattcaaggtgagtcatgccgacaccttgaccaggggcaagggggaaggagcccccgtattttgtcattaaaatctctagagttgccagaacttcttgtattaagtttcacttttcccacaggaagtactggaatcataattaaaggaaaaaaaagcttaggtcactgctaacttccaacttcaacatctttaattttagttatttcccctggctccctggcttattgccctagatctttccttaatatttaagacttcatataacaattaatataaaagcttcaccgccgtttccagctcattggaaatgcacgtgagtgggcgttgtgcgcagacactgagcgtggctgggggagacgccacagaaacagaggacgcaccccgacgtggggaactcgcatccacccagggaacggcacacatctgcctccactgccaatgcaggagcactgggcccacccgagaggacctccacgaatgccttctgcatgcggggcacccgaggcccagagagggaatccccaggcaccccacccaggcggtgcatagacagtgctaggccctgcatgccggggtccagcccagggctgtggcctgtgccaaatgccaagaagcaatcgtctactgggaggggaaatgtcagccattctgaggcagctcagggaaatccaactcctcggtcctgaggacatcaagagaaaaaggagtgatggcacaggccggggtccgggggaagggaggggcatttctctgggaagcccctggagatgacacttccctgggggccttgtgtcccccagagaaggcctcaggccagtggcatggatgcttcgaaggcttcttgggtttgcagcatctcagggctcaccagaggcctccaggcccacagtaaatgagggtgcggcacgggggcgtcagaggacggacaaggatagcacagcaacgaagcactccaagggcttagcccgacattcagggacccacagagtggcctgcagggagctggggcccagccacagtcctgccaggtggaaggaccgggcatggaggctccaggctgagaccagcattggatagggtgggtgggcagggattacttaggtgccaataacccaggagtagaggagatggcaccgctataaaatgccacgagaggtgcgcacaagggttcagggctgcatagaaccgggagggagaggaagaccccgctggagcaagtgccagggtgacagagccagaggactttctgagatagcacagccccgagggtcggcagggcactgagggccacctgccctgcctgccccgccagggcgagcatctgaatccacattctcctgggccgcagctcatctgcgagtcggagcctccgaaggggggccagtagcacatgtcccagcctctctcgcccaggtgatcctcatgaccagacgcggctttgctacaagacagctcagactgtgttcccccaatcgtgttcccgcaggaaagctgcccgaggatttttgtcatgcacacgccgctgccagcccattagctctccctgcttcccatggtctgccgcatctggggtatccagcgtcctcctgcagccgagggggaattctgaatgttttgctagaaaccgtctcatcaacattcagtttcctaacattggttccaatcctgatttttagcttcattttttttgaggggcgagggcatctgggcactggaaatgcgggaacccacacgcagctcatccacccataggctctgacatgtttaacttatatctgaaagactctgagactcgagatggccaatgtttaacggcatcagctttgaccagcacagttgcaattatttgacatgatgtgttcaacccatcaaagttgaccaagggttttgtagacccatttgctcagggtaacataagatcttttgacaaacatgtctgtttacgtactttcagaatttgtgtagactctgaaaagacccctgatgtaatctactaaaaacatagagggtttttaagttattgttatgtaattaacatctgtaacggcagttgacttaaggaaatgtctttgcacttacagtaagtacatttgtgtgaggaattatttgcgtaaattgtcccaaatagaatttaatttaaaagcatagattttatgatcttgctcatgaaaagctgagaatgatgaatcaaacattaagttaaatgtcacatgataattagtcagatattgcgagcttacaactaggatctttctgattctctgtctcttctttaggcatcaggactgaatcatatgttttatgaggcctataaaacatgcaaacctctgatttagctatttttaaggactgtagagacactcaaatttggtgtatttaagttgaactcacatataggatatgtaaaattgcatacaaaattgcaaatggggttctctgtaaatatgtttgctaatgagaatattttaatttcatagatcataccaggaagataaatcatccatttacaaacagcagttgcttaaaagatgtggactaggcaatttttccatctccagtggaactgagaggtccttgttttcacagctgaatattcaaaggggtgtttaccataattggaggatgcttgacagtttatgcagcccacacttagcaggcttcaaaatacatcctgaattatttgttgcaaacccctagataaacaagcaagaaatgctgctcaattgtcctaaaaagccacaaattagaggtattttgggttactcatagtgatttctgaatgcagtggtaaaattctgatttccatttgtattaattctctttgtgaactttaaaagaactatctttcaagtttaataacctttctgaaaaaaatcataactgtagatattaacctgaaacacaagaaaatggatcaggtggggcatcacctgtgaagccttgttgggaatatgttgggtgagaacattaggtcacttctctctgacaaggacaccctccttggctaaaggctggttgggtcctgtgagccctccctggatgaggcgttagcaggaatcccgctgagatagtgggctggacgctcaccctcacccttagtgatattaaccgagggcctctgtgattttctctccaggccctcgccccaccactcggctgtcatccccactggccgctggtgcatttggacttgggttcagtctctctctccggttgcaatagttttgagtgaagtcttccttctttgcttaactggtgtcatacaatttttcttttgcatgtgttacaactcattagaacccagtcatgtgacatactgctccctctaggaatgaggcacaaaggacattggaacagtcaaaatacacttctcaaactttaggcactgacatgtgtgctgttagtgcagtggaaaacccctcagatatgaattcagagacagtttgccaatattttagttaagcatctacaaagcttggattcgtgtgtggttttccaagtcccagggcatgcaaatgagccaattagaagcagtggtggggctgatcggctcactggaggtcaggaaaagtggtgtgaatcacccacgttcaggtcaagaactcaaacagcaaatagcaattagggctgaacactgaagggaccaacactgtcaccatctcaagaggccccgtgtgcactgttctgcggcactttatgagaaccaattttcataatgataagccctggtccccaaggaaagattgatttatgtttcacatatttattaatggaaggagaagggcattctaatctgttcgagagctttctttctaaataaaacagtcctcccgttgtgctgctcacaggctgcttctgttacatccaggaggaccatcttctgtgagctcctggtggcaaaggtgttattatgtgtgacagagcctggttaggtggcaccagccctgtaggaaggaccagtgcagtagctagtttattttcaccttgggctggttggccgtgaccgtctccccttggcccctggggctggcctgaggacaacactggggaattacaaatggagaggacattttatgcagcaagccaagccctagcctactgcctgcctaatgtcacagtgagatgagaagcccaggtctgcagggtgaggtggtacctcccaggtgccctacaggtgagagtcctcatcagggcttcaccaggatccctcagctccacgaagagctgtgcagggctagtgaggcctgaggagatgataccacgcgtgtctcccaggggggttgacaccaacccctagaagggaacagaggtctcagagtcagccgatcccgaggacttgaaagtcaggctccctggaagctaccaccacccacctgccttgtgtgaaagcagcacacacataacacatagagacacacacagacacacacacagacacatgcagacacacaaacagggagacacaaacacagacacagacacacacacactcacagggagacacagctagacacacagacacactcacagagaaaaacacaggcacactcagagagacacacacagacacaaacacacagactcactcacaaacacagacacactcatacagagacacacagacacaaacacacacagacacatgcagatacacacacagggagacacaaacacacacagacacatgcagacacacacacccacagggagacacacctagacacacacagacacacagagacaaacacagacacactcatagagaaaaacacacagacacaaacacacagacacagtcacagagacaaacacagacacatagactcacagacacacaaacagacacactcatagagacacacagacacaaatacacacagacacactcaccaagacaaacacagacacacccatagagagatgcacacagacacaaacacacacagacacatgcagacacacagacacatgcagacttgcacatgggaagaaaccattcacgtgtgggtacagggcgtctgtgagtctcacacttgaccgtgtctccagtctggagcctcaggccttcatgaagcctcccaggttcctagggggaagacatagcctctgtggaaccctacactaaacattttgaatatttggaaagatatctttataatccagccaatatcaaaccttcactttccttctgttagcagccaatatgtttgcgtataattttcatactagtttgtgtcatagtaagttaaagagatagtatttggaaggttttgcatcaagatttccttcctagcacatggaatttcagaaataatatttattacatttcccaaagtttgaacaggggtccttagaggactgaacccagcagcagatggattttacttagggcacattatttcaaaacattcagatgattcatcagcttataaactgagatttgttccagtaagattttggctattggcttcccttgaaacaccaggagctcctgcttccttgaaactgagttaccactgggagcagttgtcagatgctgaccggcagccacccctctcccagtggccccggccctgccacacataccagcagccctgccacacttgactcattcctggaaggaacctggtgcctggacacctgagtgtgcagcgccactgaagctcaacgcttactgtcgctcagggcctcgaggctcagaaagtgtgtgacttaaacacgtcacggaggccgggcacacagtggggccaacactacggcttcctgagctgtccagcaggtttctgcttctcaacgcggccctgcctggttctgtaagagcaggagcaggagcaggtgattaggacgtctgcgcaggagccgtggcaaaaacgcttccagacaatggggaactcagacgtctggaagggacgggggcagaacgtcagcgccacagacaaatgtgaatcaggcttattacacatctattgagtgagtcagctgcacacctcaagccttttcctgattctgatttttaaatggaatttcaaattctttctttgaaaagaaaaggaaaggtcaaatacaggtaatttcatctccgtgccgcgcatgcacatttcaaatacaatcttccagcttgctgcctgttctcacacctcccggttacttctcctcttcccagggacccagacggggagagggtgctgggcgccggcaagccacagcgtctgctctcatgatctcgcccccacccgccttgggcccccagaggtctgtgctccgctcctcttcctcctcagaactttctattcattacatcccagcagagcacctcaccacggttgccccaggaaaggatgcatgtgtggttttgctgtgctttttgtttacaaaactgatcatgttggttaactccagcccagatgttgcagaggttaagtctgctatcaacctggagatgttcggaaggagacagccatcaccacccgtcacacctgctttgctgcttctggtaacatgcatttgcctgcaggctcagggcacgtggaaggaggtgtgagatagaatcgggacagggccaacttgcccatggaggtggcatctccctcgtgcttctctggattctgtcacctgttccagtcctgggaatgggctgacaattcatctcctcgttctgtgcctataacattgcattcccagagcatcggtgccacctttccagctgcgacagtgtaccctgtgtaccacatccagtaacctgcaataagagacgctccatacgctgcgtcaaattgaggaacatgcagcgaatctgccacagacactgacaccacgtcgcaccgagatgcccaggaaatcaggagttaaggagacgtcgctgcttcccttttcccttctcacttgcactgggggggagtggggtgtctgtacctaaaagccctttctcactggctgtctttcggcaacatacttgctcttgattcacatgcccctgttcatgcacacttcggggggcggaggggcagagccctaccccatccccgagagtcagtgtgtgaggtgggcatcaagcagagccctaccccatccccgagagtcagtgtgtgaggtgggcatcaagcagagccctaccccatccccgagagtcagtatgtggggtgggtgtggacagcgggtgtggacagcctgccatcgttttcctctctctctgtctccacgggcactgccaacgccccgtctttcaacctcctttgcagcttggggctcctgtggactgcgggctgcccagggatgtgctgtgggttcctgggaagggcgctggggtgtcgagcaccttggccatcctaaacttaaacaccacgcgggctcgtaattaatccttcttgaaggaacgctgctgattccctcgacattaccaacaatctgcggttgaactacagacatacacccaagcgggcatactgagaaggaaaacaaaatccctccgccaggaaggtccacctctgacggatgccgcctccaggccgcacttctccaagagcccgccttttcctctctgcaggcctcgcgcagctcctgcctccccccatgcacgcgcttcgccttcctccctccaagccccgcgcctgcctccctccatggacacactttcccctcctccttgcaggccccgcaaggctcctgcctccctccacgcacgcacttccctttcctccttccaggccccccgcctgcctcctccacgcaccgcaaggctcctgcctccctccctccacgcacacacttccccttcctccctccctctaacacatatccagcaacctccacgtctggttttcctgatggagtaagttactgaggacaaatcattttacaaatgagacaactaagagctagaaatggagagtaattactcagggtactgcacaaatccataggagggaaacacacttttaacctacgggtttcatccagggcttctcaaatgccactgcacttagtttccagagacaccaacagcccggaggggaccagggggatgaactgaggcgtctgtttctgcctcagacacacagttgtcggctggaccaaatgggcttcacctcattccttttggtgtagcctctcccagggccagtaatactgacctgagagttgatggataacttgaaaagtctgttattctggcattgggaagacttccaactcacattgtaaaaacatgaattttattataataaaaagtaaatatcgttcagtgaatatacatgtatatgtataatagatcatatatatttcagatgcgtaacaagtgatttgtagatttcattttatgtgtgtgtgtgtgtgtgtgtgtgtgtgtatgtgtgtgtatttagaggcactttgtaagtgggcaacttatggtcaaagtctgggacttaaaatatcctaaatgaacgttcataattttttttaagggaaatattgatgaagccctgtcgttgaaacaaaaagtttgtaaggataaatcttgcaaaatgatttctttactttctagtagtagtcacagaaacaaagaaacacgtcgcttagaccttattgaagtagctgcgtgggagacacttgattattccaggaaagacacatggcaggatgagagtgtgaaaaatgaacactgagcactacgggaacgtcggatcataacgatgacgaaggaaagggcgaatccctccaatggagtctgctgcatggacagggctcaggacggggaacaggagccttcagggctgaggccgtgcagccactgccaccgctcactgccaggcaggccttgctgggcataccaggaggggcagctgggctgtgtgcccactcagccacttccgggatgggatcctaggccggttaccgacttctccctgccttcatcctttcataaaatagaagcagcaatcatatctgcttcatattaaagaaaggttattgggcagatgttagaacagccaacataaatgtgttaaatgtgcaaaactgagaataacaaccaaataatgtgttaataatcagagagaggttctacaggagaaggtttagctgctgcaatcccctgaagtcgatgtcagacctgagggctgcaaggaggccactgggaacggccccgtcggccgggggcccaggaatcagccctgtgcagagtgcattccgtaatgtgtgcaccttctctacttcagaaaaaaatattctttgaaagatccattttttaaagcctccaacccccttgtgagaaaattggcaactgtgggggcccccgcagcctcaaatttaccagtcctacgggtgtgacttgagagggagtttcctgctggatttcaatgaatggctgcgtatgttggcactggctgcacttggcttcctggacttccttggtcggcattttggaagctttgggtggcactgagattttcaataggagctatttgttataatatgggcttgaccaatattgatctggcttgtagtaaaaagtcagaataaaaagcgtatacagcctagcatgaagtagtcacgatcgtgatttgataaactgtgcagatatcgttggccaaaaacctcaagttactcctgtcaagccctttggttgtgttgcggttgggaggtcacagggtccggttttgatttctagcctttagatcaccgtgtgatgcatctcctctacctgaccggtcccggaggtcaccttccactcactcatcaactgtaagtgagtaaaagtggcgaaaatcatcatggggaagtccaaaacctaaaataaaaaaactggggaaagtttaagtcattcaagtcggaaagcccctgaagaccttttctgctgtctgcaagatttcagaagcaatgggccttgttcaggaggtttgggttcaaggatgcatggatgttctggaggtttgggttcagggatgcatggatgttctggaggtttgggtttgggggtacacggatattctggaggtttgggtttggggggtacatggatattctggaggtttgggtttgggggtacatggatgttctggaggtttgggtttgggggtacatggatgttctggaggtttgggttaagggatgtgtggatgttctggaggtttgggttgcggggtacatggatgttctggaggtttaggttcagggatgcatggaagttctggaggtttgggttcagggatgcatggaagttctggaggtttgggttcagggatgcatggatgttctggaggtttgggttcagggatgcatggatgttctggaggtttgggttcagggatgcatggatgttctggaggtttgggttcggggatgcatgaatgttctggaggtttgggtttgggggtgcatggatgttctggaggtttgggttcagggatgcatggatgttctggaggtttgggttaagggatccgtggatgttctggaggtttgggttggaggtgcatggatgttctggaggtttgggtttgggggtacatggatgttctggaggtttgggtttggggatgcgtggatgttcaggaggtttgggtttgggggtacatggatgttctggaggtttgggttcagggatgcacggaagttctggaggcttgggttggggggtacatggatgttctggaggtttgggttcagggatgcgtgaatgttctggaggtttgggtttgggggttcatggatgttctggaggtttgggttcagggatgcatggatgttctggctgacagcctggagacctagggctagttactcagtctctgagctggtgatgtctcatctgtaacaggtgagataacaagggaggcctttgcagggagtgaagggaagccgtgtctctgatccctgcaggagggcagaggccagcctcagctctgagtggcagctcagaggaaggggctgcagaggtccgcgtgggtcagagttgaatctgctcagacttggagcccagttagatgaagatgtggagtaagggctgcatcccacccacccccgactttggtaagaggctgtgagtcagggcgcgtttctaactcttgacctgagcccctgtgcacaggtgcttctgagtccaggatccatccctgaaggtttgcaggcatattaggacaaaattgccattttgggtcttggcaaatgtgcaatatgaaattaagtgagttaatcggtagttgggaaattattagagaggctcaaagtcccacttctgctgcagaagaaaataagagtccctgttttctcagatctgtccaaaactttctgtgagtgcagctcacagacccaagggcctctagacgcccccacccagaactgctgagtgaatggtcaaggcttccttagatagtcctggcttgtgaaccattgacttgtatagacttagatattttatacattatttaaagttcatgaaggcaccatgtttgaagcatatttagacattgcttttaaagaaaaatagctttaatggtgcacctgagagtgacataagcataaccatattatcttttaaatggaattttcccccttcatttttatttttgagataggatcttgcaatattctccagactggggacctctgggctcaagcaatcctcctacctcggcctctggagtagctgggactacaggcaccaccatgcctggcttccctgtcatttttatctcaattgtttagaagtttaatgggaatgaaagaagagggtcttagaaatatttaggtgattgtttaaaaacttccaaagaccctacttccacggacactcgtattattcattttaattttttttaagatggaaagagtgtttcaaggaagtgaagtgatggtcacaggggaagcatgaagaggatggagagaaggtgggtgaggcccagtgagtgtcagaaactcagacctcatgggtcactgtggagtggagggcccacacatttcttcagcaccaatcctgttttcagggagaccctctatctggggaggagcccccctgacctgcctgttctggaaaacaaggacccttcacacttatcaggcagcttacacatccgcttcaccccagcactaaggagcaaggctcagggcctgaggccatttcatcaacatgcttagtttaatttaaagaataataaaggagcaggcttggagtggaaaacctgcacatgaaggttcagaccaagataactgtttccttccgaaggctcaatttctgtttgtagctgtgtttgtttagtgcctttggaggaattcctcactagagtccttaaactgaagctgccgactcggaccactctatgcttcagcagcaggacttgttttaggcttgcaagatggaaacaggtgcaaaaggtttgtttaaagggagcctcccctaaatgatagaacatgctggtactgggtggggctgggctggtgctgcctggttgggcggaggtgaacatctgcccaggaaggggtgtgcagggctgtcagccacactgaagggggtcccagatgagaggagccctggggaggggcaacaatgggacctcctaggaagaaggcaggagtgtcctagccgggacccaaagccacattcctgccaggtggagctcctcctggcctgctggtgcatcatggatttggagctcaagaaggcggctgtctacctgttgttggattcactttttaccttttagatccacactacagctatgtatttgcataactcagctttggctgtcacagaggggagcagctgtgcccatggctcctgcacctgccctggtcgcaacacacacaggctgaactcggcaaggctgctctgtctctgcagatccaggctctgtcccacctcctgctgagggacagccggcaggccaggcttccctcactctccctaggaagccaggtcagttgctcttttagcatgtattttgtattcagtaaataaggctttatgtcttttcacagatagcagagaacgaccacatggttacaagcatgctttttcctccaattcttccctgtaaacttggattctgacatccaggagacaccaagggaacaaactggataattggaactacaccacaggcctagtggttttaaaggccaatttctgtggcttcaaattccaaaggaatgggtgagtgcagatggcaggggcttggctgaggggtcggtcacccagcaaatgcccagggcaatgccacaggacctcagggtgagtggcctcagggtgagcgacctcagggtgagtgtcctcggggtgagcatcctcagggtgagggacctcggggtgagcgtcctcggggtgagcatcctcagggtgagcgtcttcagggtgaacatcctcggggtgagggacctcggagtgagtgacctcggggtgagcatcctcgggctgagtgtccttggggtgagcgtctgcgcaccttccctttcagcactcaggacagtaacgaacacagggtcacactcaaggtcaccgagaactttggggcatgcaggggggctgcctgggcttgcatctccttctcacctgctggctctctccttttcaagtcgctttttatcctctacaatatcttgaaagctcagagcttgaaaagacttgggggtgctttaccctccctggagtcccttttacgggtctggtatggttagcaagctgccgtagttcacagccaggggcccagttctttttaggagagcacctttgcttgcaggtaactccactgtggagtttgcccgaggtgcagctgggcagtaagtgtggccccttcccttccacatctcggctgttccaacaccgagaagctgctttcgtttctccaccaagccccctctcccgggcacttgtccctcctggaccctgctgcctggggttgtcttgcccaccaggtaagacatgtcctagcacagaggaggagagagtacaggtgcccacgtggctagaggtggtgctggctccctcacgggcattcaggccaatgcccactggatgcagacatgagcgagtgagttctcctgtcctttcccatcagcttccatcagtcacgatttggggcaattctcacaataagaagtgcaggccctgggccccatttccagagaggcagctttaaacagcaaatatggggcagttggtgtttcatctttccgaagataacccagctgtggagagagaaaaggcatcgaggagctgccctctccttcatccttggaggggcgaccacacattccagcagctggggactatcctggcctcattattaatagtgccctctctcacttttccgagtgtcctggtttgggtgataaataatgtgggcaccctatttagaggagatcctgtgccgggcaccacaatagccaaggagtctctatttccctccctgaattgtctcatcagacacatatctttccaagcagagctaattagaattttgcataaatggaattagtaatgagagatttacccttgtgctattattttggcttgaaatctgtcctggaccgaatggctgatttcagtcaaggtgatcgggtgccacttggtgcaactcctgggcccttaaaatctcatttcatgtgacctggctaattgaggtgtttttatgttaatgcctcattatggccatggtgggaagagctccagttacaggatgaagagcactgtcccccaggagcactccggtttccagagtgtacagctgcagactgttctgacacacacgcggcgtctaagccactgtgccacgatctgtcgttgaatgaggagatgttccaacgactggatcgcttgggctcaacacggaaactgagtgcaggggatgcctgctgcctggacgactggaaaagcccgttcctccttagtctgtgggttgtcactcttaacattgctgacattcctttggcacgctgcactttctcccccttagaaatgttcaaaggcaggaagctcccttcccacagactccagtcaacagcaggcccagagcagccttagccacttaacctgccaggcagtgctccagtgccgtggccagcgaccccactcccccaggcctccccagcctgtttgcttggcacccattcccctacatattctttcctgtgtaacccgccactcatacaaactgccctacatattctttcctgtgtaacccgccactcatacaaactgccctacatattctttcctgtgtaatccgccactcatacaaactgccctacctattctttcctgtgtaatccaccactcatacaaactgcttggtgttctggccaattctgaagcattctctcatcatccatactctgttcctgagctcctccttttcctctcctgcttgaaataacctttgggtcctccctcatctgcttccatctttgcccatcaacacccttctccacccacatacatacagggggcagtacagtgtcctccgtaaagactgctgatcgtcttagccagggctggtccccatcacctgccaggactcccgggccatgcacttcccacaggctgcattatctgtgtgtgtgggcgcttttggaagtggagacagagcctagggtattttcccacagtgttctccaccaaagagtcccaagaacagggcatccactgagggactgaaggagcgagtgaagatatttacagctttattagagaaaggctcatctgtcatttattacctcctcccaaatcttcaggacagttttgctttaataattcactgtgagtgtgcttggggaaaatgtctgatgctggcttctggctagaggtaactcaacgtaacaggcatgtttgggtcatgccagaccctggggtgagttttcaggacacacacatacacttgaaaaataaaaactctccttttatagtctacgaaggctgcagcaggggactgaatcctcatcagatcccataataatcttaattgttctggccagaaatgggcaactccgtagtagaacacagtattctcacgccaatagtgacggatgtgtgtctataaacaaggggttagggacccccctggagtcatgacttaaatgggcctgagagaagtgggaagcgtcaggtttgaaggcagcccctggacaggaataatgtaaggacgcagcaacctcatcttaggaatgaagtgtagtcttctcgttacagaagctacctccgcctgcagacacacctccaactcttttttagctgatttattttgctcagggagaaaaagtttaccttgtagtagcaatgaaataatttttatgtccaagccatgcagagcagaatgcatttctctcaaattcatttcctcgaagcagtctattctaaaccagaacacatgtggtatggttcttaatgtcctttttcccaacaacttgtggaagaaagttctcaaagaaaatattgttaggcctgttatgactccatttcttcctgtgacgagaaagtctagaacttaaagaggcaaactaatatagcttaaaaaatattaaaaaaaaaaaccctaaaccaggaattaggccacctagattctggtcctggctctgcaatgaattatccatgtgactctggcaaattgtttggcctcagggtcatggttttcccacctgtaaaatgaggtgatcgcagggcatggtcctgtggtttctaagagctccactattctgcaatcctccagtgagcagagctctcagagaccctgtggctgcacacagggctactgctactctcaagcagcccagtccaacttcacaatggggcctgataacatgcattttacatgcaatcaaataccgtcacccagtgaggcccgggtgtttggtgtggctccctgcgagcaatcctcccagccacagagtcgtaggtgaaagtgcagcacactccgcagagactcaagggtgtgagggtgcatctatgcagggagtgagggcacctgagtgtggacaggtggggcaacagcagggcatggcaaaatgaaattcccgagcttcggtgctgtcagccagaatacaacattctttctttaacagacgcatatttatgtgccatgcagaccctgggtgctggcacaaagagatatttaaaattgctttgaaatctattttcttaaacagaatcacttaacctgactcatgaagggaagagttgcagtcagtcaggtgcaaaaatcatgaatgagagctccacaaagatggaagaacatggaggaataagagagcactgggcgtcgaagacccagaggcctcagcacgaagccagcagctcatccacaagctcagatgcaaaggaaggaccagtgtctgtgcccctcccgggtttcctcccatgcttctgcagagccactgagggtctcgcctagaggaatggcagccagatgatctgccaaatgaagaaagctgcctgggaagccatttgcactttaaggaaaccagtatcccctgaaagtcggtcttagaaaccaaccaaccaagcaaaaatgaccccaaaccagagacccgaaaggaccacgggtattgggtagtctctttgcttcatcccctcggttggccattcttttctgtgcaacctgggattaagccgggttcagggtgtaatttccgaatggcaactgcatctcccactgcagttagcgtcactcaactgcttctcagggttcaaacgcattgtgtcactcacagcctccgttagcaagaccagagagcagaggggtcccccaacaccgtggccaggcgtgtcctgggaaggggttgagaacattacggtgactgtaagaaatttaaattgcacatatttacagaaacagaataatatttaaatcagtatgtaatgcagacggccaggggcagatgggttctcatggcattcagtaccattgtggcaagggctgcagatgagagagtgagaggccgcaaagcccatgaggccaacacctgatacagctctttaaacacagcccgaatgccggcggtaacacagcaccgcggaggtgggctaagaagcacgtggttatcgaacgttgtcattcatcacagcttcatttgcgtggaagcagagatgactatgctgctgcagacaatgttttgtgtgcttttcatgctttacttatgggatagacatgatttctcattcacagaggagaacagtgggatatttgtgtgagttcacatagggagaaacaaatagcgctagcattcctaccgagataggtctgaccccagatgcaattcacttttccgaggatttgggcatctcttggttctaaattaaatcttatttctgagaactttaaaaatgtgcttcataaggaatccaactgacctgattgagcacatttcggggaacatgactctagaaggatgaagcgaggtatggaaagaagaaaaccaaacaaactcacatgaaaaacttcttaatttattcgaaaggcagaagaagtagtgagctcgaaagattttgcagtgatgaaaagttcagaaactcccagtttctgggtgaactccttgaaggctgcaatgcacagggtcaaggggtccgaagcagggagtggagtctgtttgccctcagatccgcttgggtctttgtgcccagaatggatgctggtggagaaacacttggtgtttttgtaccagactcaccaggtaactgtcgccgagtcagagcgggtcatggcaaatgtttagtgggtcagccttacacacagatcttattttgagataccaagatggatagaaaggagagaaaaagacatcatgactgtttctgaagaaattgtagcttggaaatgatagcttggtttggatgagcagagaaacgcaggcaaggaaaagaatcacataagaaggcggtggggctgagtccgaggccggatgtgaggggtggactctgtaaacggagcctccctgagtcagaggagactgcaccgaaaggtgccctctcaaaaggactgtgcaaagggtggctccggtgtgcgtgaaagaccaccgccaaagagccgggatcccacactagtgtggatgcctgtgcgctgtgatcacaatgagacaatgataagaccctcttcagggagtgaagtgcgtttcaaaagcacatcttaacgaatttaaataggagaagcaaactatggagtgatccttcaaagcacagaagaaaactccatctatagactccaaggtgttaagtccaaaataacgttcctctgaaatccatgacagaaaaacagacttctttcttagagaagttttctgagaagatggtggaaaaactaaagacatctttcttagctactaaatgttttcttaatgcattcaaacttccagggcctgtacgaaaacctaaaaacacttttttttcagaactcagagaaacatagaatgtgaagtgtttgttataagattcaaagttaaaactttgtggtgaaaaatgtatttctgtatgcacacacacacatatatattctctatatctggaataacataataatagtccctggaacttttcaaacagaaagaatgaatggggcacttttcttaagatatttctgtctaactggattgtagaaagttctagatttcctttttctcttgtcccttaactaaaggtttatatgtctcaccaaatggcaatagtgttttaaccactttttagccactctgagcccttcattttgattattttgtaaaccccaaactgttgttttatttttaattattaaatggtgctgagacaggtcaggttctggcaaacgggaaaagctgatttcaccaaaagattttgcagtttgaaaagttgcgatggaaatgcttcataaatgggcagcagagcaaacccagaagctcaggaatgcgtgagttctgagtgtgggttcttatccttgtctgtgctcacaggtgggaagtcagagaggacctggaagccaaggatagtgcaagttccgagtgggggcctcatccatgctcatgagtgggtggtcagagtggacccagaagccaaggatagtgtgagttctgagtgtgggttgtcatccttgctcatgggtgggtggggactgtgggatgaggaggagggagaagaccggacaggaccatgtcgagtctggagggccagcagtaatgcagtttaaggaatgaagccagattctctttctatgagcagggcatgtctgccagccagcagcccggggtgcgagctgtgtgagcatgtgtgttggtgagtgcgtgagtgtgtgtgtgagtttgtgtgaatgtgtgcctgtgaggaagatagagacagagaaagaaggacagagacacagcggccacctgaatgagcacaccaagatcaacttgactccctgggtgacaaagtcaatcctcagcaccgagcaacacgaatgactccatacatgcgatttcatgggtacagcttcacctttcccccttcttctctttcctgtgccttgtacctgacacatggaattctaaataacaggcaggtaccgaatccatcacagagtgaaataatatatttgtaaaggtgctgaatccttgggaaaatttagaattttctctggaacaaaattctataaattctcattccctcataaaatggaatgtaagaaataactcaaagccattgttaggtttttgcttactacattaaaatgtggactgacctttctcactttgcatacagcacaaagtcaacagagaaaagggaggcgacgcaggagggactcagatgtttctcagcacgtctttaaagaaatgaagacaccccaagggtcctgcccagacctctcctggctggaatcaaggtcctgatggagatcatcatggaaaatgcagccagcacttgtgccccatggggctgggctgggggaacaaggacttcagccctccagtgggggaggctgagtatgtgcagggcggacgtggctgggtggcctctgcccgggacggatgggctgcaatgtggactctgcctggcttggacactcccacacccactccagtggctcagccttcccggactggcttctgttaatctgtttcccattcttttccttttaaattgaatcaggcctgagaggataaacacttccaagtgaaataaatcttggtatttgagggctattaggcttttcacctgcttcttcaaaaagtctctacaaaaacaaaaacagaaacccatggaggctggttaggggaagcagcactttaatttcagggcggtgctgatagctgggccatcgatctgcaggggcaggggatgggccaaggcctcggcgggggttctctgtggcttgggccggcggttaaatgaaatgaatggctcggtcataaactggttggaatgaatcaattgagtcgaacaaggacaggatcatgtgctgggagagtgagaaccaaataggtttgaaggaagcataccttgaaaactacagctgccgcaagctcttgcaatcaggaaactgatgagcagttaatttgtgtgaaagtaggggaaggtctaatggtggttgcgtgataagaaacaaggctgtggattgctgatggagcccatcaatcttccaggagtagccgaacgttccctcgtcacatgagtaaggaaacgtacgggactgtgaacccgctgggcttccggcacacaattagctgatgccatggtgcaccctggcttgtctctctctgcaagcattattttgctaattaagttgtagacactttaaggtcaaaggctctgtcttagaccgttttatgtggtgggcacaagaataatatgatatcacttatgttaattaaggatactattataagtatcatattaacattaacaaatgtttattgttgatttctctagcaaatgatcattccaaacaataaatatgttgaactttgacacgtgaaagtttcagctaactaattgtgatcaaagtctaaaatgaagaaattacattttttttaacacgttatttgtatcctatggcctacttcccagctgcagtcagcacactgagagcctgagtccctcttgcctcccatgggtcatgacattgccttttttttttttttttttgacaagtctcgctctgtcacccaggctggagtgcagtggcatgatctcctctcattgcaacctctgcctcctgggttcaagcgattctcctgcctcagcctccctagtagctgggattcaggtatgtgccaacacacctagctgatttttgtatttttagcagaaacggagtttcaccatgttgtccaggctggtctcaaactcctgaactcaagtgatccacccacctcagcctcccaaagtgctgggattacagctgtgagccaccacgcccaggcgtgacatttctgtcacagggactccagaggtggcttctcctccctgcctaagtaaaggaagagtttcctgaattgtgagtcatctcgtaaatatggccactatttgcatattcttacacagctatctttgggacttgattggatctcaaagctaacataataataaagctgcgatccaaaattctcagacttaaactttggcaccaccaagacagcctcattattctctttgattgattttataagagattaaagttatgcattagattcaaaaataaatttttaatagtgcaaacgcattaaattatttaaataatcatatttttttctgcaaaaaaaaaaaattgaggacaaggattttcctgccaagagtataaagacccccgggtccaaggctggagacagctcagccgtgaattgtgatgaggattcagggccgggcaggagggggctcaggtgccacaggagtcacacccttgctggccgggggggaaaaccacccaccatgtgcctccactcctttccagattaatgaagcttgaagaggaaaatattaaagttgccagtgcgtatacagtgacagttctaaacggagcagttgaaatgtttgcttgtcacatatgccgttggattcacagcctacttttaaaggctctgagcagatggcactttgcttataatatcatttctcctcaaatatagggtaaaggaatgcctcaaaacacaattattttaagtaaaacaatataaccaaaaagaagccttcgtgttgtcccattgtctgggcagcaggatgtgagggagtcactgtgctgattcgtatttttggacataaacagccagtggggacctggggggttgagtcccagtgaagcctgtgggctcttctgaccaccctgtcccactgtcagcctcacacctcatggtgcactcagcctggctgcacccttggccagggctgggaccccagtgggagctgcagccttgggcatgggtgggcagagttggggacatcctcgttgctgccctgacctcccctgctgttccctgacccggttcatgtgggtcccattccaagctccagaccttgggatgggcagtgaagggctggagaccctgagctgccatattcccccagacaacactcagggatggctccgagggcaggtgcatttctcactgagatctgcaccaatggaaatggaaggtacattggtggcttgaaaacatcactgtggcaggaaagcagcagcccagcggggtccctccccgccccccgcctggccttctgactgtcatgtcacacacactcaacatctcatccaaccccctcctgcaaaaaataaaaagataactgagggtgattgctcattaaacgtaaagggaactcctactgtactggctcagtttgagaggggaatggtgacttacgttagcgctgactcaaccctgaccctgtctcatcactgacatcacaaagcctttttatacaccttcttggtttttctacttctgttacctaagctgagagacagagagctctttccaaacattttaacgtaaaaaagtagtaatgattacaaaccaaaaaacattttcacaaagaatacaattatatatattggaaaataagtcatgttacttcctcagtacattttgcaggtgatcagtgactatctgaggctggtgatgcaggggtaagaagaatttcccaagacaggtgccagcaaagaaaggcagatttgttagagaaagtaggaaaatatgctgcaagaaagcaatgggcagggcagcaagagaggaactggctgccaggagatgaaggcttgctggggattttataggatggtgcttgtgctggagagggaagtactgataatgcccaggttgcagtgagctaacttgcatttttctatcagctgaggcatttgatgagacgttgaattgtttgatgataaattaggcacaggaagattgtaggtgagttacctgcacaggagggctacgtgccctggaccatgaagagaggcagacttagagcttatctgcttcctctgtttcttttccttggtcctgccaacctgacttgttttccctaattaggactccacagtaccccttcacccagacccaagttcaataatgtctgtgtgtccctctctggggttctttacacacataggggcatctgtattcatgcgatatttgaataaacagacatcaccacaataccctcaacaacacttcctagagagcatcccacctcatagacctgcctattgttttgtgtggacataaaatattccattgtgatggtgccctgcagttcacctaacttgatgggtgttcaggctgtccacagcaggcttttgctctcaagaaatactgcaataaacatccttattcaaaatctaatttgctgcctatacgcatatgtgtgcaaatatatgagccatttgctaagatggacttgttgggctagagatacatggatttcagattttgatgatgttagattgctcgccaaataacagtcccctctacagttacgtaggggtctctattttcatctctgagaaatttaaaaaatcgtacaattgatgactccactattaaagaaacaatgatttcagaaagaaagaaatgtggggtttttttgtttttgttttttgtttgtttttgtttgtttttgccaagactgctcaccgaagtctttgctaacatcaataaattgctatgggaagaaaagaaagcattgcacattaaggtgatagctattcttggtcaaaagccactataaaaaagccaagtgaaatgagagattaatttccattgcgaatttgcagctaatgccacagggctgtgcagcttgtttctcagctcgtaggagcacatgctcagctgaagtttaatgatattttcttgcacaagacacagtaccagaaagtattgttttgatacctaattaaatgtgaacaagccgttttggatgttagcaacttatgacatatctgcttccagatattaaatacaagttgtcgtgtgtgggtgtagaattgctgatccaaagcttttgtgttaagaaataaaaactctgcatttggtcagacagggtggtgagtgtggggtcccaagcagagagccgtggagctctgaatacttgtaatgatgcagtgacaggcatcagaattccagaggtgattactcgttgccagtccttctacagtgcaaggggttcttgagggctggtgaaaaataactggaaggagagaaaggcagataggagggaaaggaaggcagcccctgctctcctccttgctccttcctgtccccatgctcagtggagcactgccctgctttgcacaccccacgtcgaggaagcccaaggcctgctgactgcaccccgtggatgtcttccatgatccgatccctctgggccggcccttcctgtcaccccctccccagcctgcatgcacactgtcattcggcttggccgggtctccccgatcctcctccctactcttgcaccttgacagtcctttctccggggaccaccgcgggtctcatcaaaacgcgcatctatccctgtgcccggcagtctgatgacgccaggcaggtttgcccctgcctgcctctcaaccccacgctgtgcccctttccttctgggtgcgggtgacccaacccctctgctattatgggctgaatggtgtccccccaaattcccatgctgaatccctaatccccaggacctcagaagggactgtatttggacataccaccttcaaagaggcaattaagttaaactgaggtggctgaggtggggcttcatccaataggacttgggtcctgataagaagaggagattggggcacagacatgcacagagggatgatcctgtgaggacacagggagaagacaccctctacaagccaaggagagaggcctcaggagaaaccaaccctgatgacattttgaccttggacttccagcctccaggactgtgagaaaatgcatttgcattggttaagctgcctggtctgtggtcttttgttatgacagccccagaaaatgaatacaatggttttttactcctggaactcatttcttgtgtctcagagtctatgtccttcttctctgcacttggacctatgacatccaagcagagactgctggctacaggctaggacacactccatgacatgcacagcacatctcacctgtgatgtttaatgctgactacatgttgaaggggtaacaattgcatctactgtttactgggctaaatagaatgtactgttcacaccaacttcacgtacttttccttttcactgtggctcctagaatcatttcaggccacacatggctccctgtgtgctcactggggctggctcaactgcttgctctggttcgtcccgcaccacctcccaccacatcccactcagagccataatcatccctctgtcttgctcagatattagccctgattccacttctgtcccctccagatagggcagctgttgctgctgcctgatctcagtcacctgtgctctctcagcctccaggtcattactaaatgtgtgtgtgtgtgtgtgtgtgcacgcatgcatgtatctactactggattaatgtccaccattttaaaaaacattaagtttcaaaggaaagtgtgtcttcagcgctcgctgctgtctcctgatgcacagcacagtgcctggcatacctttagggctcaataaacagaattttcttactgaacgggtctgaatcccattgtgtgttcagtagtaaaactgcagtgaacatttctgtcatcaggagcaacagcaagtgtctgaggattagaggttagaattcagagctatcacctaaaagcatcacatggacatttaaaattctcagtagagcattttttccttctaatgaagctttcctaaacctgtgacattggtttaatttgtgcaggagtttcctccttgtatttgtttaaatgcccccagaagctcggaaagcaggaagtggtttgaaggggattcagacaaggttagctggggaggccgtcaccgggagcctgagtccatggagtcatctgttcttgggccacttttagattcagcctttgtggacaagcaggggtttccataggattgagtccactgtcccaaattcagcagggatagtttttgctcaaggcatagaatgttaggaaaaggctggcagactacggagcaggagtgtttcctcattcagtagtgacagccagtgaaggggaggaattggaggtccaatccacctgtcagatgctttatacgttcataattaactggactgctaacaaggcctgtctaaagtaaacaccttctctgcttggctcctgaagggctacaaacattttttttaaaaacaataaatacattaatgaatgaatgaatgccatggataacaaaacagtggactgtcagaataagaacggtcaaaatatgtgctaaggtgcagccaggacagaattgaagtcttttgatctcaaggttctatgttagactattttagttagcatgtttgataagacttgcagagttattcatccacaaacttctgggctcacagagctggctttcataactcctgttcctcatgcagcctctaacctatactggacctccccaccctccaggtgctagtcctgaagcctggagtttttggaagtctcttccctctccagaaggaaggatttgatgtcatcacttatacgtggtggaactcatcagcacccgtgagccaactccctcaggtgtttctaagccttttatctctaattatggaacaaatggctttgtctactgttgaaggctgtgagggctccggggagagtaaaagcctggggtttctgacctgcaaggggccttggcaacaatccctactcagcgcttcattttccacatgaacaatctgagtctggggagattagggcttgtcaaggccgccatgtctagccttgagggcaaaccactaggctgttgtgtgatggtcaatgtgggtaagaagacctggagactgcaaaacaggaccccaagccaccacctggagcgctgtcatcttctcctctctcgtttttgtcatcgtcctcatatagtaaaaggataaaaatataactcaaaataataatctgagatacaaaataaattatttttcctattggatataatttagaattacttcttttcaaaacgacctgtgatattgttttccaaaagaagttaatggcaaactcacagatgataaaattcttataaaggatactgaaattcattcattctttaatatatttgactcttccaaccatggctacaaatgtgtcagcttcaatatagtgatattgccttgtttataatactaacctaagactgtcactgcagaagcaaactagagaaaaggttaaattaaaagaaaaattacttcaaatttctatggtagttatattgaggaaacataagaaaaataatgatttattgaaatttcctttaaataatcaattagggcattgtatagtgtctcttgcagatgggcaggctggtcatacaggaatcctggtccaccccacagggtttcccaaagtgtgtaccacggaacactagttccttggaatggcaggggacattgcacagagaaatgattctttagccaaaaagcctcagtaaaacttaaatctttctctagtaatcgacttcttggagcctttaatattttaatctgatgttatgtatcttgtttgggttttcatcatgtaatttttctggttcttttgattattattagagcagttattattttgttcagatttaattccaaagagtatttctcaaaccatattctgtacggttttactacaagcattctctacacagaaatattgattaagcatcacatcttgctgtgaaattcaaagtttttgaaattcatgcttaaaatagcaaattgtttcatatattaattggagtaatgtgctatttagctaatccattgccttgcaaactgtcaggtagaagacaatctcttctgagggtcactggtgtgtatacaatgtgtatgcctattctataagctggacactgatttttcactcttacttagtcttaattgaacacaaatcagggcttttaaactgtacatgcacgacccacaaccggtggcacttccttccactaacaatgtgtctgagtgaagtgtgtgggaaataaatgcaatggccccattcaggggaatggtggggtctgactcaccttattcttggtcagtccctagaataattaacaatcaacactcaaatcgatcaatcctattgaagagattttgaaatgaaactaaaagtaaggtacatttggacaattagagaaataggacaagcacatttacgttttttcagtccgggttttggaagcagcaggagctggacaggctcagagccgagggagggagggttatggggttaggatgagcagatgtctgggagtggggtcttcatgactcacagcaaaggtgaggcctgtgggtgggaagcagagggggcacctgagccacgtgcatcctggggctccttttcacgtgaagcctctgcatggaaggttacacagctccacgcctgcaccgggagggagaccttgcgactcgccatggttctcaggggcagcgagatgaacagggatgtgtgggtcatgggccccccgtgccagatatgactcctcttgggttttgtgcagcgaggagaatggaagcctgaaaacagcgcatctgttcagcagacggttcactcaccaccagcagcctcagatggtcaggtcacttcttggaacctctgattctgaacccacaaaaacagacaccagctgccctgcatggtgaagtgaggatactcttcttcctggcaagaatgggctctgcagaaccgaccaggcccaccgtgtactttgagaacccccttaccagcggtgcagctcagagcagacagagtgacccccgagcctcagctgttctcagcattaacaggctcacacagcaaggagcagagctcacatcagatgctcagtagtgacggttttcttccttttacctcaagctatccactttaggggtcgttaccattgattcagtcactcatttattcattaagagcttattaaacaatctcatatatagacggtgagagtgctatggagataaagaggcagaggcaaagggcaggagcaaagatccatgtgtaggtctgtgtgtgcatgtatacacagaaacatgcatgtttgtgagagtgtgtgcatgtatacacataaacatgcatgcgagagcgtatgtgcatgtatgcaagaaacatgaatgtgtgtgcatgtatgcaaacatacatgtatgtgagaccatgcatgtgtatgtatacatggaaacatgcatgtgtaggtgtgtctgtgcatacacatgggtgcatgtgtgtatatatgtacatgtgtttgtgagagtgcatgcatgtgtgtgtacatgtgtgcatccatgtacacacacatgcatgaggacacacacatgcatgagggcacacacgtgcagatgtaattgtgaaagtgtgcatatgtgtatgcctgtgtgtgggatgcacatgtgtatgtgagagaatatgtgcatgcatgtgtgtggggtgtgcctgtgtgtatgcctgcgtgtgtatgtgtgcatgcacatatacatgcacacacatgcattgtgtatatgtgcatccatgcatgtctgtgtgcatatatgcacacacatgtccatgtttgcatgtagtatcacacatgtatattgtgtgtatgtgtttgcatgtgtctgtgtatgcacacatgcatatatgtgtcacgtttatatgcctgtgtatatgtgcgtatatgcatgtttgtgtgtgcacatgtgcattgtgtatgtgcctgtttgtgtgtatgcacgtgtgttgtgctttgcgtttatatgtgtgcacgtgtgttttgtgttcatgtgcattgtgtgtgcatgtgtagaggcagtgagtgaggtcgtgacagattttatatggaaatacacacatatttatgtcttttaaaatggtggaaattatatatgatttctcctgtttttttactttggtagtgataatatttatgctttaagcagccttttatttcaacccccattcctaacattgtgattaaaggccctttccaattgctttgtcctctgagggtatgttatcagaggtggtagacatttaggcctggcagctgcatcctgttgaactcccagtgtccagcggacctgcccacctggacaggctgtgcctccgctgagagatgaatgcttctcaggcctgcccagggtctggagcctgggtggtagcctcctcctgtagggcattctgctcaggacctgggacctggggctgaactgcaaagaggctagaggctgtgacaaggtggatgcaggtgacccttggcacttctgaccctgtactcccttccttggtcccagcctccaccagcttctagagcaagtttgtccaacctgcagcctatgggccacatgcagcccatgatggctttgaatgcccaacacaaatttgtaagctttcttaaaacatgatgagattattttgtgattttttttttttagcttattagctatcgttaatgttagtgtattttatgtgtggcccaagacagttcttcttctgatgtggcccagggaagccaaaagattggacacccctgatctaaaggttttcatttctgtttcttctcttgaatccacctccctgctcatctgggtgggggctgctcgggcctctgtgtgcgaacactgctgtgggtctggttatttgcccacccacacacctaaacacacacattccccacagccctgtggcaagagggtcagcctctcttccgaaaggaaaatcaaacaaaatccagggaaactgatgagatttccttgaaagcaacatgttccaggtcttctcccctcttgtcttccttgttgctcagttttcagatgccagcaagtcagtagtgtgaacattgactgaacactgagcgagacagacacagagaacacgtggctcaaacctgccccatcactggaggcatcgatgcacaagacggtgagaagaaacttggtgagaaagaaaaactaggaagacattgagaaagtgagaaaagattcatctacacagatcagcaaaactccaaaagaagccccacagttgatactgaaatgctgtcttctctaatgagaaattggctgctttgtgtgtccatcctgaaccccagacaagggtgggtgggaagagaaaccccacaggctccctctgcatgctcccaggatgtgctgcagtgtgagtccccggcgggctgacggaaaagcccggaaccagttggggcccgtgacctgagcacggtgtattgaagccctgatggaattcttcagtggatcctgtcatcccccaaatgccccgactccctgcaacttctctttcgacttgcttactccgtaaccgtgaattcatccctatttgaaggttcctctcaagaagtacagcaaggcagaagtcaggttactgggctgtgaggagcggttgggaatggatagtttcttatgcagttctctaaacattaaacaataatacgcgactttcacctgtcagaaaaactacacacctttgttagaatgatgggtttccaatggttacatattaataaatcaacatctctacctctcccactgccctctctggcttccctctttagtagttactcacatgctccctgtcccacgtaccaacatgtttaatcagatggtaaagacttaaaactccttttcttttaaaattgtaggtgttgctttttctctttcttatgaacagccttaatcaagttttcccctacactgaagatgccacccattagcaggtgcgggacacggaacattgccacccgtggaatgaggaatagagcttggaggccactctgacctttgagagccaccttcaacaaaggcggtctccacagccactggagggggctctgcgacctccgatgtcatgcacagagcatgggggagagacatacgcttcctcttcctgccttccagacagctgaagatcccctttcttgttggaataacaatatgttgctcatggaagaaaaaattcgaacatcctcatccataattcccagaacatccctgggctgacactgcagctgggtatgagagacgcataggagtaaaaacttgatggaaaaagcaacttctaatgttggaaaaaggcacatctgtgtgttgtgtaaaagggtagttaaaggtggagcagaacattcaaaaatagacttaattgtaataaaaacagtgaaggtagaaagagttgaaggggcaaatgacttttaaaaaatttattattattattttttaaatggcatcttgctctgtcgctcaggctggaatgcaatggcattatcttgggtcactgcaacttctgcctcccaagttcaagcagttctccctgcctcagcctcctgagtagctgggattacaggcacccaccaccaggctgagctaacttttgtatttttagtagagattgggtttcgccatgttggccaggctggtctcaagctcctgacctcaacttatacatccacctcggcctcccgaagtgctgggattacaggcatgagccaccatgcctggctgcaaatgactttttttaaacctcatttggtcaaggctgacactgcagtgattttaagcgttatcaaattaaagatgcatccactgccagctgcagcatactgcaatcccactccacctggagaccaggcgctcaccaatacacgcaatcccactctaccaggagaccaggcgctcgccaatacactcaatcccactccaccgggagaccgggcactcgccaatacacgcaatcccactccaccgggagaccaggtgctcaccagtacacgcaatcccactccaccgggagaccaggcgctcgccaatacacgcaatcccactccaccgggagaccaggcgctcgccaatacactcaatcccactccaccgggagaccgggcactcgccaatacacgcaatcccactccaccgggagaccaggtgctcaccagtacacgcaatcccactccaccgggagaccaggcgctcgccaatacacgcaatcccactccaccgggagaccaggcgctcgccaatacactcaatcccactccaccgggagaccaggcgctcgccaatacactcaatcccactccaccgggagaccaggcgctagtcaatacactcaatcccactccaccgggagaccaggcgctagtcaatacacgcaaacccacttccaccagggagaccggggcactcgccaatacacacaatcccactccaccggggagaccaggcgctcgtcaatacactcaatcccactccaccggggagaccaggcactcaccaatacacgcaatcccactccaccgggagaccaggcgctagtcaatacacgcaatcccactccaccgggagaccagacgctagtcaatacacgcaatcccactccaccaggagaccgggcactcgccaatacacgcaatcccactccaccgggagaccaggcgctagtcaatacacgcaatcccactccaccaggagaccgggcactcgccaacacacacaatcccactccaccgggagaccaggcgctcgtcaatacactcaatcccactccaccgggagaccaggcgctcgccaatacactcaatcccactccaccgggagaccaggcactcgccaacacacacaatcccactccaccaggagaccaggcgctcgccaatacacgcaatcccactccaccaggagaccaggcgctcgccaatacactcaatcccactccaccgggagaccaggcgctagtcaatacacgcaatcccactctaccaggagaccgggcactcgccaacacacacaatcccactccaccgggagaccaggcgctcgccaatacactcaatcccactccaccgggagaccaggcgctagtcaatacacgcaatcccactccaccaggagaccgggcactcgccaacacacacaatcccactccaccgggagaccaggcgctcgtcaatacactcaatcccactccaccgggagaccaggcgctcgccaatacactcaatcccactccaccgggagaccaggcactcgccaacacacacaatcccactccaccgggagaccagacgctagtcaatacacgcaatcccactccaccgggagaccgggcgctcgccaatacatgcaatcccactccaccgggagaccaggcgctagtcaatacacgcaatcccactccaccaggagaccgggcactcgccaacacacacaatcccactccaccgggagaccaggcgctcgtcaatacactcaatcccactccaccgggagaccaggcgctcgccaatacactcaatcccactccaccgggagaccaggcactcgccaacacacacaatcccactccaccaggagaccaggcgctcgccaatacacgcaatcccactccaccgggagaccaggcgctcgccaatacactcaatcccactccaccgggagaccaggcactcgccaacacacacaatcccactccaccaggagaccaggcgctcgccaatacactcaatcccactccaccgggagaccaggcgctagtcaatacacgcaatcccactctaccaggagaccgggcactcgccaatacacacaatcccactccaccgggagaccaggcgctcgtcaatacactcaatcccactccaccgggagaccaggcactcaccaatacacgcaatcccactccaccgggagaccaggcgctagtcaatacacgcaatcccactccaccgggagaccagacgctagtcaatacacgcaatcccactccaccaggagaccgggcactcgccaatacacgcaatcccactccaccgggagaccaggcgctagtcaatacacgcaatcccactccaccaggagaccaggcgctcgccaatacacgcaatcccactccaccgggagaccaggcgctcgccaatacactcaatcccactccaccgggagaccaggcattctcgccaacacacacaatcccactccaccaggagaccaggcgctcgccaatacactcaatcccactccaccaggagaccaggcgctagtcaatacacgcaatcccactctaccaggagaccgggcactcgccaacacacacaatcccactccaccgggagaccaggcgctcgtcaatacactcaatcccactccaccgggagaccaggcactcgccaatacacgcaatcccactccaccgggagaccaggcgctagtcaatacacgcaatcccactccaccgggagaccgggcactcgccaatacacgcaatcccactccacagggagaccaggcgctcaccagtacacgcaatcccactccaccgggagaccaggcgctcgccaatacactcaatcccactccaccgggagaccaggcgctcgtcaatacattccatggtatagaggcgtgtgtatgcttggcttgagggaaatgaagaaagactgtgaaatttaaagaaagacaaagagaaagaagtgggagagagagtcatgctcagagttcacctgctgatgtagaagccctgattggccattccctgaagatgaggtggaggctcctttctgtatgtgaccaggacagagaatgctgcatcccacagggtgaatctaccaatgactgataatggaattgttcatccaccttcaaatgcataaggcaaatatacagacttaagtatgagaacaactcatcattgtagcactctgtataaaagcacaatttttgaattaaactcaattttgacagtagtggataaccataacccattcattagatggaattaccatgcagtcaccatgttttagagacgaccctcaaacccctcttgaatacaaaggctgaggagggaagatgaaggaagagggtgagggtctggggcccttgactcttcctctctcttgaggtctctctgtcccagcacctgggcaggtagggaatcccgaaaatctggggattttcctccatgtccatcactctcttcccttttctctccacctgtcttgattaaaatccagattgtccaagcgatggctgctaatccacaaaagtcacccctctattctcagactcactgaactccagtgaccctgctttgcttgagcactgtaagaccttctgcccccattccccagggtacatgctcctgccggcctctctgggccccacatttgagaatgaatgcctcactggcagtgctctcgctgattttctcccacaagttcagacaagatctcagactggccctcctttagaggaatgtttcaccacatgcgatgatgagtatgggttatttttaaaagcagattgcaatgcaagattcaaggtatgaaccacttgctacagttataagcagtaaagaattagctactgttatcttcagatggtagggactcattttcattgtcttactaacacttttcagtattttcagaagtttctgcaatgaatcttcagtaattgtattatcagaaaaaagacacaaacacaatgaatacagaatgattttgagtgtgggatagcgagttgcatggagaagcagacccgttcactgattcactgcacatgtaagcacgtgctacaccaggggctcatctgagttctccagatacagcaattaaaaggaaaaaaggatgagggcttcagtcctagtggaactgagcattttcatgggtggagggcatgggcataaatagcaagggggtgggggctgcaggttgaaggggcatccagggaacacctgatgaggagggtgacattttagcgtacttctaagggaatagaggatggggcctgtggggacctggaggagtggagctccaccccgaggcacagcaggtgcaaaggcttggagcctggatgctggtgagcagtgaggaggctgaggggtggggggagacttttttaagacaagagaaatagtagtgtgtgtttgagtaggcagggatgatccagcagagaggggagagttgatggtgcaggagacgatgcaagaactggaaagtgaggtatgtggagtcacatctcccttaaaaatagaatggggagattttgcatcaaataggataaaacagattattagctgtttagcataataatcttaaaatgattaattgatgattttgcctgaatcctcagatgaatttttcatcttgcagccttgtgtgctttttaggtaagagaacccaatggtcattgtatctgggagcgtttctttgaaagcaaggtgttttttgaaagtagcatttggccatattaagtccaccaaatcttttgaccactgttcactatacactggctttcaactggattcaccttttgttaaatgcggtcaaccacgggaatgagtgaccttgcgactttcacaggggactcactcctaagaggtggtgttcagccagggggaagacctagcaagccgtgattgattttagtttgtttattggatgctacattagctatctattgctttgtgacaagttacctcaagagttagtatcttaaaagaacaaacactatatctaacttcctgtgggtcaggaatccaggagcagcctcactcttgctgtaagacagcggtcctgtccccaacctttctggcaccagggatggctggttttgtggaagacaatttttccatggactgggggctgcagggatggtttcaggatgattcaagcacattatatttattgtgcactttatttctattaatattacattgtaatatataatgaaataattatataactcagcataatgtagaatcagtgggagtcctgagcttgttttcctgcaactcgatggccccacctggggatgatgggagacagtgacagatcatcaggcattagattttcataaggagtctgcaacctggatcccttacaagcacagttagcaataggatccccactcctataggaatctaatgccactgtgacctgacagaaggcagagctcagacataatgtgagtggcagagagtggctgtaaatatagatgaagccttgctcactaacctcctgctgtgcagcccagctcctaacaggtcctggaccagtaccagtccttggcccgggggctggagacgtctgagttaaagcatctaactctggggttttgtgaggggtacatataaagtggtttggaatcatgtgggattattgatattattacaaagaataaatctgatagggtctcagagagcctggaagcacagaatgataaaaaagctagtgtgggtcaagatgttaaaggggcagggagtattgagaacggtgagcttgcatatgccagcctgagcctccactctctcactgaggagcccagcagtttatcatttgagcaggaaaagggtgcaggggagaccatgagggcgtgggcaccacccagccatgagtctcagaggcaataaccccatgagcacagacccacaggcaaagccctgggagaagtcctttcaaagcttttcaatatgtgtgaaaaaaattgcagctgaaatcccataatttcattaaaaaaataaagaaacaaatgtaggttgatttttaaaattatttaattaaagtggcatttcttcacattttccaaacctctgtagcctcagaatggcttagaccctaaagtcctcttgatctaatgacgaaaccactttgacactttgaggacacaggtggatgggccaaggcggctgtgcttggcagggttgcaggggctgcattctacatggtgcctctgcccactctatgccggttttgtggctggggagggtagtgtggtctggaagagtggccggtatgatggacaaggcagctgacgtggatggcaccaggggtcctgggggaccggagaggacggactgggtcacttgatcacagtgtcaccggagccccagggcagcagcaggaggagaggcggcagatggggtgagaagggctgcaaggccaggtaggttctcaggatgttaggcaggcagctgagcgggggttaatgaacagaatgcaatggagattgtttacagacagttttgtagagaacaagcttaatctgaaaatttcagacataactgtcctgaaatgcagggtgcggcaattaaggtgaagcaatctatttattcccatcattcaccatcagatgattttactgtctccacctaaagctgttcttacaaagaagcgtgtgaggcctctcaatattgtgctgctctgagggttccagggatagctgccgtccgcctctgtggataatgactcacagggacaatgagaggtatacttgggaagttatttgaatttggagatcaaattttgctttgattgattttttttttctcttaagtattgcttccctagctattctaggatcagaaagtgacaaaacacttcacggtgaattacagtggtttaatgccttattttaaatttatgtttaccattttatcttcttgttttttgttctttagctgaggttctagtacacatgaatgctttaccagccattagctgtgattagtggagctgcagtgaatgacggtaatgtgagcagcatcaaatgttgacttgcttttatcagagagcagagaatgtacagaatcagctgtgtgctcaaattcactttgctaaaacgctagtgttttcgctccctaccctggaagcataggtgatgctttttctctcctgagtagagcttgactagggtcaaggccatacttatcgacatggctgaccatgtttcttgcctttcagaagcagaacattccatgcatgaaaaatggtgagaaatgggtacaaagagaactggggaataggaacagcttgggagtagaagaggtgagcacccctaggcttcaaaaatctcctctcctttgctgtttttcctgtgggctggcctttgtcccagaagccagaaggccagccacaggtatttacatattcaggcaacacattttgtgctgcagtgatttcttcttctcaaggcaacaaatccaaatggtgttccaggagagtattttcggtaccttttgattcctccaagtatttttatttcaaaggaaaacagtcctacttttcaacaaacagagggcctggcgctggactagaatctgcaggatgatgttgctttctgcagtaattgagaatcagaagcctggtttctcaggtatttttatcttctgcctgtgtgtgaagtcaaaaatcttactccattaaataaacacacattgacgtgctaatcagaaagacaacactggccttataacaggaggagactgatggggaacaaaagaatcacaccctccactgaggacaacctctccagggacaccagagtggtgaacggcaggaagtggggtttttgttgggcaggaagtagggtttcattgggcaggaagtgggattttctttgggcaaagggtttccccggggcctcctgacatggcttcatgcgttcctctcttcaggtacccggtccagagtgaagagggagatacaccccacagaaaaagtttaggatttttatttcatcaaatggatatcaaaattatttcgatcacaacaaacattgtttccagaaaatatgcccttttcccctggattcctttacaggtgcttccttcacgcggtgtcccggattcctgcaccggcgcacagctcagcaccgcggccccgatctgcccaggacctgcccataggcgcctcctttcactgatgccacctcagatccacctcgtcagaggaggcagagggaagactccgaaggaggaatagaggggtgtgtcccacggggcttcaaatcctcatgcaccccgttttccagaattttctgtgaacgtttgtctgccccagtgagagctcatcttaatcttgatttgtagcgtctttggccagtggtcttctcacaagcaggcattttctccacattgtcttttgaatccggtttcctaatgtagcctttgagacgtcctgatgcggaaaattaatcttgttacttgatgaagatggtgtttgaaaatcgatcccgtggcctggtctgttaggtggagagtggttcctgtgcagaactgtgcctcacctgaggacgggcagactcgggctgtctggagagtgtgggttaaccactatacagggatgccttcctgggcttggttcggcacagttagacttctccaaatgtatacatttcatctcctttctttataaactagacatttggctcagaagactgtgaagatgaagcttggttaaagctgtttcctgcaggcagcacagaattcagacctttgtctgattggtcctctgcttgttgggggaccagcccggtccacacacagcagagtcagcactggtcagtgggagaggttgcagggggctctaaaaagagtttctggcctccattttttctcatcatgaaaaatactgtattcagagttgttaacattctacaatgtgttaaagcctaagacccaggtcccttcaggaaaatgacacggtagcttgtgctcacatgagggtggaaatgacaggtatgcaatgctggaaggcagaggcaagccgcagctctgtctggggctctgctccgtgcgggctgccttctgtcccttggggttccagtttctccatagcagagattctagtttaactcgtatcttttgatgcctgttcaaagtggaagattataggaactcaggggagttttctatgttgcaggagaggtgagaagatcaaaggggatgaagaaaagggaccctgggctcccaacgccagggtgcctacctgcagtttaaccagggcagaccccacaccaagccttggtctgagaagcccaatctgctcctcaaaggaaagaatgcatttacttgggaaaatctgccctgactaaatatgtattaattttcaatggaaagggaagtatgaatatgtttgcctccttcctggtcagaatctttcagccagggtctgtgctggcagacaacaagacacaaggccctttagtcaagacgccaatcaagaatttgcaggaaaagctacaagaagaagaatgttcaaggagaggcatgggctttgggggcagccggggtcctgggagacattcaggttcaagtcctagttttgctaaattcaatatcattttagggcaagattttccttttctgtaaaatgggaatagtagcatctccctcctggggtcacagtgaggatttgacgaggatgtacacacagaagcacttggcacacaccacgtcaccatcacatatgaaatcctttttccttctttctacagtcactgcagaatccatcctccagcctgcaagccacacctgtgaacatgcaacccttgctgtatgtgagcagagggctgagggcatgggtggaaatccataggagaggactgtggtggtggacgcaagacacacctgaggtaaggaaaggaggaggccacgcagggaacattttaaatatggagggaggaggggaggtcacgtcgggtcctgagaaaccttctcagcctccatgctgaccccattgatctaaactaagaatgactgtttcataggtatttcctgctctagtgctgaatgagtctctctatggaagtcgctaagtggagacctacttatgttgccttttataataaagctagtacagtgtttgtgctaagtctcttaaggggatggtttagactttctgcaaattgctacaatgtacacagctaattaataacacaagttccctctgatgagggggaaagtatttcttgcctaaagagggatgttgtttagtcttgtaaaactgtagttatgtcttctctacgtcctgccaagcatgtcttcataaaaattagaaagaatccatctgttttcttgccacagactctaatttctttgtgaatcttatttggatttgaattccaatgagcaagcagcaaggtttgtgcaatgtttgttagctgctgactatgatgtggaagccgggctttcttttccatttttccttttcatattgtctttactttggagagacttttgatctgaaggaagctgaattatgtgtcattagaaagagtgaccctaagcacaggtggtgacttgagcttccaaggggggaacattctgaaagtatcttcaaagagtgctagtgggagagttccaatgatgcttcccatgctttctctctgtatagatgaccccatgcctagctcttcttacaggaagcccttggcacgtcaacacacccctctccttcccttacctcaaccagacaactaccttagcagctcagctgtgttattgagacatttcagcatgaaatttgtttttcctcactgaactttaagcagaatttcaagtgccaagtctctaaagccaagtggggctattaagagataattactaattatgctaatttgagaagttgctgctatttccttcctggtcattttatgtgcagctctcctgagagcacagtcccctcgcagggctaataaccttctctgcaaagtgctcagtcgaggacggtttgtcctaaacttccacgcctcaaaaccgggaaggttcacagttgagcggaaagggtggctttaggggagtctatgtcctcattgttaatgatttatactagttattacagcttctcacaggccagcagtagctattcctttatactcagcccagaagagtatatttaatttctaacctggctgtggtttccccctcatcatctctgagtcttaataatggatcccaagcattggaactgtcctcagggccctgcagcactaaatcagaggctggggccttgtgtgacattgataattaccatcctttctccaaaaaagttactatttaggagaaatataatggataagcaaaagcaattgccgaaactccctgggtttgagttgatcctgccactgggacacatgcacccagaagataagctggagggataaggatgagatgcctgggaatccagcctgcacttgggtgctgggggcaccttcccctccttcccactgtccttgccacttattcacggcactcacagggcaggggatagatgaggctggctggtaaatctggtgtgctgatcagtttatctgggttcacaccacactaccatcagcgtggactgcagagaggcacgaggaatgccgttgggcacctgactgtgagctcccgcagactctcaggctcttgcagcctctcagctttcacaccatgctcctaccttcagcttcgtctttactggccagaaagaccaccctggggcttcaccttcactccttgtctcatttctcagcttgttcaggccagtgtgaggaggaggacagctttgatacctccacagatgcttcccaggcctgtccggtggtcctgcagggtcaaatgtaaccaacctagaggatctaatttttggcccaaccccctgtgctctgcatttccatgtttgaaagttagttcttgcaaactctcagggcaccatcagccagtgacgtgtgttactctgaggcctggcccaccccgagcttgccaggccccaaaataggctcacaatggccagggacacgggtacctaacctcagcatcatctgggatgccaggcagccccatctggaagctcagggctggatctcaggtgttagtccttcctgtttggccagtggggagctgacttacacttaaaacatgagaagctgagaacaaactcaaggtctcctatctgtgagaacaaactcaaggtctcctgtctgtgagaacgaactcaaggtctcctatctggaggggaacccgctggacacccggtgccatgctgaggtcacagctctgaaggacgcacctgggaaactcctacccctggcggagaccagcatggatcctaggaacaccaccatagctgatgggagcactgagaatgttgataattggcactgattttgttcttctgctctttgatatagaacatagtctcatagaggattccttactaaggtgttttcctccacttgacaaagaagaaaacgtgagaataacaagagagctggagacctttagagctgatttccagctgtgtgatctgaggcaattcctcatttctcaggaacacagttgtgtcttgtatgatagcttccaacaaataggagttacaggcattgccaaagctctcgaggctaaagatttatttctctttcccatgaaaataagtaatgaaagagtttccctcctgcccaggctcttatagatttacatgcacagcttcctcctttataaggactaggataagaagaggctctgacatttccaggctattccaggttctagtagaattctcatagctgcctagaatttcatacaactctgaaccatgctatcaagccccccaaagcatcctgataagaaattaaaacctagacaaattctctgggtagcttattcatttaatgttagatggatgttgactttggattttccagccttctccaaatgctcataattttagttactcaaaatacacccagtaaaaatacatttacaaattataaatttgtaagatgtattaagaaaatacaacagttgataatgttcgaagctgtatttaaaacagatattctcaaattcgtgcaggaaacttcctccaggacaaagacctcagtgacaatgactattttctttttatgactcaatatttgcttatctcctgacacacagtaattgctcaaaacacgttttatacaacctagcctagcagaaatgcaacagtttattatgtaaaaattaatattttttgaaagatttcacacagctctagcaggcaaaaattacctggtttcatggcctcagttttatacaaaggtaagaagttatgaggtgtattgcagaatatactgcttttttttttctttgcgtgccttctgcatgaggagaggctgtgtggaagcacagggggcaggcacactgtgtgttctcaaagctggactggctgtggtctgtgggaagcaacccgggaggattgggaaagccccccttatcctacccagaaagctcttccagttactgaaaccaccattactttttttttttttgaaacggagtctccctctgtcccccagggaaggagggcactgggcgggatctcggttcactgcaagctctgcctcccgggttcacgccattctcctgcctcagcctcccgagtagctgggactacaggctcccaccacgacgcccaactaatttttttgtatttttagtagagacagggtttcaccgtgttagtcaggatggtcttaatctcctgacctcatgatctgcctgtcttggcctcccaaagtgctgggattacaggcgtgagccacagcacccggccaccaccattactttcactgcattggtcaaaaatgatttttcctactaacacgaagctccttagtcccgacagcagggttttcatcagtcatgtgtacttccctgtgaaatagtctatcaaatcatttccacttgtcaactagctgacatcagattttaatagtggccagtttgagaaaaaaagcatagttgttaggagtcaggcgatggaggctgcagacatggggcgcctggagggtaccgctcacacctgggtgccggcgaggggaccgcacatacctggggaggtgtgggtgatgggaggcgaaggcagaacctgcaaagtcccattcagttgatctgtttcaagaaagcttaagtggatcctacagcgcttgggatgaaattctctcttccccggaccggcatccaaccaccttaccacagaactgtctcgccatgtggagagttagagaagaacattagaacattaatccgggcagtgctgctcccagcatattacagtaggatgggcagggggcgaagcttggtgaaggaggtgggaaaggagcccagtgcactcttgataaatacaaacagagctgccatggctccgtgggtgtaaatggccacagcaggacggtgctgcaagactttctcacgtgggttccagggggttcaaagagcattggcaaagccacaatactcttctatttggtcaaaaagcaatgggaagagagtgtagtgaacctcagcacctgggctgcagaagcctgttaaacaagcgccatggccagaattcctcctgctgcagtacctggatacctccatgggtgaagtgccatgctccggtcccgtggggaacatggaaagatcaaagtcacccttgacactttaaagcaaattgtcaatgtattgcatgtcctcacttccttgaggacacagagagcgccaagttggaggactccggttacagacgtacataaaatgatatctgccatacaagcatgggccagggtcagatgcctggggacccagtggtctactgaacgtgcttcctggagctctgagggcaaagcttagttccttgttttgcataaagagactctgtgtgtgatttcacttaaaagatatttcattgcttcaaaaaacatttgatgggaaaacgtgtctagaaaatttcagaggaaggtactctttggactggattggtactaaaaccaaccaaacaaaaaccaatggacatttcagcagtttctatttaaaaattgacgccaggatttgaaatattacagtcagtgttccacatgaattttgcactgggtggaggaaggttggacgatttagattgcgttcgcagctgtcattgtgaagcacctccgtaaacgacgtgtgagtgtcgctatctagaaccggcatgaggaccaaacggaatttaggcaccatgtattttttaaggctaattgccaatctctctttcatttattaaaaaccaaagctaaaataattcacttactgagcatgtctaatctgcatgaagcctttacttcattggtcaaagctgcctctaggcacgcatctgaaccagccaacgcccatttaatgcctttttgaatctgtgcacactttcagaatgtggaaacagtcttctctgtattcagcctgaagtggtaaaagctacgcctgggtcctaactcccttcttatgtttcttatttaagtaactttacttgtctttcattcttttagatacataccctcctcccacagaaggcaggaagatcaatacctgcctttgcagacctgacacatccgtgcccatctgaaccttagaaagtggctccacgaagcctgtgagggctttcatttacccaggggtgtattttatagctgattctcactggacagcccattggaaccagctactcaaaagccagatgcttcagtgaagccttaacaaggggctattttttaaaattattatactttaagttttagggtacatgtgcacaacgtgcaggtttgttacatacgtatacatgtgccatgttggtgtgctgcacccattaactggtcatttagcattaggtatatctcctaatgctatccctcccccctccccccaccccacaacagtccccggtgtgtgatgttcccaacaaggggcttttatcatcatcatagccaattagtgatatctgctctcattctttcctaagtcaaataacctaattcttttctctctgtggtgtgacatcctggtttggttgcttttattagaaagcaagaagtctctaaatcattctgtttccctttttgccttgactgccaggaagcccagcatttcattcgatgctcagttgcaatagtcttattatccccagatttttccagtctacgtggaagtgtatttccattggcagaactttatctatgccttttatggcaatcctgtgaaattctttttggaaataagtagggtttgaaaatgaaataaaagtcactaagtgtgtttttaatatttgttttttactgtacaaatagattttgattgagaaactttcaaggttgtttaatattaaatgtgatttaaaaaaattgtagatgaaaattgacccccaaatctaggaaatgtaggaaagcttaagtatcctgaagcagaaacccagccagtggttccacatctgcttctcaccagtgtttcctcatctggccttcttctatcatcttacaaaggtcctgagaagaaaatcatatgctagttcttattttcaagcagttgaaactaaacccattaattttatgcaaaaaaacaaaaacaaaaacaggtattagaagtacacagagcactcctggagcgaccagctggtgccgctgaggaagccaggaggctccggaaggttccagagctgccttgcagcacagttaggcaatggcctccaacaccgctgctcacccctctgcctcagtggctggcgcaagctctgcacacccttccgaacagcagcagggctgcagggaatgctgcctgcaggtggtgctgtgcacacttctcgcccgactgctaacttggtgcaccctgttcattccacaactcacgcccagctgctgtatgcacactcccctcccgcccgctgagtcagtgtgccctgcgcgttccatcacgactcatgcacacctcctgtgcacactcctctcccgattgctaactgggtgcaccgtgcgcgttccacaatgactcatgcacacctgctgtgcatactcctcgcccgactgcttactcagttctccctgtacattccatcacgactcatgcacacctgctgagctccaaaaacacactgggcagcctctgtaactgccccaggcagaaagatgctttagactctgaagagccagaaaatgataaacatttgtccaatacagctggagacagtcaggaagaaggtgtgaaagatctaaaaagagcatgatccttggaaagacaatagacatttcagacaaagtaaaaattgtagattacttggtagacagctccattatgaagcagccagtgaaagttcttgatattgtgaattaatcatttgagcatttcctaattttattgcattgattgctaatattaagtgaggcattaatgtatcattccctccaaaacagttgtttaaagttgagataagtttagaaaacatggcatgtgtctcttttccttgggggttctcaatgtgcgttacctctaagaagtcttacagcaaaacaacctgatacatttatataaagcaaaataccccaaactttaaaaaataaatatatattacatgaaagttgatttggaaattttactttactccattacacagttgaagtggcatgccatggatgctttggcagatttaggattctgagatctctgagtatatatcccttatgactatcaaggagctatactgtagagaagatctacaagaaaaaagtctacaaaataaccgtaaagtttacatataccttgaataacaataaaccacatgcaggccttttgaattcactgggattggaagggctaaaggcactcctaaaattcctagagagcattagagagcatgcttcattgcacacattcatgttattctgatcacgttattctgatcacattattctgatcacaagttattctgatcacatgttattctgatcacatgttattctgatcacgtgtttcacaaccaagatgggaagcggctcctctgtctctgcttgggtttgtagtgtgcttttttttttttttttttttgctttttgtttttaaatctctgagctcttcccatttgcagacacagattggcccatgtatttctcaaagcaattttggggcagaaacattgtccagggccctgtgtatttggttgcacagggatctgagtcggggaagccctggggaccccagggcagctgggcctgtgtcagtgacaagtccatcctgacagagccgcaggtctgaacctccctctgcacccactcctcagacgggtcctcactctcagaccctgcgcgagaagggactccagtctctttctttcttttcttttctgttcttttctttcttccttcctttcctttctttctttctctctctctttcctttctttccttccttcctttcctttttccttccttcgtttttctttccttccttctttctttcttctttttttgagacagtctcgttctgtcaccaagtctggagtgcaatggcatgatctcagcccactgcaacctcctcctcccgggttcaggagattctcccgccccagactcccgagtagctgggactacaagcacacaccaccacgctggactaacttttgtatttttagtagagatggggtttcgtcatgtaggctaggctggtcttgaactcttgacctcaagtgatccacctgcctgggcctcccaaagtgctgggattataggtgtgagcccccacacccagacaccagtctttcaatatgtatggctaagggtggcttgcaagctgattttgggtggcatatgaaaaacttttaaacatgtattaaatgccatcttatattttaatgggaattagaacactataatgcaggcacatcaaactcacaagcctatgaataatatagttagaaaaatgctaaggaagaaaggaagggagggaaggagggagggaggaggaggaaaccaagaggcacaaacacagcagcaacagaaagtcgctgtttccatcatgctgagaaaacctaacacacatcataggaaggtgatggccggggcagaaactgaaaatatggaattcaaataactacaactgggggaaacttatatttggtcgtacttttttgattctggagcttagctcttcccactctccatgttccttgcctgtgacttggaggaatcatccagaacgtggtcccacccacatgcatggacggtcaggcttctgctggtagggaggctgcttcctcccagtgttcttgggcacctgtggccccactgccctgggaacacggtggggaatgaacatgctagcccccagggctgacccgaaatgtcacccttgcccttttgtgtgtgtgcatgcctccgtgtgagtccacaatcgagtctctctgcaaatgctgggctgtcctgtacctcctgccccgcctccatgtctgagcattgcccctgtgggaggaatgagacagggagcggcgtttagagattgcagctggcaacacggctctgagcatccctaaagcaggggccagggtcttcacggctgctttacctaggggggcagcacgacccagttgacaggcagaggccaggcccccaggttgtgtttctgactctgccctcccaggagggggctccaggctctggcttccagctcccaggcaggttcttgtggctgggactgtccctgagcctctcggcaagatgagagactttgcctttccatctcaattgattgtgaattaaggaactttggaaatttacctcgattgtagtggtcagattttcctatttttcttagctgtataatctgcctaaaagtttatctttaccttctttttgttgttgttgttgttgttttttgagacggctggagtgcagtggcgtgatgtcagctcgctgcaacctctgcctcccaggttcaagcaattctcccacctcagcctcccaagtagtagctgggattacaggtgtgtgttaccatacctggctagtttttgtattttcagtagaaacagggtttcaccatgttggccaggctggtcttgaactcctgacctcaggtgattggctcacctcagcctcccaaagtgctgggattacaggtgtgaaccaccatgcctggcccacctttaccttctacaatgcccagggcactacagtctcacacactcctctattctcttgctctccaaattgggatcccatcattttacaccactgattcttctctcatgaagtgcaacatttcaaatctttggatttcagaaaaaacaatgccttctaaattgaatatatgatatctatagaataaactaatttgttccctagctccattgaatcagaagcattttatacagtggccttttgataaaaaattgctaaaagaaacaaaaccaaaaattggcaaatgggacctaattaaactaaagagcttctgcgcagcaaaagaagccatcaacagagcaacagacaacctacggattgggagaaaatatttgcaaaccatgtatctgacaaaggttcagaatctataaggaacctaaataaatcaacaagcaaaaaacaaacaaccctattaaaaaatgggcaaaggacatgatcaaacacgttctctaaagaagacaaacatgcgatccacaagcatgtgaaaaacattgaacgtgactaatcattagagaaatgcaaatcaaaatcaccatgcaataccatctcataccagtcagaatggctatgacaaaaagtcagaaggtatcagatgctggcaaagctatggaaaaaagagaatgcttatacactgttagtgggaatgtaaattagctcagccaacttttccaaagacctaaaacagaactaccattcaacccagcagtcacattcctgggggtatacccaccccccaccaaataaattgttctgcttaaaagacacatgcacttatatgttcatcgcagcactattcacaatagcaaaggcatggaatcaatctagtgcctattgatggtggattggataaagaaaatgaggtccacatacactgtggaatataatgcagccatgaaaaagaataaaatcatgttctttgcagcaacatggatgcagctagaggctgttaccctgagaaaattaacagaggaatagaaaaccaaataccacatgttctcacttataagtgggaggtaaacactgagtattcatggacacaggtatgggaacaacacacactgggaacactagaagggtccggagaagaacaaggattgaaaaactgccaggtactatgctcactccctggctgagaagatcctataccaaacctcagcgacacccaatttattcagggaagaaactcacacatgttaactgaatctgaaataaaagttgagtatcccctgaatctaaaataaaagtggaaaaaaataggttaacttgtagatggcaaaaaaaattgccaaaagagaaatctaggggcagtctttatttgaatatttagcagagtaatcggtattgtctcatggatgatggggtgaaatgggacattatttctactttggcccacactgcaggagcatgcgggggcctctgggcccctggacacgtggaaaccctgtggcaaaacatttggaggagcaggaagctcactcaaggcaaatttgggggcagcaactaatatcatatggaaaaagaagaggagctggtataaaagacgtttattaacgtgtgtgcccgatgtcctggcgccactggctcgctgcagtgcttctgtctggaaggttttcagaaagcaaaggcacccacctcctctccctgcacaaagccgctttgaatgtgcatcttcccactgctcggatgaagatgatttcaaaaatgggaattcaattgtggaactttatgaggaagaatacagttaacataactgaaaacaaggccagcactcgcttgaaggaaatgcaggaagagattaatttgacaaacctgcatctccagctcaagtttggccttcctctgcttgaggggatgtcagcagaaagaagggccctggccccagcagagaagttaattcatcatcatcaaaattatgtaaataattcaagtcactttttaaaaataaagctataaagagaagaatacaaaccaaaatattgcaagaggtgacattttgctgtatgtgttcagataagaccaaacgaatgttgacgttgacataaaataattcagaaagaacaagtatcaaacacagactttaaaagtaccaccttactgtcagcgtgttttctatattttcccaagtagctttcacctagtgggattctatttatactgaattaggtgggcttgctgtgtgcatacacatcacagggagtgcaaagacacacacacgctggacacattagtgttaggtacacagattgcaagtgatttctgttggaagtcaattgggactttgcacaggaaggtattttacacataaagaattttatgcattattgcaacggcagcaaagctcacaaaagcccatttaagccaaatgtacagagggccttgtgtggcctcagtgtcacatacaatattatctcaatgatgtgtctgttctggactgagctctggatctcagggacacagcatttgtgctttcatctaccctcagccttggcctcatcccagcccttggtcagtgctcctggggtccacaggactgactggagaggggtccagagaaatcgtctccatctgcccccttgtcgaagttcagcggcatgagagcacccctcattcctggtgatcagagattgatacttactggctcattgctaataaaatgccaccaagaatcggggatttgtttactatatttaaaggtttaaaatgtttaactatcagaagtcctacctgtgagtgtttatgtaaaacgactttataagtaagattgggaacagatgggaagagctattttagtcagttggtgtgtcatgaaattgtgtagactctatttcactgtaaacccttcgttacactgtgggggtgctacaacgttacaacatgttttcttgggagggtcgcacttatttaacctttaaattgacatttggggcactggtcacttagagtgagttcaaatgtcctggctattattgtgcatgcagatttatttctgtaatctacttttcattcactgacttactgaggttaaaatagaacatgcacatttacctgtggcttcaattccactttgttttaccagcactgactctgaatcagttaatctaagaagtgacttcttgtttatgcaggcaagtggatgaaagtatcctctacacaaacacacaggggcacacaagggaacgcagtaggtcctcattgtaaatctacatgcccggtaacccaaagcatgagtatcaacctgataagcacactttgtaattttcaaatttagttccgggttttatcgaatgaataatgtgctgtatttcattccgtttcttggtagcacatcaacttcctattttttctattcttctcttgggaaatagaatgaaaaattccctcacccctcgtcttaattcattgcattccttaaagatttttaccttgtgctgtgattaataattattttggaattcaatgtacttattatatagatatctgaaaaatgaagacgtttgcctatctgaatctagttcaacgacctctgcagtttcctttaaccctcaaatcaaaaacgtgtattacttaagcaagcaaaagcacagtggagtgtgcctatacatacgtgtatatttacccatattcatatacatgtgtacacacacacatacacgcacacacaggtgtgcacatacacactaaggtgtcctatattcatattcatgtgtacacatgcacatacacacacatgcacacacaggtgtggacaacacatgtcactaaggtgtgagctgggctgcacgctattcagtatctccctggaaacgggagcgcatgccccttctcagaaggcccttgtgtgtcatggtcctatgatgtagcttttacggccactgctaacacactgtttctgagacttctgttttaacagcaacatggaagagcttccagcagtgtcttttctaagtggcgattcgctctacattgcccagagaacatctgctcctgagttttgtgctcctgtcctctggggacctgagctctccccgtggcctttctgaacccacctgttcaatcctgctccagggccttggtcccttcttaagcaaagaacagccggtggggccggagggaccaggctctgattcaggcttgctctcaccatctcgctttcttcggtagccacttgcattctttgggcctcacttccctcatccaggagatagagacacagtttagttgatggtgtcttaggtcctttttacctccccataagagagttatgaagcagaccttatcaaacctgggaaaagaactgtcagcgagaagtgagaacggtccgcttgccacctgcacaggggacagcagcccttcttagaatcaccacggttctctccatctttaatgagaaatgggcaccttccaaagggccaggaagggagaaatcaaaaggtggaatgaaataaaactacttaccttctaaccaccctgttagagggcaccacgtggcaaagacatcaaggggaacctaatcagaggttagttcaattccaaaagtatttctcaccctggagacgtgatggttttctagcagtgatgctacagggatgaaggtgggatttatgaattttctggcccttattgaggtagagataatgtttctgggaaaagggcactgataccctaaccgtaagctttagttttcagaaaatgtttccgaaggtgaatttctgtggttttctctctgtcatgggctgaatggtgttcccccaaaattcatgcatttaagtcctgacctgtggtgcctcacagtgtgaccatatttgaagatggggtctttaaagaggtgcgcaaggtaaaatgaagctgaaaacatacagctgaaaagcgtgcagccaagattaaaagcacatgcatgtgcctgtgtgtcctcaggactggggctttttctgctgctggcttttcagctgcacccatctctgcatctggcccatacagaaccatgaggtgcacaattcttgcctggctaattattctaactgtaaagagctgttatctgtgtcctggtggtgtcgaaggacactctcacaggatcaggtgaaagcactcttctccctgagaggtcagggcacatagcctgcctggtttatcttcgttcccaagggacagatgcaccaagcccccaaaagcatctccatcagagccagtcccccaaaccccagcagcctcggaggctccttgtgtgcgcagcagcaggagggcctgcctgtcatcctgggtccccgacagaaagtgatgatgctcctcatttccatggccagggtcccactgtgctctctgcctcagtgagccacagcctggtggggtcctggaagagcttcaggtcccatagagcaataaaagaagaaccagaggaaagaataaattggtctggaagttccatattcaaaatgggggaccctagccacgtctaccctttgtgggagagaggatgtaacctagggtgggggccacagaactttaataagcaggggtgtcgtagggagaatgtggacagccacaatgcctgatgaggggccacaggtacttgctctaacctctccacgccaacgctgtaaaatgaagacaataaatgtcactgccttgtagtgttgttgggaggattaaatgaggcaatgcacatgaagctgttaggacaggataagggctcagtaaatattagttattaatctttagttcctattgcctaagggccaaacggacaatcagttaaacagacgcactgcactgattcacacctgactgagcgcatggaccctgcagagaaggaaagtcccaaccagatgaacctgccaggacatgtcctccctgcatcgtgctaacctcaggggccgcgttaacgtgctgtaaaatagatacatccaatctcatgaatttttagtgaatatattttgcctggaatgtgagtaaaggggcacgtccctgactcctgaaccggagtggtctcgcgatgtcacatggctgtggcacacacgcggttctatttatttcttctccatcatgggtaggggggcctctttctgacatgagcccagactagaatgtcattccttcttgcaaaaatacatcagaataaatcacatgtcaccgcttcagagtcacatgaaaaacactcgcaagtgagtcctgcagcccagaggaagagacgcccaggactctgcggtgggggaagaccccctccccgcgccgggaagagacgtccaggaccctgaagcagggaaagccccccaccacccagaagagacgcccaggaccccacagcgggggaattacccacccacccggggcaacacccgagagagcagggagcaaagacattcacttccaggacagaaggccacgctgccgcactcgtatccgaagtttgaatgtcctcagccgcagatgcgttttttgttatgagtgacaagaacgctgacacaagacactaacctttctagaggtgcgggtgaagctatcctgggaaacactaaggaatcagctcatcccgaaccgaaggaaggtgagaagtcccagggagagaggcatgaaggccatttcttcagccacactggactacggataaaatgttttcatagtcaagagtacaggggctaaccccagaattctactgtgtttatcagtgattacgcataaatatgtacaaacagtatacagcattcaatctgttgactgatttccattttagcaactcgcatttttagtttccctgatgttcaagttttgaggtattactaaatactattacgggtaaggatctctgcccaactgctgcagccaatattcctgtggccaaaaatgagcagagcctaggcaagtagcacatatgacagaattttatttattctctacagtgcggttgggtgtagcctctacatatgtctcctgcttacttagtgtgtatgagagaaaaggaacagacgatagattgtttagattctaggtgatagatgacagatcagtaaggtagatggtagatagttggatgatgggtgattgatatgattccaaagttatctaataagataagaccaagagacatgctgtctacatagaaacaagggaccattcactctcggtgactgtcgccttttccgttccctatccgatatccacagtattgagtggacgtggtgctgccagcaccttctgtgactctatggatgactctgtaaatcgtgtgagacagatgagtgtgtatcctgcttcacatgaccgacctccaggcaaagagatgccgtccttggtcacgaacgaggccatgctctgttgagagtcagagtcctcggtttccccagctgcctggatttttcatgagataggcaggcagcacttgccctgagctgcaagaagccagagggtcctgggccctgggcagtgcctggctctccgtagatggggagctggggacctgcttgcaggtgagggagactggagagcagctgtgcattcaggagggaggagtgtggggaggagtgtgtgcatcccagtgagacctcaggggctcacgctggaagcacagcagaggggccagggagagggcccggggaaggacagcgagggcgcccatcttcaacagagaccacggagaaggcaaaccacattcagacttgctctctggcgtttttagaacatgttctagagcttctgttcctgcttaatctctaccatgtagcacagtgactgacaacgaaaggtgttcagtaaatgtttgctgaatggacagactccaatttacataactgtggcttaaaaataaacccgacagggcgctttgtaaatgtacaatgtaaatctgataataaattctacaacaagcatgtattcgtggtatgcggcgagacaatctctatgctggtttctgggagcccagagatgtggattttggcccccattcttgagaaatcccaacaaaggaggaagcaccaccagcacccacacctgcggggagccccgcagagcaaaaccaaggaagatgtcttctctgctcgtctcgtcaccccaaaggtggtcatggaagccacctccaaaccctactccacgctgagtgctgccctgtgtaaaagacgacagctcagcccatctctccacagcctcccccgaaaatgttcccctctcccagagagttccgattatttaagaaattcttattacaaaaacgcaatcagttttctcagtgggttttaattgagtagctattatgttttgatattgtagaaagaatagaaatgttcaaacttaaaggggtttacattttaacggtttagttttacaaagaactttcatttgatataataaaggaaatacaatagaaatctatttttgtaagcccatctgatgataatttatatatatatatagtgttgagatcacggaaggttatttttgttccctgttcggatttcatgtgtgtgcctctgtatctccataaacaatagaagctcaggaggaagggccgcgtccactccttttgctcatgtcattgtgatgcctcactctttgcctgtctcacggtaggcactggagatagatttacacatgaataaataaataaataagactcatgcccaatacagtttttgtctaaagacacatataatgtttaaggcaaaattgcaaacagagcagaattggatagcacgcaccatactttaaaatcaagtgttctttctgtattggtagccacataaagcaaaatgcaagaaagatgaactttaatcaggcacaggaagagacttggaagttattctttgtctctctttccattaaaatcccttccttcacaccaatgtggttgttgtttctcttttatgatgtaagaagatagattttttttattagtggcaatgacaaaaagatttatttcagttggtgtaaaatatgcacaaagggagactttaaacaatgatgttttgcaatttttacaattaagcaattagtgtttctctccatactctaaaacacagtcacaaaccaacattctttttcattgcctcccaaagaatttgtgctctcagaggtttagtgaagatttctttctctacatgatttttgtaatgtttatattagactgctgctgttctagagctggggagtcttttaatatttcaactttctctatttgaataaacgcttttgtgctttacctcttgagtctgtcatccctctacgtcgtgtgcatatattagacatctgcacaaacacacaagtgcacatgttaacggcatgccttctattcattacccacatacaagagcccctgtcatgatttaacttccctgaagcaaaaatttgattaaaaactcaggtgattacataaaattatatgaactctcacatttgttatacttaaaaacaaagaaccttaacttcctaaatggctaataaatatttccctgcaggtcagtcagtgctgaatatatacccatctttagttcctgagagtgaaacagtataaggatgttggaataatgctttgctacacatcaaagctattatacttctagaggcaacagcttttgctctcagttcagtatcactcagggctgtcaaagtttctacattcctcatgctactgtcttggagttttttcaaaagctactgcttatcctagtacttttcctagaactccaacaatgatgtttatctcaaaattatttcttcttcagaaaaaattggcatagaattctgagaattttcaaaatttctccttgagccatgtattttggattgaaaactctgttagaattctttgagagcctggatagtcctttaaaaaggttatctgtagtagtaacatttagaattgaagcatgaataaaatatctttgtgtctgtggttaaattaggctacctatgtttttctttacctaaggaatagtaaaaggtattgttttttaataaaacaaatcatttgtagatccccaaatttataaaaacaatgtcctttttaattgtacacatcagatagtgtctgagcttgtatatactttacatttctgtcctcagtcctgaacacagtctaacacaaagagggcaggtacttccttaaagaatgtggctattttcacagctataagcccaatgcaagcacagcatctgctccagacagggatgagtgaacccagccagacttggggtttggaggaggtcagaatctattctactgatgtttctgtcatgtttattaaattgcatttttttcccaaatgcaattacacttttaggaaatattgcaattattttaaagagaggacatttttatacttccggtggacttaaactaataaaacctgctttttgtttaatcattatcagcgccctaggtatatgctttgagctctcctgctatgggtctcaagtcctgcttcttagcaacagtaaggaccctctactcgtttgtttttagccataagaagagatttgacttgggttagcattttcaggtaggaggaggctccagtttctgagaactgagctccccatcctattttaataccacctttgagaagacgtatttgagaaatcacatcagacattagggaaatgatgaggcagagcttctgtctgtcggcagtgggaaacaagaatcaaagacttcatctcaaataaatggagcagcacagattaattaaatcgataaattctccaaagcacatcctggttaaggggtttaaaggaattctttccattatgtgcaaatcacctgaaggtgttgagctatcatttgggcataagattcactccatctattagaggccctagagaagtgggtttacaaatagattctgagcaatgttcattttatttatgatccaaatggcaaaacaacagccacagagagaaacctggatctgttttgcaaatgagtgatctgttgctggcaccgttaaaaagacgtgcagtgatgaacgtggccagatttgagttagagatccgtaggagtgagacggtacttaacaccaaaaataataactgccccctttcacctttgcatccccactgctgggtttctctttctgatccgtgggagattttgcttgtacacagtgtggccctcttccgcgtgaggcttcagctggtgtgaccatttgcatcagaactgaattagctgtttagttacacaaacacgagggtcctagttgccctctgccttggaagcagctcaacgaagccacctgaatgccacaattttaagtgtacacagctgaaaaaactttcaaaaatttcacctcttagagagttgaaataaatttccttaaaatctaagtcacctgagcatttatatcatctttctcttcgaacttaagcacacatgttactcttctttttttataggaatgcatgatttattggacactatttcttaagtataaaatcccctccttaatataaatatggaatttagatgatctgttctgctatgttttcagattaaaaaactgaacgttaactattgatcatttttgtaatttaaaacagatgatactaaattccaatatatatgtattttataacccaaagaggacttaccagacattttcctgccagaaactagatactaactgtattcattcaccatcaataaaataatacaatgtaattattttgctgctcttcctactcaatacctatgactagaataaaaggtgattaaatatccacagtgcatatggagggcctgggaaattcagattaactctttatttccaaatatagatcgttcttcagaaaagtctgctatctttgcaaatgaccaaattttaggggctggagggagattgtggatctcttgaaaagcaaacatgtcagtttctaagttgctaatatttggatgtggtttccgggaaaatggattcactcataaacttgcagatggagattcagggcctacgagccctgtttgctagggcgttgcttaaacaatgtcaggcaagcaatcagataaaatagccccgtcctccattccttttaaatcaaataaacgagtaaataaaagcccaattttaattgctgaacagggatgtcttgatactaagacagtaacatatgcaagcagagaggagttctggctccaaggtcctaaatttctcaatgttcccttcccttcctgttttctaaagtctcaccagagcacgttagctgtccctgtgaaccaaaaattttataagcattgtttcttctctttttgaatgtaatgtctctatttgatattggtatgttcttaattgagttatatcaaaagctaggaataaacaatcgcctttgaaaaatcaagtattaagcagcctctgtttctctgagtggagaaaaaacttttaattgtacagatagaggttaatttagtttcattctatttgcaaatacttaacaacacgaatcaggttctcggccacacaccaggcagagtgcagcccctgctgcttttcttgagctatcctaaccacagagacggcatcaacacacagtagtttgaatattctgtgaagggcagccaggcttttcatagttcacttggcattcattcacctttattcgtatattcggtttcaaaatggcaataagcacttataaagtcttgcttacaatgtggaaaattatccttttagaaatcttgtgagctagtaattaagaaccaaatttaaaactgcaatatctgttttgatataatatttttaaatgatgagaaacagagtattacaataattttggttttaggagttgttcaaaattgttcatattgcaaaaatactgacattcattttctactattttggaaaaagaagtagggggtataaaaattgctcaaatgtttcagctgcttttaccgtgtatatacatatacatacatacatagtaatatacatgtatatatataatatgtatgtgtgtatatatatcatactatacagatgtatagttttaaaattgaacattaaatgcttttagggcataagttatcttttcatgcctcaaaaaaaaaaaaaaaatttccttttctatgtttccttacgtaatgcgcttctgagatggttcttctgcaggaaccgagtcacccctgtttagatatggatacacgaatcccatatttttattctacattcaaactcgcacgtcatatctaatgcccttgaagcaatctccaattactgttattacatgggtcactagaaaccagaggcactgatacaaaatttttaaaaagagaaagggggaaaaaaagcaccacacaattaggtgctggttaacggttgaatcaatttgattttatcagtaaatccagcccttcctcttgagctgtcagtgagcgagataagcggaggatgtggggctccggccggcggtgcaggactgtgtccctggccagccagggtgacaccggcggggacgactgtagcattgcaggggctgcggagcccacggccgctctgccctcatcctcagcacaatctttctatttcattaatttttcatggattttcatttcacagcaagccggcgtctgccatccatctgctcgacttattttgttccttttgccaactttttatttgcatttcacaacattcagcaacctgcccgttctccacaccttcccatgagtcatggctttacttttatagagctacctcgtgctcaaaatgtattttcaagtttctaaaactctgtataaccaaccactctagaacaatacctaaatttcaagataacttattttgctgtcaaatgcctcaaagaggtgtcctgtgccaaagctcaaatgcaacccgaccggccccggatgattgcggatcctgcatggccagtcacccctgaagccccttcccctttccactctgtgaagattgacacgccgcttctaaaaccccagcctccaatgtaccttgtggaatcagctgattttggattggccctcaatctatttccaaatatgtttgccttgaaacagcctttttcaaagaaaaattctggaaacttcagtcattttacacattgtacacagtaatgggtagaagattaaaaatatttcatttgcaaaatgcctttcatgccaatgcatagcttcttttagaaaaaaaaatacattcacaaaagagagaaaaacagatagacaaagcagaatatatgcactgttttaataactaaaaacatttaagaaattcctcatacatactaccctgaagttattccagggttcagagaattattggcatattttaaagtgatttatttttatatactctactgttttgttgagttctgcctcttaatctacctggttgaacggatattaacaaaaaaaaccctttttctttattattttttggttaaagtgtatccttttttaatacgtacacattgagctattttctaatacaggcagatattactctatataaccacataatatggattttgttgtacataattaccaagaactataaaataaagtgcaatctcctggtactgtgtgagaaatgaactccaggggtatttagtgatggcaggtaacagtctccataacctccaagtgctactattttccgaacgcctctgagtgaggcaggcgcgggacacactgacgtgtctggcatgtgtcatgggatatgaacgttgctttgccgcgatgtaaaaatgagagagattttccctgtccttctcatagttttttttttttcagcagcttgtttttctcttatatgagagtcaaattttggcatttttcatttacataaaaaatttaaaccatttatgaataatttctaaaagaaagtccctgctgaaaaataacacagaaaacacaaaattgtacaacactaggtcccagtaaaataacagaagtaggattgatgtgtggggagacatattctgagaaccttctttaaagtttatttgagagagaaatacaggttcctgccaaataatacctgaaagtcatattctgtgacgaaggtgttttttttttttttttttttaaagatacatacagctgcctttgtggcatagtaactaaaatataacttctacagaaaaaaatatcatttccaagactatggattatacttaatgaaagtattgtgtcctgaccacccttcagtggtagccccggcatgctttatttcagagctcacagatcattttgataagaagcatatcatgccaaagtcactctcagagtcacacatagaaaaggagccagatgtcaccacactgggaaattaaagttatcatgcatcttcaaaaatgattcttgtcccttagactaggtagaaatacgcatctgacaggcaacagggtcagcatgtatcttaattgtctttattcccccataagaacagcccttaccttgtgcttctgtcagtgtcttcagttagcacctaatagagccacactaaattccttaacagtctctcatacacacgtggattttaaattgtggcaagtatagagttttaatatcagataagcttaaaattgaggttattctattcatttatggttgttaagattcatgacaattagaacataatttaaactcaccattgtttttataaaataaaaaatatcagcatctgtaataactaggtatcatagatgaagtaatcaattcccaggaaaatgcaaataattatttaatgtgtctcttagctggttactttaccttttaatttgatcagttacatctacatggttaacgtttccccaaaaattgaatctttagccgtttgatttgactttcctatcaagatagctgccggcaggtgccctgggaaattctcccgcacgccagaaatctcttcgtaacagaaatcagtgtacaaaacctgaatgccctttcccgcttcaatttttggctatgaaaattaagggacttgacatattcaaaataaccaaggtatggaaatatttgctataggagttttattttgaattgctaaagttaagtttatagcaaatgaagtctttccccagatttcctttttccccctaaattgaatactttctaagctagcatgactgacgcttcctggcaaggcaagtgaatttggagaaaggcaacactttcctcctgtttatatttataaaatgcattattgcgaactattactccacattcttcaactctaaatatttaaatagactaatcaaaaaatattgggaaatgtgaacatttcaagtgtaaagatgatgcttcctttttcctcttttaaaagtcatattcattattcaatccggtgactttctcaatatcaatgccactttgtgttggcattatctttggaggacactaacaggtctgtttcaaaatgataatttcaaacaacaaagtgaatcgcaagcgcacacttagcagctgagaggtaaatgagaaccacaacatcacctcccttctgaaaccaaaggctccaaaaccttttgaggaagttgtgggggccaatccctcccagtggtcctgacgttcggtcataatgaatgactgtttgctattgacatttatgcctgctgactgtctggataatttctattattggaagaggcaataaaggacctggtgacggttcgagggcacacaggaaacggtctggtagaaacttatcttaggccaatgcaaagatgaaaattcttcaggaaagatggacaaccccaaacacacctaacgttgcctcctgctttcaaacaactggcaaagctgatcaattctagctgtgtttttccaaccgttctttatacttctacctcacttaaaaaaaatcagcacatttcaaatcatgattagaactgaactttctcctgcaggctcactaggaactgacaataacacaggttcctctaggagagaagggtcggcatgagaagaatcttttaattcttcctggcatgcacacaggctacgatggcactgggggcattgctctcatattggagcgattgctaattttgcaaaatccccagtgtgaaagccctcccttgctgtagcattgactaacttcagcgcggcccagccccaggaatatcagtaacaaggcacagctgagtttgtcagtggccgctgtcagccggctgcttttcctgctttcctggtttgcggtttttttctaccactaacaaaatatgatgcttctttctgttttcctgtattcatttctgcttatttctccaaggacgagccctgtgttctctttacgacccaatgtttacaaatcgacgggcaccacattgagtaaaaactgccagccaatttggagaggcgatcgcagggcttcgcctatcccttcctccgggacagtttggatgggagtagctggcgcgagggctcgttcccccgtttttgggtaattcctttggcactgggagacgagatggcctccggagggtggaaggcagtgccagcccggccggccactggggactgcggggcccggagacgcgcggggtccccggggagctcctcgccgccctcgccccacttcgtccgggtccctcaaacatgtcgcagcgtggctgctcactgtcccctctgggcaagaggaggccccagacatttccacgggatctgaactcccgagcgccctgcacggagcagccatcccgccagcaccccaaagtgaagctgctcacaacggacaagcccggagaccccatgagaggccggggtggagaagccgggggtgaaggggggcaggggccggcgcgccacgcggtccttacctttccgcttggacctccgcctcctcctcctcttggacttgcatttgagttgactgctcagccctccagaccctctgccgctccccaggaccgaggccatggccgagacccaggcgcggagcccagagccgcctccctcctgcacctgcacctgcctccttcccggcagccgccgccgccgctgctgcgaagcttgaggttgcaaacccgggagcggctcacttttcaggactgagcaggaaagcgcgctccgtctctctgtctctcgaattgttctctatgacttgctcccactgggctgggggcctcggctgggcgcctggagcgagctgctccctggtcagggagggcggggaagggcgcgcggcgtcctgagtgctccgagcttcccgcgggctctgcctcctgctctgggctcccagcgcagggaggctacttttgcgcctctgctagttgtttggcaccagccactttgaagccaatcacgcagggagcttgtctatttgctgcagcagcgtctaattagatccaatcacaactgctttctggctctgacatcagcagcagcaccagccgcaccgccgcctggccgcttgcaaactcagctcccgtttggacggtgaagctcccaggaccggcggctggagggaggctgctcccggggaacaaggacgcggcgcgggtgcgtctgggagagaccgggggagcctccaggagggaccctgcccgggaggacgaggcctcctgccgcagcctcgcggacagctcagctcgccctgctcagaaagacacagggacgggtttttccaaccaacagtttttaactagtcaattcattaccatgctccttgtgtcaagggggggaaatacctctttcagaaatgcagagaccgcacttcctcagaaacggactgaggtttgcaattccccaggagacagcgtcctgaggggcatttattcctcagagcctgcatgcttgtctgtttgcctcttctttcccctcttcatattccttggccgtttccaatgcaaaagataaatcttgcataaagacagaggttttgggatctgagtctgatttttgccgtcaggaatttcatgtgttgctttatttagggaacaatgacacaaaaggaagagaaagctctcagcggagagttttgttgccaaatgtaatatttggatggaagaaagtaacatttacaaagaggtggattgcacactgaaatagttttaagcaatttttttttccaggaatgtcctatgtttcaagattatacttatggaaccctggaagtcttatgtaaaatataaagaggaatagaatctggtaatcatcattgcatcttgtatttaaatcacataagcttttaattacaatagtcatgtttttaaaaaaatccactctaaaattcattagcacacattaacatgttgatataaaaatggcacacaaatatttctgctattcattgcctcacatgcaaccttttcagctgcttatgtgcctagaaatttccagataatttttatcataagaaaaaagaatcactctgggggacattggaaataattaggatgatcctgtgttgttatgtgctgagctgatagatcgtagctcagttttcattgatgagagagagtaagacatttgatttcaaatcttaactctactgctatgacctcgggtaagttaaaccgtgcctcagtttcctcatctgtaaactggggataacaacgtcacccacctcataagttcattcatactcgttgaatcagtatcaaccagtatagacaggaactggaacatgttaattactctatgattatttattaaattttttccagcaaataatttggaaggaatgagcgtatgttgcagacaagcctcagaaagacagggcttctgcgttttccttttagaat

(The sequence listing continues in the following parts.)
